United States Patent Application Publication US 2018/0126003 A1 - sequence listing, part 82

SEQ ID NO: 148878 - protein, 586 aa, Artificial Sequence
  derived and/or modified sequence
MGKQNIPLDGHEADEIPEGLFTPDNFQALLECRINSGEEVLRKRFETTAVNTLFCSKTQQRQMLEICESCIREETLREVRDSHFFSIITDDVVDIAGEEHLPVLVRFVDESHNLREEFIGFLPYEADAEILAVKFHTMITEKWGLNMEYCRGQAYIVSSGFSSKMKVVASRLLEKYPQAIYTLCSSCALNMWLAKSVPVMGVSVALGTIEEVCSFFHRSPQLLLELDNVISVLFQNSKERGKELKEICHSQWTGRHDAFEILVELLQALVLCLDGINSDTNIRWNNYIAGRAFVLCSAVSDFDFIVTIVVLKNVLSFTRAFGKNLQGQTSDVFFAAGSLTAVLHSLNEVMENIEVYHEFWFEEATNLATKLDIQMKLPGKFRRAHQGNLESQLTSESYYKETLSVPTVEHIIQELKDIFSEQHLKALKCLSLVPSVMGQLKFNTSEEHHADMYRSDLPNPDTLSAELHCWRIKWKHRGKDIELPSTIYEALHLPDIKFFPNVYALLKVLCILPVMKVENERYENGRKRLKAYLRNTLTDQRSSNLALLNINFDIKHDLDLMVDTYIKLYTSKSELPTDNSETVENT

SEQ ID NO: 148879 - DNA, 2286 bp, Artificial Sequence
  derived and/or modified sequence
atgcccaatttttgcgccgcacccaattgtacgcgaaaatcaactcagtccgatcttgccttcttccggtttccgagagaccctgctagatgtcaaaagtgggtcgagaactgtagacgggccgacctcgaggacaaaactccagaccagctaaacaagcattaccgcctgtgtgctaagcacttcgagacatctatgatttgtaggacctcgccatatcgaacagtgctgcgcgataacgcaattcccacaatcttcgacctgacttcccatctgaacaaccctcactccaggcaccggaagcggatcaaagagctgtctgaagatgagattcggaccctgaaacagaagaagatagacgaaacctccgagcaggaacagaagcataaagaaacaaataacagcaatgcccagaatcctagcgaggaggagggagagggccaggatgaggacatactgcctttgacactggaggagaaagaaaataaagagtatttgaaatcactctttgagatcctaatcctcatgggtaagcaaaacatccccctggacggacatgaagcagatgaaatccctgagggactttttacgcctgataattttcaggcactgttagaatgtagaattaacagtggcgaggaagtgctccggaagagattcgagacaacagccgttaacacattgttctgcagcaaaacacagcagcgccagatgctggagatttgtgaatcctgcatcagagaggaaacactcagagaggtgcgagactcacatttttttagcattataactgatgacgttgtcgacatcgctggagaggaacacctgccggtgttagtgaggtttgtagacgagtcgcataacctgcgtgaggagtttattgggttcttaccatatgaagccgacgccgaaatcctggctgtaaagttccacactatgattacggaaaagtggggactaaatatggagtactgtcgcgggcaggcgtacattgtctcctccggattcagttctaagatgaaggtggtggcctcacggctgctcgaaaagtatccgcaggcaatttacactctgtgcagcagctgtgctcttaatatgtggctcgccaaatccgtgcccgtgatgggcgtgagtgtagcacttgggacaatcgaggaagtgtgctccttttttcatagatcccctcaactactgctggagctggacaatgtgatcagcgttctattccagaattccaaggagagggggaaggaacttaaggagatttgccactcccaatggaccggcagacacgatgctttcgaaatcctggttgagctattgcaggctctggtactgtgtctggacggaataaactcagacaccaatattcgatggaacaattatatcgcgggtcgggcatttgttctgtgttctgcagtcagcgacttcgacttcatcgtaaccattgtggtcctcaagaatgtgttgtcgttcactagagcctttggcaaaaacctgcagggacagacctccgatgtgttttttgccgctgggtcccttaccgctgtactgcattctttaaatgaagtcatggagaacatcgaggtttatcacgaattctggtttgaggaagctactaatctggcaacaaaactggacatacaaatgaagctgcctgggaagttccgcagagctcaccagggcaatctagagtcacagctcacgtccgagagctactataaggagaccttatcggtcccaacagtcgagcacatcatccaggaactgaaggatatcttttcagagcaacatctgaaagcactcaagtgcctaagtctggtgccgtccgtcatggggcagcttaagtttaatacgagtgaagaacaccacgccgacatgtatcgttcagacctgccaaatccagacactctgtccgccgagctgcactgttggcggatcaagtggaaacaccgaggcaaggacatcgaactgcctagcacaatctacgaagccctccacctgcctgacattaaattctttccaaatgtgtacgcccttttaaaagtgttatgtatcctgccagtgatgaaggttgaaaatgagcgctacgagaacggaaggaaacgcctgaaagcgtatttgagaaacaccctcaccgatcagaggagctccaacctagcgctccttaacattaacttcgacatcaaacatgacttggatcttatggtggatacgtatataaagttgtacacttctaagtctgagctgcccactgacaactccgagacagtcgaaaatacttag

SEQ ID NO: 148880 - DNA, 1761 bp, Artificial Sequence
  derived and/or modified sequence
atgggcaaacagaacattcccttagatggccacgaggcagacgagatccccgagggactcttcacaccggacaatttccaggcgctcctggagtgtcggattaacagcggagaagaggtgctgcggaaacgctttgagactaccgcagtgaacacactcttctgtagcaaaacgcaacaaagacagatgctggagatatgtgagtcttgcatccgtgaggagacccttcgggaggtaagagacagtcacttcttctcaatcatcactgacgacgtcgtagacatagcgggagaagagcaccttccagtgctcgtcaggtttgtggacgagtcgcacaacttacgtgaggagtttataggcttcctgccatatgaggcagacgcagagatcctggcagtgaaattccacactatgattacagaaaagtggggattaaatatggagtactgtaggggccaggcatacatcgttagtagtggtttctcctcaaagatgaaggtcgttgctagcaggctgttggaaaagtatccacaggcaatttacacgctttgttcttcctgcgcactgaatatgtggctggccaaaagtgtccccgtgatgggtgtttccgtggctcttggaacaatcgaggaggtatgcagcttttttcatagatctccacagcttcttctggaactggataatgtgatctcagtattgtttcagaactcaaaagagcgtgggaaagagctcaaggagatatgccacagtcagtggaccggacggcacgatgcattcgagatcctcgtcgagctgttacaggccttggtgttatgcctggatgggatcaatagcgataccaacatccggtggaacaactatatagcagggcgggccttcgtgttgtgctctgcagtgtcggactttgatttcattgtgactatagtcgtactgaaaaacgtgctctcctttacacgggcctttggaaaaaacttgcaaggccaaacttctgatgtgttcttcgcagctggctcactgacggctgtgctgcactcgctcaacgaagtcatggagaatatcgaagtctatcatgaattttggttcgaggaagctacgaacctggccaccaaactggacattcagatgaagctcccaggtaagttcagaagggcccatcaggggaatctggaaagccagctgacatcagaaagttattacaaggagactctgagcgtaccaactgtcgagcacattattcaggaactaaaagacatcttctccgaacagcaccttaaagccctcaaatgtcttagcctggttccctccgttatgggtcagctcaagttcaatacatcagaggagcaccatgccgatatgtatcgctctgatctgcctaatcctgacacactgtctgcagagttacactgttggagaatcaagtggaagcatcgggggaaggacatcgagctgccctccaccatttatgaggcgctccacctgccagacattaagttcttccccaacgtgtacgccctgctgaaggtactttgtattttgcctgtcatgaaagttgagaacgagcggtacgagaatggcaggaagcgattaaaggcctatttgcggaacactctgactgaccagcggagcagcaatctcgcactcttgaatatcaacttcgacatcaagcatgaccttgatctcatggtcgacacgtatattaaactgtatacctcaaagagtgagctgcctaccgataactccgaaactgtagaaaatacgtag

SEQ ID NO: 148881 - DNA, 2286 bp, Artificial Sequence
  derived and/or modified sequence
atgcccaacttctgtgccgcccccaactgcaccaggaagagcacccagagcgacctggccttcttccgcttcccccgggaccctgcccgctgccagaagtgggtggagaactgcagaagagctgacctggaggacaagaccccagaccagctgaacaagcactaccgcctgtgtgccaagcactttgagacctccatgatctgcaggaccagcccctacagaacagtgctgcgggacaatgccatccccaccatctttgacctgaccagccacctgaacaacccccacagccgccacaggaagaggatcaaggagctgtctgaagatgagatccgcaccctgaagcagaagaagattgatgagaccagcgagcaggagcagaagcacaaggagaccaacaacagcaatgcccagaaccccagcgaggaggagggggagggccaggatgaggacatcctgcccctgaccctggaggagaaggagaacaaggagtacctgaagagcctgtttgagatcctgatcctgatgggcaagcagaacatccccctggatggccacgaggctgatgagatccctgagggcctcttcaccccagacaacttccaggccctgctggagtgccgcatcaacagcggggaggaggtgctgaggaagagatttgagaccacagctgtgaacaccctcttctgcagcaagacccagcagaggcagatgctggagatctgtgagagctgcatccgggaggagaccctgcgggaggtgcgggacagccacttcttcagcatcatcacagatgatgtggtggacattgctggggaggagcacctgcctgtgctggtgcgctttgtggatgagagccacaacctgcgggaggagttcatcggcttcctgccctatgaagcagatgctgagatcctggccgtgaagttccacaccatgatcacagagaagtggggcctgaacatggagtactgccggggccaggcctacatcgtgagcagcggcttcagcagcaagatgaaggtggtggccagccggctgctggagaagtacccccaggccatctacaccctgtgcagcagctgtgccctgaacatgtggctggccaagtctgtgcctgtgatgggcgtgtctgtggccctgggcaccatcgaggaggtgtgcagcttcttccacaggagcccccagctgctgctggagctggacaacgtcatctctgtgctcttccagaacagcaaggagcggggcaaggagctgaaggagatctgccacagccagtggacaggaagacatgatgcctttgagatcctggtggagctgctgcaggccctggtgctgtgcctggatggcatcaacagcgacaccaacatccgctggaacaactacatcgccggccgggcctttgtgctgtgcagcgctgtgtctgactttgacttcatcgtgaccatcgtggtgctgaagaatgtgctgtccttcacccgggccttcggcaagaacctgcagggccagaccagtgatgtgttctttgctgctggcagcctgacagctgtgctgcacagcctgaatgaggtgatggagaacatcgaggtgtaccacgagttctggtttgaggaggccaccaacctggccaccaagctggacatccagatgaagctgcccgggaagttcagaagagcccaccagggcaacctggagagccagctgaccagcgagagctactacaaggagaccctgtctgtgcccaccgtggagcacatcatccaggagctgaaggacatcttcagcgagcagcacctgaaggccctgaagtgcctgagcctggtgcccagcgtgatgggccagctgaagttcaacaccagcgaggagcaccacgccgacatgtacagaagtgacctgcccaacccagacaccctgtctgctgagctgcactgctggaggatcaagtggaagcaccggggcaaggacatcgagctgcccagcaccatctatgaggccctgcacctgcctgacatcaagttcttccccaacgtgtatgccctgctgaaggtgctgtgcatcctgcctgtgatgaaggtggagaatgaaagatatgaaaatggaaggaagaggctgaaggcctacctgaggaacaccctgacagaccagaggagcagcaacctggccctgctgaacatcaactttgacatcaagcatgacctggacctgatggtggacacctacatcaagctgtacaccagcaagtctgagctgcccacagacaacagcgagaccgtggagaacacctag

SEQ ID NO: 148882 - DNA, 1761 bp, Artificial Sequence
  derived and/or modified sequence
atgggcaagcagaacatccccctggatggccatgaagcagatgagatccctgagggcctcttcaccccagacaacttccaggccctgctggagtgccgcatcaacagcggggaggaggtgctgaggaagagatttgagaccacagctgtgaacaccctcttctgcagcaagacccagcagaggcagatgctggagatctgtgagagctgcatccgggaggagaccctgcgggaggtgcgggacagccacttcttcagcatcatcacagatgatgtggtggacattgctggggaggagcacctgcctgtgctggtgcgctttgtggatgagagccacaacctgcgggaggagttcatcggcttcctgccctatgaagcagatgctgagatcctggccgtgaagttccacaccatgatcacagagaagtggggcctgaacatggagtactgccggggccaggcctacatcgtgagcagcggcttcagcagcaagatgaaggtggtggccagccggctgctggagaagtacccccaggccatctacaccctgtgcagcagctgtgccctgaacatgtggctggccaagtctgtgcctgtgatgggcgtgtctgtggccctgggcaccatcgaggaggtgtgcagcttcttccacaggagcccccagctgctgctggagctggacaacgtcatctctgtgctcttccagaacagcaaggagcggggcaaggagctgaaggagatctgccacagccagtggacaggaagacatgatgcctttgagatcctggtggagctgctgcaggccctggtgctgtgcctggatggcatcaacagcgacaccaacatccgctggaacaactacatcgccggccgggcctttgtgctgtgcagcgctgtgtctgactttgacttcatcgtgaccatcgtggtgctgaagaatgtgctgtccttcacccgggccttcggcaagaacctgcagggccagaccagtgatgtgttctttgctgctggcagcctgacagctgtgctgcacagcctgaatgaggtgatggagaacatcgaggtgtaccacgagttctggtttgaggaggccaccaacctggccaccaagctggacatccagatgaagctgcccgggaagttccggcgggcccaccagggcaacctggagagccagctgaccagcgagagctactacaaggagaccctgtctgtgcccaccgtggagcacatcatccaggagctgaaggacatcttcagcgagcagcacctgaaggccctgaagtgcctgagcctggtgcccagcgtgatgggccagctgaagttcaacaccagcgaggagcaccacgccgacatgtacagaagtgacctgcccaacccagacaccctgtctgctgagctgcactgctggaggatcaagtggaagcaccggggcaaggacatcgagctgcccagcaccatctatgaggccctgcacctgcctgacatcaagttcttccccaacgtgtatgccctgctgaaggtgctgtgcatcctgcctgtgatgaaggtggagaatgaaagatatgaaaatggaaggaagaggctgaaggcctacctgaggaacaccctgacagaccagaggagcagcaacctggccctgctgaacatcaactttgacatcaagcatgacctggacctgatggtggacacctacatcaagctgtacaccagcaagtctgagctgcccacagacaacagcgagaccgtggagaacacctag

SEQ ID NO: 148883 - DNA, 3300 bp, Artificial Sequence
  derived and/or modified sequence
cgagccggccggccggcctggctcccctccccggccccgacgggcgggcggactgccctgaggaggcggggaggggagggctgggccggccggcgggcgggcgacgatgccgaacttctgcgctgcccccaactgcacgcggaagagcacgcagtccgacttggccttcttcaggttcccgcgggaccctgccagatgccagaagtgggtggagaactgtaggagagcagacttagaagataaaacacctgatcagctaaataaacattatcgattatgtgccaaacattttgagacctctatgatctgtagaactagtccttataggacagttcttcgagataatgcaataccaacaatatttgatcttaccagtcatttgaacaacccacatagtagacacagaaaacgaataaaagaactgagtgaagatgaaatcaggacactgaaacagaaaaaaattgatgaaacttctgagcaggaacaaaaacataaagaaaccaacaatagcaatgctcagaaccccagcgaagaagagggtgaagggcaagatgaggacattttacctctaacccttgaagagaaggaaaacaaagaatacctaaaatctctatttgaaatcttgattctgatgggaaagcaaaacatacctctggatggacatgaggctgatgaaatcccagaaggtctctttactccagataactttcaggcactgctggagtgtcggataaattctggtgaagaggttctgagaaagcggtttgagacaacagcagttaacacgttgttttgttcaaaaacacagcagaggcagatgctagagatctgtgagagctgtattcgagaagaaactctcagggaagtgagagactcacacttcttttccattatcactgacgatgtagtggacatagcaggggaagagcacctacctgtgttggtgaggtttgttgatgaatctcataacctaagagaggaatttataggcttcctgccttatgaagccgatgcagaaattttggctgtgaaatttcacactatgataactgagaagtggggattaaatatggagtattgtcgtggccaggcttacattgtctctagtggattttcttccaaaatgaaagttgttgcttctagacttttagagaaatatccccaagctatctacacactctgctcttcctgtgccttaaatatgtggttggcaaaatcagtacctgttatgggagtatctgttgcattaggaacaattgaggaagtttgttcttttttccatcgatcaccacaactgcttttagaacttgacaacgtaatttctgttctttttcagaacagtaaagaaaggggtaaagaactgaaggaaatctgccattctcagtggacaggcaggcatgatgcttttgaaattttagtggaactcctgcaagcacttgttttatgtttagatggtataaatagtgacacaaatattagatggaataactatatagctggccgagcatttgtactctgcagtgcagtgtcagattttgatttcattgttactattgttgttcttaaaaatgtcctatcttttacaagagcctttgggaaaaacctccaggggcaaacctctgatgtcttctttgcggccggtagcttgactgcagtactgcattcactcaacgaagtgatggaaaatattgaagtttatcatgaattttggtttgaggaagccacaaatttggcaaccaaacttgatattcaaatgaaactccctgggaaattccgcagagctcaccagggtaacttggaatctcagctaacctctgagagttactataaagaaaccctaagtgtcccaacagtggagcacattattcaggaacttaaagatatattctcagaacagcacctcaaagctcttaaatgcttatctctggtaccctcagtcatgggacaactcaaattcaatacgtcggaggaacaccatgctgacatgtatagaagtgacttacccaatcctgacacgctgtcagctgagcttcattgttggagaatcaaatggaaacacagggggaaagatatagagcttccgtccaccatctatgaagccctccacctgcctgacatcaagttttttcctaatgtgtatgcattgctgaaggtcctgtgtattcttcctgtgatgaaggttgagaatgagcggtatgaaaatggacgaaagcgtcttaaagcatatttgaggaacactttgacagaccaaaggtcaagtaacttggctttgcttaacataaattttgatataaaacacgacctggatttaatggtggacacatatattaaactctatacaagtaagtcagagcttcctacagataattccgaaactgtggaaaatacctaagagacttttaaaaataggctttcttatatttgatatttggaagaaaaagccgtaaggtgtatgtagaccacttaatcactaaatatctttgcctataggactccattgaatacattagccattgataatctacctgtttaaatggcccctgtttgaactctcaagctttgaagacctacctgttcttccagaagagaacgttgaaagtgccatgtttccttttgcgtgatctctgttgatggcactctggaattgtttcagttaagtcattttagacatagcatttattatcactgtggatctctacttgttgggtgttatgaattctttgaagaaatatattttgaagaggtgtgggaggaaggaatacattttataaaatgttgtagtgaagcccacaattgacctttgactaataggagttttaagtatgttaaaaatctatactggacagttacaagaaattaccggagaaaagcttgtgagctcaccaaacaaggatttcagtgtagattttgtctttcttgaacttaaagaaacaaatgacaaagtttgaatggaaaagcctgctgttgttccacatctcgttgctgtttacattcctttgtggagcctacatcttcctaagctttttagcaggtatatgttgaacacttctgtttcatggttgagacagaatcagaggccatggatactgacaactgatttgtctgttttttttctctgtctttttccatgactcttatatactgcctcatcttgatttataagcaaaacctggaaaacctacaaaataagtgttgtggtttatctagaaaaatatggaaaatattgctgttatttttggtgaagaaaatcaattttgtatagtttatttcaatctaaataaaatgtgaattttgtttaaa

SEQ ID NO: 148884 - DNA, 6795 bp, Artificial Sequence
  derived and/or modified sequence
ttatagacgtgagccaccggcctcctccatatgaatttgaaagtccttttgtcaagttctcctagaacttcttttgggattttcattataattgctttgaattgacatctttacaatattagctattgtaaatttattactagtttagtattactgttagtaaacgaatattactagtttactgttacagtataaactattgtaaagtattaactagttctatccatgaagagaaaaaaaatcccataaaatacctatcaaataacagcaatcattgacaaaactaaatactagttttttgaaaagaatattagaatacttttaggagtacagaaaacgaaaaattttgagagcttttgttacagttgtttaaatgagaatgtatgcattcttagatcacttcttaaatacattatggttcttactggtatagatgatatattctggttgaaattgtttccagcacttttgaagaacttctttttaagttaatcctagtaagtcttctgagtttttcctctgttactgattgtatcatctgcaaataaggagaaatttgtctctttcagttcttattattttaattttttctgttgcctgtcttgtttagtcaagatccctggtactatgttgaacaattctagtaatgtcatacttgccttgccccattaagtataatgtttgctgttggtattgttagatagtttttatcaagttaaggaaattcccttctactcccatattcagagttttgttgtttttttttaagatggggtctcactctgtcacccaagccagagtgcagtggggcagacactgctcactgcagcctccacctcctgggctgaagcaatcctcttacctcagcctcccaagtagctgggaccacaggtgtgtgccaccatgcctggcttatttttttgtatttttttttatagatggagtcatgccatgttgcccagtttggtctcaaactcctgggctcaagcagtcctcttacctcagctccccaaagtgctgggattacaatagtgagccaccacgcctgacctatattctgtttttatatttaacttatcacatgctttcattgcatgtatttaatagacaagttcatttttttcattctttaatgcaataagtaatactaatggattttctgtgaaccatctgcatttctgtaatgaactctagttgactgcaatatgtctatttgcttttatataccattggattcaattggtcaatattttatttaggattttacatttgtgaatcttggtctgtagccttcttttcatgtactcttattacccagttataatatcaaggttctattggcctcataaaataagttgggtatcttttttttttttttctcctagaaaaatttgtgtaggtagatgttatctgctcttgaaagtaaggtagaacttggtaaaaccattagatggcttgcggtggatgagggaaagttttgattgccattctgctatctttattggttttctttctttcttgtgttttgttaatgtttctaaaagtttatgaaactttaataatcttttcaaagaaccagtagttttgtcagtgattgttgtacttatgaactattttattggtttttctttgattagggtgatttattttttgactctttttctagcttcttgaatgtttagctcatatttatgtgtattcaaagctataaaagtctctcttaggtccattttagctataccctacaactttagacatatagtgttgtcatgtctggctgtaggtattttgtaatttctctattttgttaacataggattgtttttcttagtttccagatgtggaattatttttaattgctatatgatattttaaattttaaatgttattaagagatacgtagaggatacatatagtctatgtgatgttgattctttctgatttttttgcatccattattgctattcaagtctgtgccagcctgattcttgttcctttttaggtaatcttcttttctccctcaaagctttttagaaggtttctttatatttgacattttaaaatttgctaacctgtatctagatgtgagttttttttttatgtaccttaatttgtcatcttacaactgaggacttacaccttaaattctgagaaatccttagtttttatttttctttatgcattttcccctctatttgtttatttctattttcctgggacttagatgaatactgacacttacattacagtcctccatatcagctttcttcttggtgtccatggaggactgattccaggagcttccctcagagagcaaaatccacagatacttgattcccttatatacagtggtgtagtatttgcatataacttacacacatcctcccgtgactttaaatcatttataatacctaatacaatgtagtgctatgtaaatagttgttctgttacattgtttagagaataatgacaagaacaaaaatctgtgtgttcagtatagacacaaccatccttttcttttttttttttttgagacagagtctcgctcttgttgcccaggctggagtgcaagggtgcgatctcagctcaccgcaacctccgcctcccgggttcaagcaattctcctgcctcagccccccgagtagctgggatcacaggcatgtgccaccacgcccggctctttttgtatttttagtagagacgagggttctccatgttggtcaggctggtcttgaactcccgacctcaggtgatcctcccgcctcagcttcccaaagtgctgggattacagacgtgagccaccatgcccggcacaaccatccattttcaaataatacctagattatttatgatacttaatacatttatgtgtttgtaacacctactacaatgtaaatgctatgtaaatagttatgctacgttatgtaggggaagaatgagaaaaaaagtctgtacatgttcaagatagatacaaccatccattttttccccagcattttcaatgcatggttggttaaatccatagatatgaagtgtaatatgtatcaggatgaggagctcaatcacttgctgtcctgtagctatcatttccctgtagtctgtccctcagagagcctcacatatctcacagcaggcatactcttcctgacccaccatccttataaacgtgcagtccgtaggataaggaggggatgtccaggttgaccagcctgctgatgtttcttgttatcagcaccatgtccagtgctgcccaacaggcatcctgctgtcttcagctgtcactggcattgctgcttttctgccacagaaagtaacaggtggctcatgatttaagcattgtagagggttggaaggaaagtaaaggatgcagctggaaagttcttcctttgtctaaccctattggtgccacttggcctactatgctctgtgtatgctctgtgtatctcttccatgctggtactttcaccttctgcttctcagggatttctcatcacttttgtgttgagtcctgagattcagcaacctccttcttatgggacatctccagggttaaattgggaagtaagatgatttgtgtcctcttgaatttaactccaagtgccatggtgtatttttgtgcctttcattagccagtaaacacttataacccaaagttacgatgatttaggtagaaaataagcaaaatgatgtattcttttttccctaagactttgttataaccttggagtcattaacagcttattctggttttctcattgtctgtttgtttgaagaatgtgtactatataaagaatttatgctcttgaaagaattaaattgactcagaataggcatttgtatttgtgagtctaagatgatacactagaggtcagttttttaaagatgatttgtttttttctttttttttcttgacatttagagtgaagatgaaatcaggacactgaaacagaaaaaaattgatgaaacttctgagcaggaacaaaaacataaagaaaccaacaatagcaatgctcagaaccccagcgaagaagagggtgaagggcaagatgaggacattttacctctaacccttgaagagaaggaaaacaaagaatacctaaaatctctatttgaaatcttgattctgatgggaaagcaaaacatacctctggatggacatgaggctgatgaaatcccagaaggtctctttactccagataactttcaggcactgctggagtgtcggataaattctggtgaagaggttctgagaaagcggtttgagacaacagcagttaacacgttgttttgttcaaaaacacagcagaggcagatgctagagatctgtgagagctgtattcgagaagaaactctcagggaagtgagagactcacacttcttttccattatcactgacgatgtagtggacatagcaggggaagagcacctacctgtgttggtgaggtttgttgatgaatctcataacctaagagaggaatttataggcttcctgccttatgaagccgatgcagaaattttggctgtgaaatttcacactatgataactgagaagtggggattaaatatggagtattgtcgtggccaggcttacattgtctctagtggattttcttccaaaatgaaagttgttgcttctagacttttagagaaatatccccaagctatctacacactctgctcttcctgtgccttaaatatgtggttggcaaaatcagtacctgttatgggagtatctgttgcattaggaacaattgaggaagtttgttcttttttccatcgatcaccacaactgcttttagaacttgacaacgtaatttctgttctttttcagaacagtaaagaaaggggtaaagaactgaaggaaatctgccattctcagtggacaggcaggcatgatgcttttgaaattttagtggaactcctgcaagcacttgttttatgtttagatggtataaatagtgacacaaatattagatggaataactatatagctggccgagcatttgtactctgcagtgcagtgtcagattttgatttcattgttactattgttgttcttaaaaatgtcctatcttttacaagagcctttgggaaaaacctccaggggcaaacctctgatgtcttctttgcggccggtagcttgactgcagtactgcattcactcaacgaagtgatggaaaatattgaagtttatcatgaattttggtttgaggaagccacaaatttggcaaccaaacttgatattcaaatgaaactccctgggaaattccgcagagctcaccagggtaacttggaatctcagctaacctctgagagttactataaagaaaccctaagtgtcccaacagtggagcacattattcaggaacttaaagatatattctcagaacagcacctcaaagctcttaaatgcttatctctggtaccctcagtcatgggacaactcaaattcaatacgtcggaggaacaccatgctgacatgtatagaagtgacttacccaatcctgacacgctgtcagctgagcttcattgttggagaatcaaatggaaacacagggggaaagatatagagcttccgtccaccatctatgaagccctccacctgcctgacatcaagttttttcctaatgtgtatgcattgctgaaggtcctgtgtattcttcctgtgatgaaggttgagaatgagcggtatgaaaatggacgaaagcgtcttaaagcatatttgaggaacactttgacagaccaaaggtcaagtaacttggctttgcttaacataaattttgatataaaacacgacctggatttaatggtggacacatatattaaactctatacaagtaagtcagagcttcctacagataattccgaaactgtggaaaatacctaagagacttttaaaaataggctttcttatatttgatatttggaagaaaaagccgtaaggtgtatgtagaccacttaatcactaaatatctttgcctataggactccattgaatacattagccattgataatctacctgtttaaatggcccctgtttgaactctcaagctttgaagacctacctgttcttccagaagagaacgttgaaagtgccatgtttccttttgcgtgatctctgttgatggcactctggaattgtttcagttaagtcattttagacatagcatttattatcactgtggatctctacttgttgggtgttatgaattctttgaagaaatatattttgaagaggtgtgggaggaaggaatacattttataaaatgttgtagtgaagcccacaattgacctttgactaataggagttttaagtatgttaaaaatctatactggacagttacaagaaattaccggagaaaagcttgtgagctcaccaaacaaggatttcagtgtagattttgtctttcttgaacttaaagaaacaaatgacaaagtttgaatggaaaagcctgctgttgttccacatctcgttgctgtttacattcctttgtggagcctacatcttcctaagctttttagcaggtatatgttgaacacttctgtttcatggttgagacagaatcagaggccatggatactgacaactgatttgtctgttttttttctctgtctttttccatgactcttatatactgcctcatcttgatttataagcaaaacctggaaaacctacaaaataagtgttgtggtttatctagaaaaatatggaaaatattgctgttatttttggtgaagaaaatcaattttgtatagtttatttcaatctaaataaaatgtgaattttgtttaaa

SEQ ID NO: 148885 - DNA, 2286 bp, Artificial Sequence
  derived and/or modified sequence
atgcccaacttctgcgccgcccccaactgcacccggaagagcacccagagcgacctggccttcttcaggtttccgcgggatcccgcccggtgccagaaatgggtcgaaaattgccgtcgcgcggacttggaggacaagactcccgatcagctgaataagcactacagactgtgtgcaaagcactttgagacctccatgatatgcaggacctctccataccggaccgtcctccgtgacaacgccatccctactatctttgacttgacaagccacctcaacaaccctcatagtagacaccgtaaacggatcaaggaactgagtgaggacgagatccgcaccctgaaacagaaaaaaatagacgaaacctcagagcaggaacagaaacacaaagagaccaataacagcaatgcccagaatccctctgaggaggaaggggagggacaggacgaagatattctgcccctgactctggaagaaaaagagaacaaagagtacctcaaatccctgttcgaaatactgatccttatgggtaaacaaaacattcctcttgatggccatgaagccgacgagatcccagagggactgttcacccccgacaatttccaggcactcctcgaatgccgtatcaactcgggggaagaggtgctcagaaaaaggtttgagaccaccgccgtgaatacactattctgctccaaaacgcagcaacggcagatgctggaaatatgtgagagttgcattagagaagagacacttagagaggtgagggactcacactttttcagcattattaccgatgacgttgtcgacatcgcgggtgaggagcacctacctgttctcgttcgctttgtagacgaaagtcacaacctaagggaggaattcatcggatttctgccatacgaagcagatgctgaaatcctagccgtcaagttccacaccatgatcactgaaaaatggggtctaaatatggaatactgccgaggccaggcctatatagtctcctctggattttctagtaagatgaaagtggtggcctcccggctgctcgagaaatatccgcaggcaatttatactctttgcagctcctgtgctcttaacatgtggctggccaagagtgtgccagtgatgggcgtttccgtggcgctgggtaccatcgaagaggtatgctccttttttcacaggtcccctcagctattactggagctggataatgtgatcagcgtactttttcagaatagcaaggaaaggggaaaggagctcaaagaaatttgtcacagccagtggacaggaaggcatgatgccttcgaaatccttgtcgaactcctccaagccctggtgctttgcctcgacggcatcaacagtgatacgaatattagatggaacaactatatcgccggccgggcatttgttctttgctctgcggtctcagattttgacttcatcgttaccattgtcgttctgaaaaacgtgctgtccttcacccgtgcattcgggaaaaacttacaagggcagacttcagatgtctttttcgcagctggcagcctcaccgccgtcttacatagtttgaacgaggtgatggagaatattgaggtgtaccatgagttttggtttgaggaagccaccaatttggccaccaagctagacattcagatgaagttgccaggaaagttcagacgagcccaccagggaaaccttgagagtcagttgacttcagaatcttactataaggaaaccctgtccgtccctactgtggaacatatcatccaggagctgaaggatattttcagcgaacagcacttgaaggctctcaaatgcctgagcttggtgccaagcgtgatgggccagctcaaatttaacacttctgaggagcatcacgctgacatgtatcgatctgacctacccaaccccgataccttgtcggcagaactgcattgctggagaatcaagtggaagcataggggaaaagatatagagttgcccagcactatatatgaggccctgcacctgcccgacattaagtttttcccgaacgtgtacgccctcctgaaggttctgtgtatcttgcccgtcatgaaggtggagaacgagaggtatgagaacggtcggaagcgactgaaagcttatctccggaataccctgacagaccagcgatctagcaacctggccttgttgaacatcaattttgatataaagcatgacttagacttgatggtcgacacctacattaagctgtatacctctaagtctgagctgccgacggataactcagagacagtcgagaacacatag

SEQ ID NO: 148886 - DNA, 1761 bp, Artificial Sequence
  derived and/or modified sequence
atgggcaagcagaacatccccctggacggccacgaggccgacgagatccctgaaggtctgtttactcctgacaacttccaggccctgttagagtgccggatcaactcaggcgaggaagtactgcggaagaggttcgaaaccacggcagtgaacaccctgttctgcagtaaaactcagcaacgccaaatgctggaaatatgcgaatcctgcatccgggaagagacactgcgagaagttagagactcccacttttttagtatcatcacagacgatgttgtggatattgccggcgaggagcatctgcctgttttagtgaggttcgtggacgaatcccacaacttgcgggaagagttcattggcttcctcccgtacgaggctgatgccgaaatcctggcagtcaagttccataccatgattacagaaaagtggggccttaatatggagtattgccgggggcaggcctacatagttagctctgggttctctagcaaaatgaaggtggtagcttcgcgactgctggaaaaataccctcaggctatctacacactttgcagtagctgtgccctgaatatgtggctcgcgaagagcgtccctgtgatgggcgtttctgtggccctgggaaccattgaggaggtatgctccttcttccaccggagccctcagcttctcctagaattagataatgtgataagcgtactgtttcagaactcaaaggagcgcggtaaagaactgaaggagatctgtcactcccaatggactgggcggcatgacgccttcgagatactggttgagctactccaggccctggttttgtgcttagatggcatcaattccgacacgaatattcgatggaataattacattgctggtcgggcttttgttctctgttcagctgtctccgattttgatttcattgtgactatcgtggtcctgaaaaacgtcctgtctttcactcgggcctttggcaaaaatctgcagggccagacttcagatgtgttctttgccgctggatcgcttaccgccgtgctgcacagcctgaacgaggtcatggaaaacattgaggtgtatcacgaattttggtttgaggaggccacaaacctggctacgaagctggatattcagatgaaacttccagggaaattccgaagggctcatcagggaaacttagagagtcagctcacaagtgagtcatattacaaggagacgctgtctgtgccgactgtagagcacatcatccaggagttgaaagacatcttttccgagcagcatctgaaggcactaaaatgcctgtcgcttgtaccgagcgtaatggggcagctcaaattcaatacctccgaggagcaccacgccgacatgtaccgctccgatctccctaatccagatactctgtcggctgagctgcactgctggagaatcaagtggaaacaccggggcaaagatatcgaactgccctcaaccatttacgaagctttacacctccccgatattaaatttttccctaatgtatacgccttgctgaaggtcctgtgcatcttgcccgtaatgaaagtggagaacgagaggtatgaaaatggaagaaagaggttaaaagcttacctgcgcaacacgcttactgatcagcggtctagtaaccttgctctgctcaatatcaactttgacattaaacacgatctcgacctgatggtggatacttacatcaaactgtatacttcaaaatctgagctgcctacagacaactcagaaaccgtagagaacacctag

SEQ ID NO: 148887 - DNA, 2286 bp, Artificial Sequence
  derived and/or modified sequence
atgccgaatttttgcgccgctcccaattgtaccagaaagtccactcagagcgatctggccttcttcagatttccccgtgatccagcccgttgtcagaagtgggtggagaactgccgaagagcggatctggaggacaaaaccccagatcagcttaataaacactatagactctgtgcaaaacatttcgagacttctatgatctgtcggacatccccctacaggaccgtcctaagggacaacgccatcccgacaatttttgatctcaccagtcacctgaacaatccccactctcgacatcgaaaaaggattaaggaactttcggaggacgagatccgtacccttaaacagaaaaagatcgatgagacatctgaacaggaacagaaacacaaagagaccaataactctaacgcacagaacccttccgaggaagaaggagaagggcaagatgaagacatactccccttgaccctcgaagagaaagagaacaaagaatatctgaaatcactgtttgaaattctgattctcatgggaaagcaaaatattccgctggacggtcatgaggctgatgagatccccgaaggcttgttcactcccgacaactttcaggctctcctcgagtgccgaattaacagcggcgaggaggtgctgcgcaagaggttcgagactacagccgtgaacactctgttctgctccaagacccagcaaaggcagatgctggaaatttgtgagagctgtattcgcgaggaaacactccgtgaagtgagggacagtcactttttctccatcatcacagatgatgtcgtagatattgctggagaagagcacctacctgtcctagttaggtttgtagacgaatcccacaatttgcgtgaagaatttatcggctttttgccctacgaagcggatgccgagattctcgctgtgaagttccacactatgataactgaaaagtggggcctgaacatggagtactgccggggacaggcctacatagtaagctctggattttcctctaagatgaaagtagtggcatcacggctgctggagaagtaccctcaggctatctacaccctgtgtagtagctgcgcgttgaatatgtggctcgcaaagagcgtgcctgtgatgggggtgtcggtggccctcggaactattgaggaagtttgcagcttcttccataggagcccccagctgcttctcgagctggacaacgtgatcagcgtgctattccagaattccaaagaaaggggcaaagaattgaaagaaatttgccatagtcagtggaccggacggcacgatgccttcgaaatacttgtggagctgctacaggccctggtgctgtgcctcgacgggatcaatagtgataccaacatcaggtggaataactacatcgcgggtcgtgccttcgttctttgttcagccgtttccgactttgacttcattgtcaccatcgtggttcttaagaacgtcctatcctttacccgcgcttttggaaaaaacctgcaaggacaaaccagcgatgtcttcttcgcagccggatcccttaccgcagtgctgcatagtttaaacgaagtcatggagaacattgaggtatatcatgaattttggttcgaagaagccactaacttggctaccaaactggatattcagatgaagctccctggcaagttccggcgtgcgcaccaaggcaaccttgagtcccagctcacaagcgagagttactacaaggagaccctgtctgtgccaaccgtagaacacatcatccaggagcttaaggacatcttttctgagcaacatctgaaggctttgaaatgcctgtctcttgtaccgagcgttatgggtcagctcaagttcaacacatcagaggagcatcacgcagacatgtataggtctgatctgccaaatcctgataccctttctgctgagctccattgctggagaattaagtggaaacaccggggaaaagatattgagctgcccagtacaatatacgaagcactgcatttgccagatatcaagttttttccaaacgtctacgcccttctcaaggtgttatgtattctgcccgtaatgaaggtggagaatgagcgctatgaaaatggtcgcaagaggctgaaagcttaccttcgaaacaccctcacagatcagagatctagcaacctggcgctcttgaatattaactttgacattaagcacgatcttgatttaatggttgacacctatataaagctatatacgtctaagtctgaactccccactgacaactcagagacagtggagaatacctag

SEQ ID NO: 148888 - DNA, 1761 bp, Artificial Sequence
  derived and/or modified sequence
atgggcaaacaaaatatcccacttgacggtcatgaagccgatgaaattcctgagggactctttacccctgataattttcaggcattgctggagtgccgtatcaattctggggaggaggtgttgagaaaacgcttcgagactacagcagtaaacacgctgttttgctctaaaacccagcagagacagatgctggagatctgtgagagttgcattagagaggagaccctacgcgaagtgagagacagccacttcttttctatcataaccgacgatgtggtggacatagccggagaggagcacctaccagtgttggtacggtttgtggacgagtctcataatttgagggaggagtttatcgggtttctcccctatgaagctgacgcagagattttagccgtgaaatttcatactatgattacggagaagtggggactgaacatggagtactgtcggggtcaggcttacattgtaagtagcgggttctcctctaagatgaaggtcgtggcatcccggctgctcgagaaataccctcaagccatctacaccctgtgttcttcctgtgctctgaatatgtggctggctaaaagtgttcccgttatgggagtgtctgtggcattgggcaccatagaggaggtttgcagttttttccacaggtccccccagctgctgctggaactggacaatgtaatctcggtgctattccagaattctaaggagcgaggaaaggagttaaaagagatttgtcactcacaatggaccggaagacatgatgccttcgagatcctagtagaactgttacaggccctcgtgctttgcctggacggaatcaatagcgatacgaacatcagatggaacaattatattgcaggcagggctttcgtcctctgcagtgcagtttcagactttgatttcattgtcacaattgtggtgctcaaaaatgtgttgtccttcacacgagcctttgggaagaaccttcagggacagacttcagacgtttttttcgctgccggtagcctaacagcagtgctacactcccttaatgaggtaatggagaatatcgaagtgtaccatgaattttggttcgaggaggctaccaatctggctactaaacttgatatccaaatgaaattgccgggtaagttccgaagggcacaccaggggaatctcgaaagccagttaacatctgaatcttactacaaggagaccttgtctgtgcccactgtcgaacatattatacaggagttgaaggacattttttctgaacaacacttaaaggcattaaagtgtctgtccttagtcccatctgtgatgggccagctcaaattcaacacttccgaggagcaccatgccgacatgtatcggagcgatctcccaaaccctgacacactttctgccgaattgcattgctggaggattaaatggaaacatagaggcaaggatatagagctgccttccaccatttatgaggccttgcacttacctgatataaaatttttccccaacgtttatgccttgctgaaggttctttgtatcctgccagtgatgaaggtcgaaaacgagaggtacgagaatggccgaaaaaggctcaaagcctacctcaggaacactctgaccgaccaacgcagctcaaatctggccctgttgaacatcaactttgatattaaacacgatctggaccttatggtggatacctacatcaaactgtacacgagcaaaagcgagctgccgacggacaactcggagactgtggaaaacacatag

SEQ ID NO: 148889 - DNA, 2286 bp, Artificial Sequence
  derived and/or modified sequence
atgcccaacttctgcgccgcccccaactgcaccagaaagagcacccagagcgacctggccttcttcagattccccagagaccccgccagatgccagaagtgggtggagaactgcagaagagccgacctggaggacaagacccccgaccagctgaacaagcactacagactgtgcgccaagcacttcgagaccagcatgatctgcagaaccagcccctacagaaccgtgctgagagacaacgccatccccaccatcttcgacctgaccagccacctgaacaacccccacagcagacacagaaagagaatcaaggagctgagcgaggacgagatcagaaccctgaagcagaagaagatcgacgagaccagcgagcaggagcagaagcacaaggagaccaacaacagcaacgcccagaaccccagcgaggaggagggcgagggccaggacgaggacatcctgcccctgaccctggaggagaaggagaacaaggagtacctgaagagcctgttcgagatcctgatcctgatgggcaagcagaacatccccctggacggccacgaggccgacgagatccccgagggcctgttcacccccgacaacttccaggccctgctggagtgcagaatcaacagcggcgaggaggtgctgagaaagagattcgagaccaccgccgtgaacaccctgttctgcagcaagacccagcagagacagatgctggagatctgcgagagctgcatcagagaggagaccctgagagaggtgagagacagccacttcttcagcatcatcaccgacgacgtggtggacatcgccggcgaggagcacctgcccgtgctggtgagattcgtggacgagagccacaacctgagagaggagttcatcggcttcctgccctacgaggccgacgccgagatcctggccgtgaagttccacaccatgatcaccgagaagtggggcctgaacatggagtactgcagaggccaggcctacatcgtgagcagcggcttcagcagcaagatgaaggtggtggccagcagactgctggagaagtacccccaggccatctacaccctgtgcagcagctgcgccctgaacatgtggctggccaagagcgtgcccgtgatgggcgtgagcgtggccctgggcaccatcgaggaggtgtgcagcttcttccacagaagcccccagctgctgctggagctggacaacgtgatcagcgtgctgttccagaacagcaaggagagaggcaaggagctgaaggagatctgccacagccagtggaccggcagacacgacgccttcgagatcctggtggagctgctgcaggccctggtgctgtgcctggacggcatcaacagcgacaccaacatcagatggaacaactacatcgccggcagagccttcgtgctgtgcagcgccgtgagcgacttcgacttcatcgtgaccatcgtggtgctgaagaacgtgctgagcttcaccagagccttcggcaagaacctgcagggccagaccagcgacgtgttcttcgccgccggcagcctgaccgccgtgctgcacagcctgaacgaggtgatggagaacatcgaggtgtaccacgagttctggttcgaggaggccaccaacctggccaccaagctggacatccagatgaagctgcccggcaagttcagaagagcccaccagggcaacctggagagccagctgaccagcgagagctactacaaggagaccctgagcgtgcccaccgtggagcacatcatccaggagctgaaggacatcttcagcgagcagcacctgaaggccctgaagtgcctgagcctggtgcccagcgtgatgggccagctgaagttcaacaccagcgaggagcaccacgccgacatgtacagaagcgacctgcccaaccccgacaccctgagcgccgagctgcactgctggagaatcaagtggaagcacagaggcaaggacatcgagctgcccagcaccatctacgaggccctgcacctgcccgacatcaagttcttccccaacgtgtacgccctgctgaaggtgctgtgcatcctgcccgtgatgaaggtggagaacgagagatacgagaacggcagaaagagactgaaggcctacctgagaaacaccctgaccgaccagagaagcagcaacctggccctgctgaacatcaacttcgacatcaagcacgacctggacctgatggtggacacctacatcaagctgtacaccagcaagagcgagctgcccaccgacaacagcgagaccgtggagaacacctag

SEQ ID NO: 148890 - DNA, 1761 bp, Artificial Sequence
  derived and/or modified sequence
atgggcaagcagaacatccccctggacggccacgaggccgacgagatccccgagggcctgttcacccccgacaacttccaggccctgctggagtgcagaatcaacagcggcgaggaggtgctgagaaagagattcgagaccaccgccgtgaacaccctgttctgcagcaagacccagcagagacagatgctggagatctgcgagagctgcatcagagaggagaccctgagagaggtgagagacagccacttcttcagcatcatcaccgacgacgtggtggacatcgccggcgaggagcacctgcccgtgctggtgagattcgtggacgagagccacaacctgagagaggagttcatcggcttcctgccctacgaggccgacgccgagatcctggccgtgaagttccacaccatgatcaccgagaagtggggcctgaacatggagtactgcagaggccaggcctacatcgtgagcagcggcttcagcagcaagatgaaggtggtggccagcagactgctggagaagtacccccaggccatctacaccctgtgcagcagctgcgccctgaacatgtggctggccaagagcgtgcccgtgatgggcgtgagcgtggccctgggcaccatcgaggaggtgtgcagcttcttccacagaagcccccagctgctgctggagctggacaacgtgatcagcgtgctgttccagaacagcaaggagagaggcaaggagctgaaggagatctgccacagccagtggaccggcagacacgacgccttcgagatcctggtggagctgctgcaggccctggtgctgtgcctggacggcatcaacagcgacaccaacatcagatggaacaactacatcgccggcagagccttcgtgctgtgcagcgccgtgagcgacttcgacttcatcgtgaccatcgtggtgctgaagaacgtgctgagcttcaccagagccttcggcaagaacctgcagggccagaccagcgacgtgttcttcgccgccggcagcctgaccgccgtgctgcacagcctgaacgaggtgatggagaacatcgaggtgtaccacgagttctggttcgaggaggccaccaacctggccaccaagctggacatccagatgaagctgcccggcaagttcagaagagcccaccagggcaacctggagagccagctgaccagcgagagctactacaaggagaccctgagcgtgcccaccgtggagcacatcatccaggagctgaaggacatcttcagcgagcagcacctgaaggccctgaagtgcctgagcctggtgcccagcgtgatgggccagctgaagttcaacaccagcgaggagcaccacgccgacatgtacagaagcgacctgcccaaccccgacaccctgagcgccgagctgcactgctggagaatcaagtggaagcacagaggcaaggacatcgagctgcccagcaccatctacgaggccctgcacctgcccgacatcaagttcttccccaacgtgtacgccctgctgaaggtgctgtgcatcctgcccgtgatgaaggtggagaacgagagatacgagaacggcagaaagagactgaaggcctacctgagaaacaccctgaccgaccagagaagcagcaacctggccctgctgaacatcaacttcgacatcaagcacgacctggacctgatggtggacacctacatcaagctgtacaccagcaagagcgagctgcccaccgacaacagcgagaccgtggagaacacctag

SEQ ID NO: 148891 - protein, 187 aa, Artificial Sequence
  derived and/or modified sequence
MTSREHQVSLCNCVPLLRRLLCDAPWRKARPLHALSRYFRSRVSPSKMAEEPQSVLQLPTSIAAGGEGLTDVSPETTTPEPPSSAAVSPGTEEPAGDTKKKIDILLKAVGDTPIMKTKKWAVERTRTIQGLIDFIKKFLKLVASEQLFIYVNQSFAPSPDQEVGTLYECFGSDGKLVLHYCKSQAWG

SEQ ID NO: 148892 - protein, 140 aa, Artificial Sequence
  derived and/or modified sequence
MAEEPQSVLQLPTSIAAGGEGLTDVSPETTTPEPPSSAAVSPGTEEPAGDTKKKIDILLKAVGDTPIMKTKKWAVERTRTIQGLIDFIKKFLKLVASEQLFIYVNQSFAPSPDQEVGTLYECFGSDGKLVLHYCKSQAWG

SEQ ID NO: 148893 - DNA, 564 bp, Artificial Sequence
  derived and/or modified sequence
atgaccagcagagagcaccaggtgagcctgtgcaactgcgtgcccctgctgagaagactgctgtgcgacgccccctggagaaaggccagacccctgcacgccctgagcagatacttcagaagcagagtgagccccagcaagatggccgaggagccccagagcgtgctgcagctgcccaccagcatcgccgccggcggcgagggcctgaccgacgtgagccccgagaccaccacccccgagccccccagcagcgccgccgtgagccccggcaccgaggagcccgccggcgacaccaagaagaagatcgacatcctgctgaaggccgtgggcgacacccccatcatgaagaccaagaagtgggccgtggagagaaccagaaccatccagggcctgatcgacttcatcaagaagttcctgaagctggtggccagcgagcagctgttcatctacgtgaaccagagcttcgcccccagccccgaccaggaggtgggcaccctgtacgagtgcttcggcagcgacggcaagctggtgctgcactactgcaagagccaggcctggggctag

SEQ ID NO: 148894 - DNA, 423 bp, Artificial Sequence
  derived and/or modified sequence
atggccgaggagccccagagcgtgctgcagctgcccaccagcatcgccgccggcggcgagggcctgaccgacgtgagccccgagaccaccacccccgagccccccagcagcgccgccgtgagccccggcaccgaggagcccgccggcgacaccaagaagaagatcgacatcctgctgaaggccgtgggcgacacccccatcatgaagaccaagaagtgggccgtggagagaaccagaaccatccagggcctgatcgacttcatcaagaagttcctgaagctggtggccagcgagcagctgttcatctacgtgaaccagagcttcgcccccagccccgaccaggaggtgggcaccctgtacgagtgcttcggcagcgacggcaagctggtgctgcactactgcaagagccaggcctggggctag

SEQ ID NO: 148895 - DNA, 564 bp, Artificial Sequence
  derived and/or modified sequence
atgacatcacgggagcatcaagtttccctatgcaattgtgtacccctgctccgccggctgctttgcgatgcaccctggcgaaaagctaggcccctgcatgccctttcccgctactttaggagccgtgtgtcaccttccaaaatggccgaagagccccaatctgttctgcagctgccaacatcaattgctgctggcggggaggggctaactgacgtgtcccccgaaacgactaccccggagccaccctcgtcagcggcagtgagcccaggcactgaggaacccgcgggagacacaaagaaaaaaatcgatatcctgttaaaggcggtcggtgatacccccatcatgaagacgaagaaatgggccgtggagcgtacacgtactattcaaggattgatcgactttataaagaagtttcttaaattggttgcctcagaacaactgttcatctacgtaaaccagtcattcgcaccctcacccgaccaggaggtgggcacactttacgagtgctttggctcagacggcaagcttgttctgcattattgcaaatctcaggcatggggttag

SEQ ID NO: 148896 - DNA, 423 bp, Artificial Sequence
  derived and/or modified sequence
atggcggaagagccacaatccgtactgcagttacccacttccattgccgcagggggggaagggctgaccgacgtctcccccgagaccacaacaccagagccaccctcgtctgccgctgttagcccgggtactgaggagcccgccggcgatacgaaaaagaaaatcgacatcctactcaaggccgttggcgacacccctattatgaagaccaagaagtgggcagtggaacgaacgcgcactattcagggcctaatagactttatcaagaagtttctaaaattagttgcctccgaacagttgtttatttacgtgaatcagtcatttgccccgtcccctgatcaggaagttggtacattgtatgaatgctttggcagtgacggtaaactggtgcttcactactgtaaatcgcaggcttgggggtag

SEQ ID NO: 148897 - DNA, 564 bp, Artificial Sequence
  derived and/or modified sequence
atgaccagccgggagcaccaggtgtccctgtgcaactgtgtgcccctgctgcggcggctgctgtgtgatgccccctggaggaaggcccggcccctgcacgccctgagccgctacttccgcagccgggtgagccccagcaagatggccgaggagccccagagcgtgctgcagctgcccaccagcattgctgctggaggagagggcctgacagatgtgtccccagagaccaccaccccagagccccccagcagcgctgctgtgtccccaggcacagaggagcctgctggggacaccaagaagaagattgacatcctgctgaaggctgtgggggacacccccatcatgaagaccaagaagtgggccgtggagaggaccaggaccatccagggcctgattgacttcatcaagaagttcctgaagctggtggccagcgagcagctgttcatctacgtgaaccagagctttgcccccagcccagaccaggaggtgggcaccctgtatgagtgcttcggcagtgatggcaagctggtgctgcactactgcaagagccaggcctggggctag

SEQ ID NO: 148898 - DNA, 423 bp, Artificial Sequence
  derived and/or modified sequence
atggccgaggagccccagagcgtgctgcagctgcccaccagcattgctgctggaggagagggcctgacagatgtgtccccagagaccaccaccccagagccccccagcagcgctgctgtgtccccaggcacagaggagcctgctggggacaccaagaagaagattgacatcctgctgaaggctgtgggggacacccccatcatgaagaccaagaagtgggccgtggagaggaccaggaccatccagggcctgattgacttcatcaagaagttcctgaagctggtggccagcgagcagctgttcatctacgtgaaccagagctttgcccccagcccagaccaggaggtgggcaccctgtatgaatgttttggaagtgatggcaagctggtgctgcactactgcaagagccaggcctggggctag

SEQ ID NO: 148899 - DNA, 564 bp, Artificial Sequence
  derived and/or modified sequence
atgaccagccgggagcaccaggtgagcctgtgcaactgcgtgcccctgttacggagactgttgtgtgacgctccatggagaaaagcgcggcccctgcacgctctttcccgctattttcggagtcgcgtctcccctagcaaaatggctgaggagccccagtccgtgctgcagctcccgactagtatagccgccggaggggagggcctgacagacgtgtctccggaaacaacaacgcccgagccgccatcatctgcggccgtctctcctggaaccgaggagccagctggtgatacaaaaaagaagatcgatatactcctgaaagccgtcggcgatacacccattatgaaaaccaagaagtgggcagtagaaaggacgcgcaccattcagggcctgattgatttcatcaagaagttcctgaaattagtcgccagcgaacaactgtttatatacgtgaatcaatcctttgctccttcccctgaccaggaagtagggaccctgtacgaatgttttggcagcgatggcaaactggtgttgcactattgcaagtcgcaggcctggggttag

SEQ ID NO: 148900 - DNA, 423 bp, Artificial Sequence
  derived and/or modified sequence
atggccgaggagccccagagcgtgctgcagctgcccaccagcatcgcggccggtggcgagggcctcaccgacgtctctcccgagaccaccaccccagaaccacccagttcagcggctgtatcccccgggacggaagagcccgccggcgacaccaaaaaaaaaatcgatatcctgttaaaggctgtaggcgatactcctataatgaagaccaagaaatgggccgtcgaacgcacccgcaccattcagggcctgatagactttatcaaaaagtttttaaagcttgtggcttcggagcagctgtttatctatgtcaatcagtccttcgcaccttctcccgatcaagaggttggaacgctgtatgagtgttttggtagcgatgggaagctggttttgcattactgcaaatcacaggcttggggatag

SEQ ID NO: 148901 - DNA, 564 bp, Artificial Sequence
  derived and/or modified sequence
atgactagccgtgaacaccaggtgtccctgtgcaattgcgtcccactgcttaggcgcctgttgtgcgacgccccatggcgcaaagccaggccattgcatgccctatctcggtatttccgctcgcgggtgagtccgagtaagatggccgaagagccccagagtgtcctacaactcccaacaagtatcgccgctggtggcgagggcctgaccgacgtcagcccagagacaaccaccccagagcccccatcgagcgctgctgtttctcccggtacagaggagccagccggtgacacaaagaaaaagattgatatcctcttaaaggcagttggggatacccccattatgaagacaaagaagtgggccgttgagcggactcggactatccagggcttaattgattttatcaaaaaatttctgaaactggtcgcaagtgagcaactgtttatctacgttaaccagagctttgccccatccccagaccaggaggttggtacactgtatgaatgtttcggcagcgatggtaaactcgtcctgcattactgcaaatcccaggcgtgggggtag

SEQ ID NO: 148902 - DNA, 423 bp, Artificial Sequence
  derived and/or modified sequence
atggccgaggagcctcagagcgtgcttcaattgcccacatccatcgcagcagggggtgagggccttacggacgtctcccccgagacaaccacccccgagccgccaagctcagccgctgtgagccctggcaccgaggagccggctggagataccaagaaaaaaatcgacatactgctgaaggcagttggcgatacacctattatgaaaactaagaaatgggctgtggaacgcactaggactatccagggtctgatcgatttcattaagaaattcttgaagctggtcgcgagcgaacaactgttcatttacgtaaaccagtcatttgctcctagtcccgaccaggaggtaggcactctatacgagtgtttcggatcagacggcaagctggtccttcactattgtaagagtcaggcttggggatag

SEQ ID NO: 148903 - DNA, 4330 bp, Artificial Sequence
  derived and/or modified sequence
ggaaacatttctaggtccgagccagcggcctaactggagtgtgcgcattcgaccgagcacagacacgttgcccaccgctcctctcccgaggtctgtagtcgcggagaaacacatgttgcgttactaacgttcagaggtctgcgacagcttcgatttgaatgactagccgggaacaccaagtttcactgtgtaattgcgtccccctactccggcgcctcctttgcgacgctccctggagaaaagcacgcccactgcacgcgctcagtcgctacttccgctctcgagtgtctccaagcaagatggcggaggagccgcagtctgtgttgcagcttcctacttcaattgctgctggaggggaaggacttacggatgtctccccagaaacaaccaccccggagcccccgtcttccgctgcagtttccccgggaacagaggaacctgctggcgacaccaagaaaaaaattgacattttgctaaaggctgtgggagacactcctattatgaaaacaaagaagtgggcagtagagcgaacacgaaccatccaaggactcattgacttcatcaaaaagtttcttaaacttgtggcctcagaacagttgtttatttatgtgaatcagtcctttgctccttccccagaccaagaagttggaactctctatgagtgttttggcagtgatggtaaactggttttacattactgcaagtctcaggcgtggggatgaaccacaaagaaaatcaacttgctactacatgaaatggattttcacggaagagacagctctgaaaagttttgatgcttgtggcaagagacttaacagatgtgatctatttagtatgtgtctactctatgtttatgcataagaaaacatccatagcatgaatggactcagaaaaatgtgatttgtattaatgcaccagtcatcataaaagatggtcatgatagtacacccattgctcctacttgttactattattgctgcagatctgcctccaaggttgaaaaggagactaagactgtataaacatcttcattgtcagttctcaaaatgactgaaattgttttcatggtaaaagttaatatactaaagggttcctttttttttaatgtttacatttatctctatgtttacctttttagtcacattgacctgctggctgaatacctcaaatagtccagtagagggcagtccaccaggcagaaaaggttaggcgttttggtttcacatctttgctggggaataataggggaaatggctgtttttgctaatttttagctaatatctagccaggagagcaagcacataggacagactgaaagactgtaattttacacaatacacatggcttaattattttattgggatacagaaaaatataaattctggacaaataagtcatatacctgttttcagtcctaacatttaaggattcttgagtcccaatcacataactgtggtgttactctgtcatttatatggtgtcaaaagcacttgatgagtaaacccagtagcatctttttgagtgtttcataatgcattttccaacttgaaaacaataattgaaaaatagccttattgtatattttatgccatgactaaaagtgccatttttactgatgctattagactgataatttcttgaagtgaaatttaacctttttttctctttagtattatgtttataatgccatatttttagaaagcattccagatcaggcatggtggcttacacctgtaatcccagcactttggaaggctgaggtgtggggattgcgtgaagccacaagtttgagaccagcctggttagcaaggcaagatccccaactctacaaaaaaataaaaattaaaaaaaaattattaggctgcagaggcaagaggatcccctgagcccagaagttcaagggtatagtgagtcgtgattgtaccactgcattcctgctgagcaacagagtgagaccccatctcaaaaaagaaaaaaaaaggcattctagtaaatcgaatgtaatgtgaatggaatttcaaaacaggatctaagatggtatgtagtagaattcaaagtaatatcattttaaagttaaatgagtatggaaaaggtctgttctctagttttgtccagttcagtttactgaaggaatatatttaattatattcatatatttaacaaataaaaatatgttgaattttcgtattgtttgccactgagggttcagatgatagacctcaaaaaatcgaaaatactggttgaaatttgtagcatccatttagttattctttttgacctaaataacttaatagtttattaaatctaaggttagctaaatatgtagctaaccttatttgttttctttcctaacaactctgaagaatacataggactttgcactttttttttttttttttttttttaaagagacagcgtttcggtcttgttgcccaggctggactgtaatggcacaatcttggctcattgcaacctctacctcccgggttcaagtgattctcctgcctcagcctcctgagtagctgggattacaggcacctgccaccacacccgcctaattttttgttatttttagtggagacagggttttaccattttggccaggctggtctcaaactcctgactgacctcaggtgatccacccgccttggcctcccaaagtgctgggattataggtgtgagccaccgtgccgggcctggactttgtactttttcaaatcatatttaattatttcttgatctttactcaaagaattattctgcgctaaatttgcaacattaaacaataattaagcctggatccgataagttattgggtgactagaacctacaacacaatttatttttaatttaaactctcaagtctgattaaacttgggggaaaaactgaacattcaggtgatattttaaattttctttgtgactaaatagatgtcattaatatcatgcttcatcttactgtgcatagatgacccatggcacacaaagtatatgtataatattgcaatattgtacttccatctttaaaagtatgccaaagacttcataatgaattcaccatatttaaggaataaggcaaattaatgtttatccgaaatcaaaatgagattggataattcctggaatctgatttctgtaagtttcagtcctaaagggaccttaaatatctactagaacgaagtacagtgtatttctcagattacatgacattagtcaaccaatttagttgtaacacaaagtgagaaagccttaggtgttgaaggagtgtgaaaataaaaatctcttttcatgcagtttctgcttcattttccaaggattataatatgctgagtaaacttttggcactaaggaagccagctacaggccacgtaatgaaaactattcagaaaacagttcagcaaatactactatttgaatacagttcaaatcgtatttatataaatactctgcctacattatttaacccaaactggattattcaccattctttgaagatgccttgtgttttctgttatctacttctgctcgtgcagtttacttacaccttcaccctttcaaatcctaactcttcttcaaggcctgattcagattttaactttttaaaggctatctgaatcattcaaggagaagataccctttctctcataaaaacacttagagcaaactaccactattaaatcacttattgcatactgcctcagagccatgtgtccagttattctggtttttatctggtacccacacacacataatacttagtacatttccttatatgtaaataattagtaatgtaacacatcgagtgaatgaaattgtgattagcaaagtatgacagctaaaaacaaaggaaattttgtatagtttaagtttttgtacagcagaaggtaatggaaaatatttgcaacatatgacagtgtttttaatgtcttaagtatatgaagaatttgtttcaattggtaagaaaagaccaactgaaaaataggcaaaacataccaaatttcgattcacaaaaagatacaaatggccaacaaaacatgaaacaccttgaaccccattggttacaaaaaatacaaataaaaacaatgctgactgacaataaaaataatgtacatcttgctattagcagagttgtggggaaatcctgtcatattttggtgaatagaatatgagttggtatatcacttttagggggccatttggcaatatcaaaaaccttgaaacgtaagtataaacttcagtttgttcgtataacctgtcattcacatattgagtgcctactatgtcctaaatattggaataacactaataaagctcataagagactaataaa

SEQ ID NO: 148904 - DNA, 1430 bp, Artificial Sequence
  derived and/or modified sequence
gtctccaagcaagatggcggaggagccgcagtctgtgttgcagcttcctacttcaattgctgctggaggggaaggacttacggatgtctccccagaaacaaccaccccggagcccccgtcttccgctgcagtttccccgggaacagaggaacctgctggcgacaccaagaaaaaaatttatttatgtgaatcagtcctttgctccttccccagaccaagaagttggaactctctatgagtgttttggcagtgatggtaaactggttttacattactgcaagtctcaggcgtggggatgaaccacaaagaaaatcaacttgctactacatgaaatggattttcacggaagagacagctctgaaaagttttgatgcttgtggcaagagacttaacagatgtgatctatttagtatgtgtctactctatgtttatgcataagaaaacatccatagcatgaatggactcagaaaaatgtgatttgtattaatgcaccagtcatcataaaagatggtcatgatagtacacccattgctcctacttgttactattattgctgcagatctgcctccaaggttgaaaaggagactaagactgtataaacatcttcattgtcagttctcaaaatgactgaaattgttttcatggtaaaagttaatatactaaagggttcctttttttttaatgtttacatttatctctatgtttacctttttagtcacattgacctgctggctgaatacctcaaatagtccagtagagggcagtccaccaggcagaaaaggttaggcgttttggtttcacatctttgctggggaataataggggaaatggctgtttttgctaatttttagctaatatctagccaggagagcaagcacataggacagactgaaagactgtaattttacacaatacacatggcttaattattttattgggatacagaaaaatataaattctggacaaataagtcatatacctgttttcagtcctaacatttaaggattcttgagtcccaatcacataactgtggtgttactctgtcatttatatggtgtcaaaagcacttgatgagtaaacccagtagcatctttttgagtgtttcataatgcattttccaacttgaaaacaataattgaaaaatagccttattgtatattttatgccatgactaaaagtgccatttttactgatgctattagactgataatttcttgaagtgaaatttaacctttttttctctttagtattatgtttataatgccatatttttagaaagcattccagatcaggcatggtggcttacacctgtaatcccagcactttggaaggctgaggtgtggggattgcgtgaagccacaagtttgagaccagcctggttagcaaggcaagatccccaactctacaaaaaaataaaaattaaaaaaaaa

SEQ ID NO: 148905 - DNA, 4333 bp, Artificial Sequence
  derived and/or modified sequence
ggaaagcggaaacatttctaggtccgagccagcggcctaactggagtgtgcgcattcgaccgagcacagacacgttgcccaccgctcctctcccgaggtctgtagtcgcggagaaacacatgttgcgttactaacgttcagaggtctgcgacagcttcgatttgaatgactagccgggaacaccaagtttcactgtgtaattgcgtccccctactccggcgcctcctttgcgacgctccctggagaaaagcacgcccactgcacgcgctcagtcgctacttccgctctcgagtgtctccaagcaagatggcggaggagccgcagtctgtgttgcagcttcctacttcaattgctgctggaggggaaggacttacggatgtctccccagaaacaaccaccccggagcccccgtcttccgctgcagtttccccgggaacagaggaacctgctggcgacaccaagaaaaaaattgacattttgctaaaggctgtgggagacactcctattatgaaaacaaagaagtgggcagtagagcgaacacgaaccatccaaggactcattgacttcatcaaaaagtttcttaaacttgtggcctcagaacagttgtttatttatgtgaatcagtcctttgctccttccccagaccaagaagttggaactctctatgagtgttttggcagtgatggtaaactggttttacattactgcaagtctcaggcgtggggatgaaccacaaagaaaatcaacttgctactacatgaaatggattttcacggaagagacagctctgaaaagttttgatgcttgtggcaagagacttaacagatgtgatctatttagtatgtgtctactctatgtttatgcataagaaaacatccatagcatgaatggactcagaaaaatgtgatttgtattaatgcaccagtcatcataaaagatggtcatgatagtacacccattgctcctacttgttactattattgctgcagatctgcctccaaggttgaaaaggagactaagactgtataaacatcttcattgtcagttctcaaaatgactgaaattgttttcatggtaaaagttaatatactaaagggttcctttttttttaatgtttacatttatctctatgtttacctttttagtcacattgacctgctggctgaatacctcaaatagtccagtagagggcagtccaccaggcagaaaaggttaggcgttttggtttcacatctttgctggggaataataggggaaatggctgtttttgctaatttttagctaatatctagccaggagagcaagcacataggacagactgaaagactgtaattttacacaatacacatggcttaattattttattgggatacagaaaaatataaattctggacaaataagtcatatacctgttttcagtcctaacatttaaggattcttgagtcccaatcacataactgtggtgttactctgtcatttatatggtgtcaaaagcacttgatgagtaaacccagtagcatctttttgagtgtttcataatgcattttccaacttgaaaacaataattgaaaaatagccttattgtatattttatgccatgactaaaagtgccatttttactgatgctattagactgataatttcttgaagtgaaatttaacctttttttctctttagtattatgtttataatgccatatttttagaaagcattccagatcaggcatggtggcttacacctgtaatcccagcactttggaaggctgaggtgtggggattgcgtgaagccacaagtttgagaccagcctggttagcaaggcaagatccccaactctacaaaaaaataaaaattaaaaaaaaattattaggctgcagaggcaagaggatcccctgagcccagaagttcaagggtatagtgagtcgtgattgtaccactgcattcctgctgagcaacagagtgagaccccatctcaaaaaagaaaaaaaaaggcattctagtaaatcgaatgtaatgtgaatggaatttcaaaacaggatctaagatggtatgtagtagaattcaaagtaatatcattttaaagttaaatgagtatggaaaaggtctgttctctagttttgtccagttcagtttactgaaggaatatatttaattatattcatatatttaacaaataaaaatatgttgaattttcgtattgtttgccactgagggttcagatgatagacctcaaaaaatcgaaaatactggttgaaatttgtagcatccatttagttattctttttgacctaaataacttaatagtttattaaatctaaggttagctaaatatgtagctaaccttatttgttttctttcctaacaactctgaagaatacataggactttgcactttttttttttttttttttttttaaagagacagcgtttcggtcttgttgcccaggctggactgtaatggcacaatcttggctcattgcaacctctacctcccgggttcaagtgattctcctgcctcagcctcctgagtagctgggattacaggcacctgccaccacacccgcctaattttttgttatttttagtggagacagggttttaccattttggccaggctggtctcaaactcctgactgacctcaggtgatccacccgccttggcctcccaaagtgctgggattataggtgtgagccaccgtgccgggcctggactttgtactttttcaaatcatatttaattatttcttgatctttactcaaagaattattctgcgctaaatttgcaacattaaacaataattaagcctggatccgataagttattgggtgactagaacctacaacacaatttatttttaatttaaactctcaagtctgattaaacttgggggaaaaactgaacattcaggtgatattttaaattttctttgtgactaaatagatgtcattaatatcatgcttcatcttactgtgcatagatgacccatggcacacaaagtatatgtataatattgcaatattgtacttccatctttaaaagtatgccaaagacttcataatgaattcaccatatttaaggaataaggcaaattaatgtttatccgaaatcaaaatgagattggataattcctggaatctgatttctgtaagtttcagtcctaaagggaccttaaatatctactagaacgaagtacagtgtatttctcagattacatgacattagtcaaccaatttagttgtaacacaaagtgagaaagccttaggtgttgaaggagtgtgaaaataaaaatctcttttcatgcagtttctgcttcattttccaaggattataatatgctgagtaaacttttggcactaaggaagccagctacaggccacgtaatgaaaactattcagaaaacagttcagcaaatactactatttgaatacagttcaaatcgtatttatataaatactctgcctacattatttaacccaaactggattattcaccattctttgaagatgccttgtgttttctgttatctacttctgctcgtgcagtttacttacaccttcaccctttcaaatcctaactcttcttcaaggcctgattcagattttaactttttaaaggctatctgaatcattcaaggagaagataccctttctctcataaaaacacttagagcaaactaccactattaaatcacttattgcatactgcctcagagccatgtgtccagttattctggtttttatctggtacccacacacacataatacttagtacatttccttatatgtaaataattagtaatgtaacacatcgagtgaatgaaattgtgattagcaaagtatgacagctaaaaacaaaggaaattttgtatagtttaagtttttgtacagcagaaggtaatggaaaatatttgcaacatatgacagtgtttttaatgtcttaagtatatgaagaatttgtttcaattggtaagaaaagaccaactgaaaaataggcaaaacataccaaatttcgattcacaaaaagatacaaatggccaacaaaacatgaaacaccttgaaccccattggttacaaaaaatacaaataaaaacaatgctgactgacaataaaaataatgtacatcttgctattagcagagttgtggggaaatcctgtcatattttggtgaatagaatatgagttggtatatcacttttagggggccatttggcaatatcaaaaaccttgaaacgtaagtataaacttcagtttgttcgtataacctgtcattcacatattgagtgcctactatgtcctaaatattggaataacactaataaagctcataagagactaa

SEQ ID NO: 148906 - protein, 125 aa, Artificial Sequence
  derived and/or modified sequence
MADEELEALRRQRLAELQAKHGDPGDAAQQEAKHREAEMRNSILAQVLDQSARARLSNLALVKPEKTKAVENYLIQMARYGQLSEKVSEQGLIEILKKVSQQTEKTTTVKFNRRKVMDSDEDDDY

SEQ ID NO: 148907 - protein, 40 aa, Artificial Sequence
  derived and/or modified sequence
MADEELEALRRQRLAELQAKHGDPGDAAQQEAKHSSTEEK

SEQ ID NO: 148908 - DNA, 123 bp, Artificial Sequence
  derived and/or modified sequence
atggccgacgaggagctggaggccctgagaagacagagactggccgagctgcaggccaagcacggcgaccccggcgacgccgcccagcaggaggccaagcacagcagcaccgaggagaagtag

SEQ ID NO: 148909 - DNA, 378 bp, Artificial Sequence
  derived and/or modified sequence
atggccgacgaggagctggaggccctgagaagacagagactggccgagctgcaggccaagcacggcgaccccggcgacgccgcccagcaggaggccaagcacagagaggccgagatgagaaacagcatcctggcccaggtgctggaccagagcgccagagccagactgagcaacctggccctggtgaagcccgagaagaccaaggccgtggagaactacctgatccagatggccagatacggccagctgagcgagaaggtgagcgagcagggcctgatcgagatcctgaagaaggtgagccagcagaccgagaagaccaccaccgtgaagttcaacagaagaaaggtgatggacagcgacgaggacgacgactactag

SEQ ID NO: 148910 - DNA, 123 bp, Artificial Sequence
  derived and/or modified sequence
atggccgacgaggagctcgaggctctgcgtcggcagagactcgccgagttacaagctaagcatggagacccaggcgatgctgctcagcaggaggcaaagcactcctcgacagaggagaaatag

SEQ ID NO: 148911 - DNA, 378 bp, Artificial Sequence
  derived and/or modified sequence
atggcagacgaggagctggaggccctcaggagacaaagactagctgagctgcaggccaaacacggcgatcccggtgacgccgctcaacaggaggccaaacatagagaggctgagatgcgcaacagcatcctcgctcaagtgctcgatcaatctgcacgcgctcgtctgagcaacttggctctcgttaagccagagaagacaaaggcagtggagaactatctgattcagatggcacgctatggccaattatctgagaaagtctcagaacaggggttaatcgaaatcctcaaaaaagtgtctcaacagacagagaagactacgaccgttaagtttaaccgtcgtaaggttatggatagtgacgaggacgacgactactag

SEQ ID NO: 148912 - DNA, 123 bp, Artificial Sequence
  derived and/or modified sequence
atggctgatgaggagctggaggccctgcggcggcagaggctggccgagctgcaggccaagcatggagaccctggagatgctgcccagcaggaggccaagcacagcagcacagaggagaagtag

SEQ ID NO: 148913 - DNA, 154 bp, Artificial Sequence
  derived and/or modified sequence
gagccatggcggacgaggagcttgaggcgctgaggagacagaggctggccgagctgcaggccaaacacggggatcctggtgatgcggcccaacaggaagcaaagcacagttcaacagaagaaaagtaatggactctgatgaagatgacgattat

SEQ ID NO: 148914 - DNA, 558 bp, Artificial Sequence
  derived and/or modified sequence
aggccgcgctcgcgccgaggggctgcgagagtgaccgcggctgctccagcgctgacgccgagccatggcggacgaggagcttgaggcgctgaggagacagaggctggccgagctgcaggccaaacacggggatcctggtgatgcggcccaacaggaagcaaagcacagggaagcagaaatgagaaacagtatcttagcccaagttctggatcagtcggcccgggccaggttaagtaacttagcacttgtaaagcctgaaaaaactaaagcagtagagaattaccttatacagatggcaagatatggacaactaagtgagaaggtatcagaacaaggtttaatagaaatccttaaaaaagtaagccaacaaacagaaaagacaacaacagtgaaattcaacagaagaaaagtaatggactctgatgaagatgacgattattgaactacaagtgctcacagactagaacttaacggaacaagtctaggacagaagttaagatctgattatttactttgtttattgtctatatgccttttaaaaaaataaacttgttatgc

SEQ ID NO: 148915 - DNA, 378 bp, Artificial Sequence
  derived and/or modified sequence
atggctgatgaggagctggaggccctgcggcggcagaggctggccgagctgcaggccaagcatggagaccctggagatgctgcccagcaggaggccaagcaccgggaggccgagatgaggaacagcatcctggcccaggtgctggaccagagcgcccgggcccggctgagcaacctggccctggtgaagccagagaagaccaaggctgtggagaactacctgatccagatggcccgctatggccagctgtctgagaaggtgtctgagcagggcctgattgagatcctgaagaaggtgtcccagcagacagagaagaccaccaccgtgaagttcaacagaaggaaggtgatggacagtgatgaagatgatgactactag

SEQ ID NO: 148916 - DNA, 123 bp, Artificial Sequence
  derived and/or modified sequence
atggccgacgaggagctggaggccctgcggcggcagcggctggccgagttgcaggctaaacatggtgaccccggtgatgctgcccaacaagaagcaaaacattcatccacggaggaaaaatag

SEQ ID NO: 148917 - DNA, 378 bp, Artificial Sequence
  derived and/or modified sequence
atggccgacgaggagctggaggccctgcggcggcagcggctggccgagctacaggctaaacacggggaccccggagacgctgcccagcaggaggctaagcacagagaggcagaaatgaggaactctatcttggcccaagtgttggatcagagcgctcgggctcggttgtctaacctggctctggttaagcctgagaagactaaggccgtagagaattatctgatccagatggctagatatgggcagctgtccgagaaggtctccgagcaaggtctcattgagatcttgaaaaaagtctctcagcagacagagaaaacaactactgtgaagtttaataggcggaaagtcatggacagcgatgaggacgacgattactag

SEQ ID NO: 148918 - DNA, 123 bp, Artificial Sequence
  derived and/or modified sequence
atggctgatgaggaactcgaggcactgcgtagacagcgcctcgccgaattacaagccaagcatggcgatcccggagacgctgcccagcaggaagccaagcacagtagtaccgaagagaaatag

SEQ ID NO: 148919 - DNA, 378 bp, Artificial Sequence
  derived and/or modified sequence
atggccgacgaagaactcgaggccctcaggaggcagcgactagctgagctacaagcaaaacacggagaccccggagacgccgctcagcaagaagcgaaacaccgggaagcggaaatgcgcaactccatactagcgcaggtcttagaccaatcagcccgagcgagactgagcaatctggctttagttaaacctgagaaaactaaggcagtagagaactacctaatacagatggcaagatacgggcagcttagcgagaaggtgtcagagcagggactcattgaaatactcaagaaggtcagccagcaaaccgagaagactaccacagtgaagtttaaccgcaggaaggtgatggattcagatgaagacgacgactattag

SEQ ID NO: 148920 - DNA, 697 bp, Artificial Sequence
  derived and/or modified sequence
ccgtgcgcccaagctcgaccgcctgaaatcggggaatcgggcctctgccggcgccctggcagcggcgcggggcgtggctccgggctggattggtggcgcctgggccccgcgagcgcctgcgcagtggtcaaggccgcgctcgcgccgaggggctgcgagagtgaccgcggctgctccagcgctgacgccgagccatggcggacgaggagcttgaggcgctgaggagacagaggctggccgagctgcaggccaaacacggggatcctggtgatgcggcccaacaggaagcaaagcacagggaagcagaaatgagaaacagtatcttagcccaagttctggatcagtcggcccgggccaggttaagtaacttagcacttgtaaagcctgaaaaaactaaagcagtagagaattaccttatacagatggcaagatatggacaactaagtgagaaggtatcagaacaaggtttaatagaaatccttaaaaaagtaagccaacaaacagaaaagacaacaacagtgaaattcaacagaagaaaagtaatggactctgatgaagatgacgattattgaactacaagtgctcacagactagaacttaacggaacaagtctaggacagaagttaagatctgattatttactttgtttattgtctatatgccttttaaaaaaataaacttgttatgcaaaataaaa

SEQ ID NO: 148921 - DNA, 378 bp, Artificial Sequence
  derived and/or modified sequence
atggccgacgaggagttagaggccctccgccgtcagcgcctggctgagttgcaggcaaaacacggtgatcctggcgatgccgcccaacaggaggccaagcaccgggaggcagaaatgcgcaatagcattctcgcgcaggtactggaccagagtgccagggcccgacttagcaacctagctttagtcaaaccagagaaaaccaaggcggtcgagaactacctgattcaaatggcccgatatggccagctgtccgagaaggtgtctgagcagggactgatagaaatcctcaagaaggtctctcagcagaccgagaagacgaccaccgtgaagttcaaccgcagaaaagtgatggactctgacgaggatgacgattactag

SEQ ID NO: 148922 - DNA, 378 bp, Artificial Sequence
  derived and/or modified sequence
atggccgacgaggagctggaggccctgcggcggcagcggctggccgagctgcaagctaaacacggagaccctggcgatgctgctcagcaggaggcaaagcatagagaagcggaaatgcgaaatagtatcctcgctcaagtgctcgaccagtccgctcgggcccgcctgtcaaatctcgcgctcgtgaaacctgagaaaacaaaggccgtggagaactatctgatacagatggcgcgttacggacagctgagcgaaaaagtgagcgagcagggtctgatcgagatccttaagaaggtgtctcagcagactgagaagactactactgttaaattcaacaggaggaaagtgatggattccgacgaggacgatgactattag

SEQ ID NO: 148923 - DNA, 378 bp, Artificial Sequence
  derived and/or modified sequence
atggctgatgaagaacttgaggctttacgaagacagcggctggccgaactacaggccaagcacggagatcctggagatgcagcccaacaggaagctaagcatagggaggccgagatgagaaatagcatactcgcccaggtgctggatcagtcagccagggcacggttgtctaatttagccctcgtcaaacctgaaaaaaccaaagcggtggagaattacctgatacagatggcccgatacggacagctttccgagaaagtttccgagcaaggcttgatagaaatcttgaagaaggtcagccaacagactgagaagacgacaactgtgaagtttaatcgcagaaaggttatggacagcgacgaagacgacgactactag

SEQ ID NO: 148924 - protein, 224 aa, Artificial Sequence
  derived and/or modified sequence
MESGAYGAAKAGGSFDLRRFLTQPQVVARAVCLVFALIVFSCIYGEGYSNAHESKQMYCVFNRNEDACRYGSAIGVLAFLASAFFLVVDAYFPQISNATDRKYLVIGDLLFSALWTFLWFVGFCFLTNQWAVTNPKDVLVGADSVRAAITFSFFSIFSWGVLASLAYQRYKAGVDDFIQNYVDPTPDPNTAYASYPGASVDNYQQPPFTQNAETTEGYQPPPVY

SEQ ID NO: 148925 - DNA, 675 bp, Artificial Sequence
  derived and/or modified sequence
atggagagcggtgcatacggagctgcgaaagcagggggatcctttgacttgcgtagattcctgactcagccgcaggtggttgctagagccgtttgcttagttttcgcattgatagttttcagctgcatctacggcgaggggtactctaacgctcacgaatccaaacagatgtattgcgtcttcaacaggaacgaggacgcctgtaggtatgggtccgctattggcgtacttgcctttctggcgtcagctttttttttagttgtcgatgcctatttccctcagattagcaatgccacggatagaaagtacctggtgatcggcgatctactgttcagtgcactgtggacatttttatggtttgtcgggttttgcttccttacgaaccagtgggccgtgacaaaccccaaggatgtcctcgtgggcgccgatagcgtgcgcgctgcaatcacattttcatttttttcaatcttctcgtggggggtccttgcctccttagcctatcagaggtacaaggcaggagtggatgatttcattcagaattacgttgatccgacgcctgatccaaatactgcttacgcctcataccctggtgcgtctgttgacaactaccagcagcctccctttacgcagaatgcagaaactaccgaaggatatcagccacccccggtgtattag

SEQ ID NO: 148926 - DNA, 675 bp, Artificial Sequence
  derived and/or modified sequence
atggagagcggggcctacggggccgccaaggccggcggcagctttgacctgcggcgcttcctgacccagccccaggtggtggcccgggctgtgtgcctggtgtttgccctgattgtgttcagctgcatctacggggagggctacagcaatgcccacgagagcaagcagatgtactgtgtgttcaacagaaatgaagatgcctgccgctatggcagcgccatcggcgtgctggccttcctggccagcgccttcttcctggtggtggatgcctacttcccccagatcagcaatgccacagacaggaagtacctggtgattggagacctgctcttcagcgccctgtggaccttcctgtggtttgtgggcttctgcttcctgaccaaccagtgggccgtgaccaaccccaaggatgtgctggtgggcgctgacagcgtgcgggccgccatcaccttctccttcttcagcatcttctcctggggcgtgctggccagcctggcctaccagcgctacaaggccggcgtggatgacttcatccagaactacgtggaccccaccccagaccccaacacagcctatgccagctacccaggggcctctgtggacaactaccagcagccccccttcacccagaatgctgagaccacagagggctaccagcccccacctgtgtactag

SEQ ID NO: 148927 - DNA, 675 bp, Artificial Sequence
  derived and/or modified sequence
atggagagcggcgcctacggcgccgccaaggccggcggcagcttcgacctgagaagattcctgacgcagccacaagtcgtagcacgagcggtatgccttgtgttcgcgttgattgtgtttagttgcatttatggcgaaggttattccaatgcccacgagtcgaagcagatgtattgcgtgttcaatcggaacgaggacgcctgccgttacggctccgccattggagtgctagcctttctggcctcagccttctttctcgtcgtcgacgcttatttcccacagatctcaaatgccactgacagaaaatatcttgtgattggcgatcttctgttctcagcattgtggactttcctttggttcgttgggttctgttttttgacaaaccagtgggccgtgactaatcccaaagatgtgctagtgggggccgattctgtccgggccgccattactttctcgttctttagcatcttctcgtggggggtgctcgccagtctggcttaccagcgctacaaagctggggtggacgacttcatccagaattatgtggatcccaccccagatcctaatacggcttatgctagttacccaggagcctctgtggacaattatcagcagcccccctttacccagaacgccgaaaccaccgaggggtaccaacctccccccgtgtactag

SEQ ID NO: 148928 - DNA, 675 bp, Artificial Sequence
  derived and/or modified sequence
atggaaagtggagcttatggtgctgctaaggcaggaggtagcttcgacctccgccgttttctgacccagccccaggtggtggctagagcggtgtgccttgtctttgcactgattgttttttcttgcatatatggggagggatatagtaacgctcatgaatcgaaacaaatgtattgcgtcttcaaccgaaacgaggatgcctgtagatacggcagcgcaattggggtgttggcctttctggcctccgccttctttttggtggtggacgcctactttcctcagatcagcaatgcaacggaccggaaatatctggtgatcggcgaccttctgttcagtgccctttggacattcctctggttcgttggtttctgctttcttaccaaccagtgggcggtgacaaatcccaaggacgtgctcgttggagcggacagcgtccgcgcagctatcacattctcattcttttcgatcttctcctggggagtgctggcatccctcgcatatcagcgctataaggctggcgtcgatgactttatccaaaactatgttgaccccacaccagaccctaacacagcatatgcatcttacccaggcgctagcgtcgacaactatcagcagccaccctttacccagaacgccgaaacgactgaaggctatcagccgccacctgtgtattag

SEQ ID NO: 148929 - DNA, 1694 bp, Artificial Sequence
  derived and/or modified sequence
ggcggcggcagcggcggcgacggcgacatggagagcggggcctacggcgcggccaaggcgggcggctccttcgacctgcggcgcttcctgacgcagccgcaggtggtggcgcgcgccgtgtgcttggtcttcgccttgatcgtgttctcctgcatctatggtgagggctacagcaatgcccacgagtctaagcagatgtactgcgtgttcaaccgcaacgaggatgcctgccgctatggcagtgccatcggggtgctggccttcctggcctcggccttcttcttggtggtcgacgcgtatttcccccagatcagcaacgccactgaccgcaagtacctggtcattggtgacctgctcttctcagctctctggaccttcctgtggtttgttggtttctgcttcctcaccaaccagtgggcagtcaccaacccgaaggacgtgctggtgggggccgactctgtgagggcagccatcaccttcagcttcttttccatcttctcctggggtgtgctggcctccctggcctaccagcgctacaaggctggcgtggacgacttcatccagaattacgttgaccccactccggaccccaacactgcctacgcctcctacccaggtgcatctgtggacaactaccaacagccacccttcacccagaacgcggagaccaccgagggctaccagccgccccctgtgtactgagcggcggttagcgtgggaagggggacagagagggccctcccctctgccctggactttcccatgagcctcctggaactgccagcccctctctttcacctgttccatcctgtgcagctgacacacagctaaggagcctcatagcctggcgggggctggcagagccacaccccaagtgcctgtgcccagagggcttcagtcagccgctcactcctccagggcacttttaggaaagggtttttagctagtgtttttcctcgcttttaatgacctcagccccgcctgcagtggctagaagccagcaggtgcccatgtgctactgacaagtgcctcagcttccccccggcccgggtcaggccgtgggagccgctattatctgcgttctctgccaaagactcgtgggggccatcacacctgccctgtgcagcggagccggaccaggctcttgtgtcctcactcaggtttgcttcccctgtgcccactgctgtatgatctgggggccaccaccctgtgccggtggcctctgggctgcctcccgtggtgtgagggcggggctggtgctcatggcacttcctccttgctcccacccctggcagcagggaagggctttgcctgacaacacccagctttatgtaaatattctgcagttgttacttaggaagcctggggagggcaggggtgccccatggctcccagactctgtctgtgccgagtgtattataaaatcgtgggggagatgcccggcctgggatgctgtttggagacggaataaatgttttctcattcagtctccagtcattggttgagccacagcctaggggttggaggaagactccactctgggtacacccttaggggctggctttatggaacttgtagtttgaacaaggcagtggcaatccgccccctccagcctgcctggctggcccccttccctctgtctggggtcgcattccgcacaagcctttcatcaacatcttaaaatagtaactgtg

SEQ ID NO: 148930 - DNA, 675 bp, Artificial Sequence
  derived and/or modified sequence
atggagagcggcgcctacggcgccgccaaggccggcggcagcttcgacctgagaagattcctgacccagccccaggtggtggccagagccgtgtgcctggtgttcgccctgatcgtgttcagctgcatctacggcgagggctacagcaacgcccacgagagcaagcagatgtactgcgtgttcaacagaaacgaggacgcctgcagatacggcagcgccatcggcgtgctggccttcctggccagcgccttcttcctggtggtggacgcctacttcccccagatcagcaacgccaccgacagaaagtacctggtgatcggcgacctgctgttcagcgccctgtggaccttcctgtggttcgtgggcttctgcttcctgaccaaccagtgggccgtgaccaaccccaaggacgtgctggtgggcgccgacagcgtgagagccgccatcaccttcagcttcttcagcatcttcagctggggcgtgctggccagcctggcctaccagagatacaaggccggcgtggacgacttcatccagaactacgtggaccccacccccgaccccaacaccgcctacgccagctaccccggcgccagcgtggacaactaccagcagccccccttcacccagaacgccgagaccaccgagggctaccagcccccccccgtgtactag

SEQ ID NO: 148931 - protein, 233 aa, Artificial Sequence
  derived and/or modified sequence
MEGGAYGAGKAGGAFDPYTLVRQPHTILRVVSWLFSIVVFGSIVNEGYLNSASEGEEFCIYNRNPNACSYGVAVGVLAFLTCLLYLALDVYFPQISSVKDRKKAVLSDIGVSAFWAFLWFVGFCYLANQWQVSKPKDNPLNEGTDAARAAIAFSFFSIFTWAGQAVLAFQRYQIGADSALFSQDYMDPSQDSSMPYAPYVEPTGPDPAGMGGTYQQPANTFDTEPQGYQSQGY

SEQ ID NO: 148932 - protein, 169 aa, Artificial Sequence
  derived and/or modified sequence
MEGGAYGAGKAGGAFDPYTLVRQPHTILRVVSWLFSIVVFGSIVNEGYLNSASEGEEFCIYNRNPNACSYGVAVGVLAFLTCLLYLALDVYFPQISSVKDRKKAVLSDIGVSAFWAFLWFVGFCYLANQWQVSKPKDNPLNEGTDAARAAIAFSFFSIFTWRSGATSPP

SEQ ID NO: 148933 - DNA, 702 bp, Artificial Sequence
  derived and/or modified sequence
atggagggcggcgcctacggcgccggcaaggccggcggcgccttcgacccctacaccctggtgagacagccccacaccatcctgagagtggtgagctggctgttcagcatcgtggtgttcggcagcatcgtgaacgagggctacctgaacagcgccagcgagggcgaggagttctgcatctacaacagaaaccccaacgcctgcagctacggcgtggccgtgggcgtgctggccttcctgacctgcctgctgtacctggccctggacgtgtacttcccccagatcagcagcgtgaaggacagaaagaaggccgtgctgagcgacatcggcgtgagcgccttctgggccttcctgtggttcgtgggcttctgctacctggccaaccagtggcaggtgagcaagcccaaggacaaccccctgaacgagggcaccgacgccgccagagccgccatcgccttcagcttcttcagcatcttcacctgggccggccaggccgtgctggccttccagagataccagatcggcgccgacagcgccctgttcagccaggactacatggaccccagccaggacagcagcatgccctacgccccctacgtggagcccaccggccccgaccccgccggcatgggcggcacctaccagcagcccgccaacaccttcgacaccgagccccagggctaccagagccagggctactag

SEQ ID NO: 148934 - DNA, 702 bp, Artificial Sequence
  derived and/or modified sequence
atggagggaggggcttatggagctggcaaggccgggggcgccttcgatccctacacgctcgttcgtcagccccacactatcctaagggtcgtgtcttggttgttttccatagtggtctttgggtcaatagtgaatgaaggctatctgaattcagcttcagaaggtgaggagttttgtatatataaccggaacccaaacgcctgcagttacggcgtggccgtcggagtcctcgccttcttgacctgtctactttatctcgccctggatgtgtacttcccacagatttcttctgtgaaggaccgcaagaaagcagtgctgtctgacatcggtgttagtgcgttctgggccttcctgtggtttgtggggttctgctacctcgctaaccagtggcaggttagcaagccaaaagataatccgcttaacgagggtaccgacgccgctagggcagcaattgccttttcttttttcagcatcttcacttgggctgggcaagcggtgctcgcctttcagcgataccaaataggggcagattctgccttgttcagtcaggactatatggacccttcccaggacagttcgatgccatatgccccatatgtggagccaactgggcctgacccggccggcatggggggaacctaccagcaacccgctaacacctttgacactgagccgcagggttatcagagccaaggatattag

SEQ ID NO: 148935 - DNA, 702 bp, Artificial Sequence
  derived and/or modified sequence
atggagggcggggcctacggggccggcaaggccggcggggcctttgacccctacaccctggtgcggcagccccacaccatcctgcgggtggtgtcctggctgttcagcatcgtggtgtttggcagcatcgtgaatgaaggctacctgaacagcgccagcgagggggaggagttctgcatctacaacagaaaccccaatgcctgcagctatggagtggccgtgggcgtgctggccttcctgacctgcctgctgtacctggccctggatgtgtacttcccccagatcagctctgtgaaggacaggaagaaggctgtgctgagtgacattggagtgtctgccttctgggccttcctgtggtttgtgggcttctgctacctggccaaccagtggcaggtgtccaagcccaaggacaaccccctgaatgaaggaacagatgctgcccgggccgccatcgccttctccttcttcagcatcttcacctgggccggccaggccgtgctggccttccagcgctaccagatcggggctgacagcgccctcttcagccaggactacatggaccccagccaggacagctccatgccctatgccccctacgtggagcccactggaccagaccctgctggcatgggcggcacctaccagcagcctgccaacacctttgacacagagccccagggctaccagagccagggctactag

SEQ ID NO: 148936 - DNA, 702 bp, Artificial Sequence
  derived and/or modified sequence
atggagggcggcgcctacggcgccggcaaggccggcggcgccttcgacccttacaccctggtgcgccaacctcacacaattctccgcgtggtatcttggttattctctatcgtcgtttttgggtcgatcgtaaacgaagggtacttaaatagcgcatcagagggtgaggaattttgcatctacaatagaaaccctaatgcatgctcttatggcgtggctgtcggggttctggcattcctcacctgcctgttgtaccttgccttggacgtttactttccccagatatcttccgtcaaggatcgcaagaaggccgtgctgtccgacatcggagtgtccgccttctgggcgtttctgtggtttgtcgggttttgctacctggccaaccagtggcaagtgagcaaacccaaggacaatcctctgaatgagggtacagatgctgctagggcggcaatcgcgttttccttttttagcatcttcacgtgggccggacaggccgttctggcctttcagcgctaccagatcggcgccgatagcgccctgtttagccaggattacatggacccaagccaggacagttccatgccttacgctccgtacgtagaacccactgggcctgaccccgccgggatgggtgggacctaccaacagcctgctaataccttcgatacagaacctcaaggttaccaatcacagggatactag

SEQ ID NO: 148937 - DNA, 702 bp, Artificial Sequence
  derived and/or modified sequence
atggagggcggagcatacggagccggaaaagctgggggagccttcgatccttacaccctggtaagacagccccataccatcttgagggtggtgtcttggcttttctcaatcgtagtattcggctctatagtcaacgagggttacctgaactctgcatccgaaggtgaggagttctgcatttacaaccgaaatcccaatgcttgctcatatggcgttgccgtaggcgtgctggcttttctgacctgcctcttgtacttagctctggacgtctactttccacagatcagcagcgttaaggataggaagaaggcagtcctgagcgatatcggcgtcagtgccttctgggccttcctgtggttcgtgggattttgttacctggccaaccaatggcaggtttccaagcccaaggataaccccctaaacgaaggtactgacgctgctagagcggctatcgcctttagcttttttagcattttcacttgggctggccaagccgtactcgcattccagcgttaccagataggcgctgattcagccttattcagccaggactatatggatccttcgcaggactccagcatgccatacgcaccatatgtcgaacccacaggcccagaccctgccggaatggggggaacctaccagcaacccgctaatacatttgatacagagccgcagggataccagtctcagggatactag

SEQ ID NO: 148938 - DNA, 4391 bp, Artificial Sequence
  derived and/or modified sequence
gcgggtgcagccacgatggaagggggtgcgtacggagcgggcaaagccgggggcgccttcgacccctacaccctggtccggcagccgcacaccatcctgcgcgtcgtgtcttggctgttctccatagtggtgttcggctccatcgtgaacgagggctacctcaacagcgcctccgagggggaggagttctgcatctacaaccgcaaccccaacgcctgcagctatggcgtggccgtgggcgtgctcgccttcctcacctgcctgctgtacctggccctggacgtgtacttcccgcagatcagcagcgtcaaggaccgcaagaaagccgtcctgtccgacatcggtgtctcggccttctgggctttcctctggttcgtgggattctgctacctggccaaccagtggcaggtctccaagcccaaggacaacccactgaacgaagggacggacgcagcccgggccgccatcgccttctcctttttctccatcttcacctgggcgggccaggctgtgctggccttccagcggtaccagattggcgccgactcggccctcttctcccaggactacatggaccccagccaggactccagcatgccttacgcgccctacgtggagcccactgggccggatcccgccggtatgggcggcacctaccagcagccggccaacaccttcgacaccgagccccagggctaccagtcgcagggctactgagccacagtgaccgcctgcccccgcccctccccatctgtcccctctctccacacccagcccctgctcctgcccaggctgccctgcccagcgcctcatcagcctctgccttgtcccactgaggtccagggtagctcggggcaggggtggggcagtccagtgttggggactgtctacgtatgtgcaagtatatcccagggcatgtgccccgcaggggcctagagggtgggggccaggggtatttgcattcatacattgtgtcatcaagcattccttgagcgcctactgggcatccggcctgtgctgggcatgggtggtgacattggcagaaatggccactggaaaggggagcgatgagctgtggaggaagccctggtggtaccagaggccagaatggtgggaaagacagatccagataatgctgggaagtgtggctacaccgtggcttggtcatagggtgagtgtaaacacccacaggacactgggggctgtcaccctgctctggcagtcctgctaagagtgtcagggccgtctccattttatggttgaggaaactgaggtctagagaggtcaagattacttgcccagaatcactcaggcagctagtgatagaggtggggccaagcccaggctgcccgactgcagaccacgtgctcttccctggccacccacctcctaccatccccacgcttggggcttccctgctcagtgttactgtcattctgggaggccttggggccctcagccccttgagacaccctgattctgctgcatgccaagggcctgttctgccccagctgttcctcctcccctggggacagccccacctccgggtccctccacccacatccccctggtcctacccctggcccttggcctcctccaagagggctcaccccgggtgctgctctgtgctctgcgtgtcccacagacgcttgttccagggggctccagcaaaccccttcgtggtctctcaaaggactgatcactgtccttgcctctaggaggggtcactaagcccttacctagggctgggtggacaacaaggcacagatgagggtgtgactggcccgaggtcacggtgagtgagtggcaaagctggccctgacgcctgggtttcttggccccagctgcccagcaggtgcctcgattccctgcccttgtgacctcccaggaaacagaactgatctgggacactatgtcacctctcctctcatctggggtcagtcagggttcgggggctgcagcagccaagcgcatgagaggtgtttccttggccttccagaaggcccactgtggagccagcctccctatgggaggcagagcggcaaggacagggctttggaatcagccaggtcggctcctgggctgtggccgtggagagacactgcccccaggatgacacaggcaagagcccctgaggcatgggaggcccagggaagaccatgggctgtaggggagagtgtggcaggtgacccaaaggcccaaagagggccgtggggcctgaggaggtcataatctcttctgagtgggggcaggtcgattcttgcacaaggtgggctcttcactgagccataagggacagggaggtatgggagagcgctgggggcccatccccctgtccacccagtgtccactggcctgtccttcagggagcagagcagagcaggtggtggacgggcccagtgctgggtgttttcaccaccatccccccatcccccatctaagaatcctaagaggcaggcgatccctcacctgcttactcactcagcagttacccggcccctgtgctggagataccaagggcatgggtggtccctgcttcgatggccccaaagctgggccagagttaagggaaagaggaggaagtcctaagcagagaagtagcaccattatccccatttaacagaagggaaactgaggctcggcaagcataggcgagttggcagtggaacacggatctaaactcaggtgtgtccaagtcctcccaaaggacagcagtgatggagaggaccccagccagctgtgtgacagctggttgttgctgacttcattttccaatccggagaaggggctctgtccacagtcccccgccgccaggtggcccacatgggaccagcatgggggcaggttatctgttggcctgaagagtgaaacctgtaccaggccaaaggtgagggcgtgagtgagggcaggagtgtttatggcagagtgaagttctgtgcccaccacaagaggctgtgagatgttctgaccctcacccactgtccaccaaaagcctctcctgctgatgggcactaggagacctcagggtactgcccatctgtttctcctcgggtgccagccagctgctggtgatcctcagccggagggcagggtaccaggtaagcttaactccatcttgggtgtttgtgacaggccctgcctgccaccctaggcagggaaagctgtcaagactcctgccaggaatggggggtgctgagtcatctcacgaagaatccctcactcttcccgggttcagcccagaagcccttccaggcatgatcttccccatcaggctgggctctggcagggacctgcccaggatggagatgagagagggtgagagatggagggcgagatttggatgggacccagggctcctgactctgccctggaaggttcatggggaaactcgctccttctgttggcagaggacagcccctggggaaccccaggcccaactctgtccggtatcccttttcctcccagctgccctcccctacttctcccttgctcccaaagctttccttggagaagggccctcctgcagctggaccctgcagggtggctccctcctccccatcaagcacaagagagggcccaggaaaaaaggtttcacataagtgtagagtcgcaaggacgcttagagtcggcagagtctggggtagggagacagcgacttgtccaaggtcaagcacagagggagaggttcaggagtcaggtcttctgccttctgagttggctcatcctgggcagtcacagactgtcctgcctgcacggctcctatccacctgggggtgtcgcagttgaggggctaattcccaggggactgacgttagttccctactccatccttccctggtgattcttgatcttcaaagcctcggggatcccaggtttccccatgtaactgagacaccctgcctgttagccctgggagacccctaaccttggcccaagacccctttgattctctaaggagcacgaaagggggaatgcccctcccaggagtttatgggagaagggactgggccggctgcctcccagcgatgcacttgacctgacactccccatgtcctggtgcgcacagcccttgtcggtgccccggcccctcccgcagcgttactgcctgtgtatagtataaatatatatattttctatatataagatgtataatataaggctccacaaatatatctgtgtgtgtgtgtgcgtgtgtgtgcggtgaagggcggtccccatcctgggcccccactctagacccccccaccacctggttaagtctcgagtgaatccagtggccccgtggcaccctcctttatgacatccatccatctgtggtgaaccaagtgaaggtggtgacttctggtgacatagtaataaagtgaagactcagaacccaccagcgattgcaa

SEQ ID NO: 148939 - protein, 777 aa, Artificial Sequence
  derived and/or modified sequence
MGRGSGTFERLLDKATSQLLLETDWESILQICDLIRQGDTQAKYAVNSIKKKVNDKNPHVALYALEVMESVVKNCGQTVHDEVANKQTMEELKDLLKRQVEVNVRNKILYLIQAWAHAFRNEPKYKVVQDTYQIMKVEGHVFPEFKESDAMFAAERAPDWVDAEECHRCRVQFGVMTRKHHCRACGQIFCGKCSSKYSTIPKFGIEKEVRVCEPCYEQLNRKAEGKATSTTELPPEYLTSPLSQQSQLPPKRDETALQEEEELQLALALSQSEAEEKERLRQKSTYTSYPKAEPMPSASSAPPASSLYSSPVNSSAPLAEDIDPELARYLNRNYWEKKQEEARKSPTPSAPVPLTEPAAQPGEGHAAPTNVVENPLPETDSQPIPPSGGPFSEPQFHNGESEESHEQFLKALQNAVTTFVNRMKSNHMRGRSITNDSAVLSLFQSINGMHPQLLELLNQLDERRLYYEGLQDKLAQIRDARGALSALREEHREKLRRAAEEAERQRQIQLAQKLEIMRQKKQEYLEVQRQLAIQRLQEQEKERQMRLEQQKQTVQMRAQMPAFPLPYAQLQAMPAAGGVLYQPSGPASFPSTFSPAGSVEGSPMHGVYMSQPAPAAGPYPSMPSTAADPSMVSAYMYPAGATGAQAAPQAQAGPTASPAYSSYQPTPTAGYQNVASQAPQSLPAISQPPQSSTMGYMGSQSVSMGYQPYNMQNLMTTLPSQDASLPPQQPYIAGQQPMYQQMAPSGGPPQQQPPVAQQPQAQGPPAQGSEAQLISFD

SEQ ID NO: 148940 - protein, 691 aa, Artificial Sequence
  derived and/or modified sequence
MGRGSGTFERLLDKATSQLLLETDWESILQICDLIRQGDTQAKYAVNSIKKKVNDKNPHVALYALEVMESVVKNCGQTVHDEVANKQTMEELKDLLKRQVEVNVRNKILYLIQAWAHAFRNEPKYKVVQDTYQIMKVEGHVFPEFKESDAMFAAERAPDWVDAEECHRCRVQFGVMTRKHHCRACGQIFCGKCSSKYSTIPKFGIEKEVRVCEPCYEQLNRKAEGKATSTTELPPEYLTSPLSQQSQLPPKRDETALQEEEELQLALALSQSEAEEKERLRQKSTYTSYPKAEPMPSASSAPPASSLYSSPVNSSAPLAEDIDPELARYLNRNYWEKKQEEARKSPTPSAPVPLTEPAAQPGEGHAAPTNVVENPLPETDSQPIPPSGGPFSEPQFHNGESEESHEQFLKALQNAVTTFVNRMKSNHMRGRSITNDSAVLSLFQSINGMHPQLLELLNQLDERRLYYEGLQDKLAQIRDARGALSALREEHREKLRRAAEEAERQRQIQLAQKLEIMMHGVYMSQPAPAAGPYPSMPSTAADPSMVSAYMYPAGATGAQAAPQAQAGPTASPAYSSYQPTPTAGYQNVASQAPQSLPAISQPPQSSTMGYMGSQSVSMGYQPYNMQNLMTTLPSQDASLPPQQPYIAGQQPMYQQMAPSGGPPQQQPPVAQQPQAQGPPAQGSEAQLISFD

SEQ ID NO: 148941 - DNA, 2334 bp, Artificial Sequence
  derived and/or modified sequence
atgggccgggggtctgggacctttgagaggctcctcgacaaggcaacatctcagcttctgctggagacagactgggagagtatcctgcaaatctgcgaccttatcaggcagggggatactcaagccaagtacgcagtcaactccattaagaagaaggtcaatgacaagaatccccacgtcgcgctctacgcgctcgaggtgatggaatccgtggtaaagaattgtggccaaactgtgcacgacgaagtggccaataaacaaactatggaggagttgaaagatctcctgaagagacaagtggaggtgaatgtgaggaacaagattctctacctgatacaggcatgggcccacgctttcaggaatgagccaaagtataaagtcgtccaggatacataccagatcatgaaggtcgaaggacacgtattcccggagtttaaagaatctgatgccatgttcgccgccgaacgggccccagattgggtggacgccgaagagtgtcaccgctgtagggtgcagtttggggtgatgacacggaagcaccactgtcgagcctgcggccaaattttttgcggtaaatgtagtagtaaatacagcactatccctaagttcgggattgaaaaggaggtacgggtctgtgagccctgctacgaacaattaaatcgaaaagccgaaggaaaagcaaccagtaccaccgaactgccccccgagtacctcacaagccctctgtctcaacagagtcaactgccacccaagcgggacgaaacagcgctgcaggaagaggaagagcttcagctagctctggcactgtcccagagcgaggcggaagaaaaggaaaggctgagacaaaagtctacatatacatcctaccctaaggcagaacccatgcccagcgccagtagtgccccccctgcatccagcctgtactcaagtcctgtgaattccagcgcacctcttgcagaggatatcgaccccgagctggcccggtatcttaatcggaactattgggagaagaagcaggaagaggcaagaaaaagccctactccttccgccccagtgccactgactgagcccgccgcacagcccggggagggccacgcagcgcccaccaatgtggtcgagaaccctctgcctgagacagacagccagcccattccgccatccggcggcccattctctgaaccccaatttcacaacggagagtctgaagagagtcacgaacagttcctgaaggcattgcagaacgctgtcacaacttttgtgaatcgcatgaaatctaaccacatgcggggccgttcaattactaatgattcagcagtgctaagcctcttccagagcataaacggaatgcatcctcagctgcttgaactgcttaaccagctggatgaaaggaggttgtattatgaagggctgcaagacaagctggctcagatccgggatgctagaggcgcgctttcagcactgagagaggagcacagagagaagcttaggcgcgcagctgaggaagcggagcggcagcgccagattcagctcgcacaaaaactagagataatgcgacagaagaagcaagagtatttggaggtccagaggcagctagcaatccagcgattgcaggagcaggagaaagaacgccaaatgcggctcgagcagcagaagcagaccgtccagatgcgagcccaaatgccggcttttcctttgccttatgctcagctccaggccatgcccgccgctggaggagtgctctaccagccctcaggccccgcgtcatttccgtccacattcagcccagcaggatcagtcgaaggctcccccatgcacggtgtgtacatgagtcagccggcacctgcagcgggcccatacccctcaatgccaagcacggccgccgatcctagcatggttagcgcctacatgtacccagcgggagccactggcgcccaggccgctccccaggcccaggctggccctactgcctctcccgcctactcttcctatcagcccacacctaccgcaggttaccagaacgtagcctcccaggccccccagtcactgcccgccatctcccaaccaccacaatcctccaccatgggatatatgggatcccagtccgtgagcatggggtatcagccttacaatatgcagaacctcatgaccacccttccatcacaggacgcgagtcttcctcctcagcagccatacatcgccggccagcaaccaatgtaccaacagatggctccatcagggggtccccctcagcagcagccgccagtcgcccagcagccacaagcgcaggggccacctgcacagggaagcgaggcgcagcttatcagcttcgattag

SEQ ID NO: 148942 - DNA, 2906 bp, Artificial Sequence
  derived and/or modified sequence
cggaagcggaagtcggggggcgcgccagctcgtagcaggggagcgcccgcggcgtcgggtttgggctggaggtcgccatggggcgaggcagcggcaccttcgagcgtctcctagacaaggcgaccagccagctcctgttggagacagattgggagtccattttgcagatctgcgacctgatccgccaaggggacacacaagcaaaatatgctgtgaattccatcaagaagaaagtcaacgacaagaacccacacgtcgccttgtatgccctggaggtcatggaatctgtggtaaagaactgtggccagacagttcatgatgaggtggccaacaagcagaccatggaggagctgaaggacctgctgaagagacaagtggaggtaaacgtccgtaacaagatcctgtacctgatccaggcctgggcgcatgccttccggaacgagcccaagtacaaggtggtccaggacacctaccagatcatgaaggtggaggggcacgtctttccagaattcaaagagagcgatgccatgtttgctgccgagagagccccagactgggtggacgctgaggaatgccaccgctgcagggtgcagttcggggtgatgacccgtaagcaccactgccgggcgtgtgggcagatattctgtggaaagtgttcttccaagtactccaccatccccaagtttggcatcgagaaggaggtgcgcgtgtgtgagccctgctacgagcagctgaacaggaaagcggagggaaaggccacttccaccactgagctgccccccgagtacctgaccagccccctgtctcagcagtcccagctgccccccaagagggacgagacggccctgcaggaggaggaggagctgcagctggccctggcgctgtcacagtcagaggcggaggagaaggagaggctgagacagaagtccacgtacacttcgtaccccaaggcggagcccatgccctcggcctcctcagcgccccccgccagcagcctgtactcttcacctgtgaactcgtcggcgcctctggctgaggacatcgaccctgagctcgcacggtatctcaaccggaactactgggagaagaagcaggaggaggctcgcaagagccccacgccatctgcgcccgtgcccctgacggagccggctgcacagcctggggaagggcacgcagcccccaccaacgtggtggagaaccccctcccggagacagactctcagcccattcctccctctggtggcccctttagtgagccacagttccacaatggcgagtctgaggagagccacgagcagttcctgaaggcgctgcagaacgccgtcaccaccttcgtgaaccgcatgaagagtaaccacatgcggggccgcagcatcaccaatgactcggccgtgctctcactcttccagtccatcaacggcatgcacccgcagctgctggagctgctcaaccagctggacgagcgcaggctgtactatgaggggctgcaggacaagctggcacagatccgcgatgcccggggggcgctgagtgccctgcgcgaagagcaccgggagaagcttcgccgggcagccgaggaggcagagcgccagcgccagatccagctggcccagaagctggagataatgcggcagaagaagcaggagtacctggaggtgcagaggcagctggccatccagcgcctgcaggagcaggagaaggagcggcagatgcggctggagcagcagaagcagacggtccagatgcgcgcgcagatgcccgccttccccctgccctacgcccagctccaggccatgcccgcagccggaggtgtgctctaccagccctcgggaccagccagcttccccagcaccttcagccctgccggctcggtggagggctccccaatgcacggcgtgtacatgagccagccggcccctgccgctggcccctaccccagcatgcccagcactgcggctgatcccagcatggtgagtgcctacatgtacccagcaggggccactggggcgcaggcggccccccaggcccaggccggacccaccgccagccccgcttactcatcctaccagcctactcccacagcgggctaccagaacgtggcctcccaggccccacagagcctcccggccatctctcagcctccgcagtccagcaccatgggctacatggggagccagtcagtctccatgggctaccagccttacaacatgcagaatctcatgaccaccctcccaagccaggatgcgtctctgccaccccagcagccctacatcgcggggcagcagcccatgtaccagcagatggcaccctctggcggtcccccccagcagcagccccccgtggcccagcaaccgcaggcacaggggccgccggcacagggcagcgaggcccagctcatttcattcgactgacccaggccatgctcacgtccggagtaacactacatacagttcacctgaaacgcctcgtctctaactgccgtcgtcctgcctccctgtcctctactgccggtagtgtcccttctctgcgagtgagggggggccttcaccccaagcccacctcccttgtcctcagcctactgcagtccctgagttagtctctgctttctttccccagggctgggccatggggagggaaggactttctcccaggggaagcccccagccctgtgggtcatggtctgtgagaggtggcaggaatggggaccctcaccccccaagcagcctgtgccctctggccgcactgtgagctggctgtggtgtctgggtgtggcctggggctccctctgcaggggcctctctcggcagccacagccaagggtggaggcttcaggtctccagcttctctgcttctcagctgccatctccagtgccccagaatggtacagcgataataaaatgtatttc

SEQ ID NO: 148943 - DNA, 2334 bp, Artificial Sequence
  derived and/or modified sequence
atgggccggggcagcggcacctttgagcggctgctggacaaggccaccagccagctgctgctggagacagactgggagagcatcctgcagatctgtgacctgatccggcagggcgacacccaggccaagtatgctgtgaacagcatcaagaagaaggtgaatgacaagaacccccacgtggccctgtatgccctggaggtgatggagagcgtggtgaagaactgtggccagacagtgcatgatgaggtggccaacaagcagaccatggaggagctgaaggacctgctgaagaggcaggtggaggtgaatgtgaggaacaagatcctgtacctgatccaggcctgggcccacgccttcagaaatgagcccaagtacaaggtggtgcaggacacctaccagatcatgaaggtggagggccacgtgtttcctgagttcaaggagagtgatgccatgtttgctgctgagcgggccccagactgggtggatgctgaggagtgccaccgctgccgggtgcagtttggagtgatgaccaggaagcaccactgccgggcctgtggccagatcttctgtgggaagtgcagcagcaagtacagcaccatccccaagtttggaattgagaaggaggtgcgggtgtgtgagccctgctatgagcagctgaacaggaaggccgagggcaaggccaccagcaccacagagctgcccccagagtacctgaccagccccctgagccagcagagccagctgccccccaagagagatgaaacagccctgcaggaggaggaggagctgcagctggccctggccctgagccagagcgaggccgaggagaaggagcggctgcggcagaagagcacctacaccagctaccccaaggccgagcccatgcccagcgccagcagcgcccccccagccagcagcctgtacagcagccctgtgaacagcagcgcccccctggccgaggacatcgaccctgagctggcccgctacctgaacagaaactactgggagaagaagcaggaggaggccaggaagagccccaccccatctgcccctgtgcccctgacagagcctgctgcccagcctggagagggccacgccgcccccaccaacgtggtggagaaccccctgcctgagacagacagccagcccatccccccatctgggggccccttcagcgagccccagttccacaacggggagagcgaggagagccatgagcagttcctgaaggccctgcagaatgctgtgaccacctttgtgaacaggatgaagagcaaccacatgaggggccgcagcatcaccaatgattctgctgtgctgagcctcttccagagcatcaatggcatgcacccccagctgctggagctgctgaaccagctggatgaaagaagactctactatgagggcctgcaggacaagctggcccagatcagagatgcccggggggccctgagcgccctgcgggaggagcaccgggagaagctgcggcgggctgctgaggaggccgagcggcagaggcagatccagctggcccagaagctggagatcatgaggcagaagaagcaggagtacctggaggtgcagaggcagctggccatccagaggctgcaggagcaggagaaggagcggcagatgaggctggagcagcagaagcagacagtgcagatgagggcccagatgcctgccttccccctgccctatgcccagctgcaggccatgcctgctgctgggggcgtgctgtaccagcccagcggccctgccagcttccccagcaccttctccccagctggctctgtggagggcagccccatgcatggagtgtacatgagccagcctgccccagctgctggcccctaccccagcatgcccagcacagctgctgaccccagcatggtgtctgcctacatgtacccagctggggccaccggggcccaggccgccccccaggcccaggccggccccacagccagccctgcctacagcagctaccagcccacccccacagctggctaccagaatgtggccagccaggccccccagagcctgcctgccatcagccagcccccccagagcagcaccatgggctacatgggcagccagagcgtgtccatgggctaccagccctacaacatgcagaacctgatgaccaccctgcccagccaggatgccagcctgcccccccagcagccctacatcgccggccagcagcccatgtaccagcagatggcccccagcggcggccccccccagcagcagccccctgtggcccagcagccccaggcccagggccccccagcccagggcagcgaggcccagctgatcagctttgattag

SEQ ID NO: 148944 - DNA, 2334 bp, Artificial Sequence
  derived and/or modified sequence
atgggccggggcagcggcaccttcgagcggctgctggacaaggccacgagccagctgctgctggaaacggattgggagagcatcctgcagatctgcgatctgatcagacaaggggatacccaggccaaatacgcagttaattctattaaaaagaaggtaaatgataagaacccacacgtcgccctatatgcactagaggtgatggagagcgtagtcaagaattgcgggcagaccgtccacgacgaagtagctaataagcagacaatggaggaactcaaggatctgttaaagcgccaagtagaggtcaacgtgcggaataaaattttatatctgattcaggcctgggcccatgctttccggaatgagcccaagtacaaagtggtccaggatacctatcagatcatgaaggtggaagggcacgttttccccgaatttaaggagtcagatgccatgttcgccgcagagagagcgccagattgggttgacgccgaggaatgtcaccggtgcagggtgcagtttggagtgatgacacgtaaacaccactgcagggcctgtggacagatcttctgcggcaaatgttcatccaaatacagcacgatcccaaagttcgggatagaaaaagaggttagagtttgcgaaccatgttacgagcagttaaatcgtaaggccgaaggtaaagccacatccacaacagagctccccccggaataccttacctctcctctcagccagcagtcccagctgccaccaaagagggacgaaaccgccttgcaggaggaagaagagctgcagctggctctagccctctcccagagcgaggctgaagagaaagaacgtctgcgccagaagagcacatatacaagctacccaaaggccgagcctatgccatctgcctctagcgcccccccagcttcatctttgtattcgagcccagtcaactcatctgcaccgctggcggaggatatcgacccagagctggccagatatctgaaccgtaactattgggaaaagaagcaggaggaggcccggaaatcgccaaccccatctgcccctgtgccattgaccgagcccgctgcccaacctggagagggccacgccgcaccaaccaacgtggtagagaacccgctgcccgaaacagacagccagcctattcctccttccggtggaccatttagcgaacctcagtttcacaatggggagagcgaagagagtcacgaacagtttcttaaggcccttcagaacgccgtgacaacatttgtgaataggatgaaaagcaatcacatgcggggtaggtctataactaatgactcagccgtgcttagcttgttccagagcattaacggcatgcatccccagttgctcgaactgttgaatcagctggacgagcgccgcctgtactatgagggcctgcaagacaagctggctcaaattcgcgacgctcggggtgcgctgagtgctctgcgcgaagagcatagggagaagctccgcagagccgcagaggaagccgaaagacagagacagattcagttggcccagaagcttgagattatgcggcagaagaaacaggagtaccttgaagtccaacgacagttggccattcaacgtcttcaggagcaggagaaagaacggcagatgagactcgaacagcaaaagcagacggtgcagatgagggctcagatgcctgcctttcctctgccttatgctcaactgcaggctatgcctgctgctggaggcgtgttatatcagcctagcggacccgcttcattcccttccaccttttcaccggccgggtcggtcgaaggatctccgatgcatggtgtctacatgtcccaacctgcccccgctgccggaccttatccttccatgccttccaccgcagccgatccctcgatggtgagtgcctacatgtaccccgccggggcaacaggagcacaggcagcacctcaggcccaagctggtcctaccgccagtcccgcttatagctcttatcaacccacgcccacagctggataccagaatgtcgcatcacaagctccccagtcactcccggcgatatcgcagcctcctcaatccagcaccatggggtatatggggagccaaagcgtgagtatgggctaccagccttacaatatgcagaaccttatgacaactttaccatcccaagatgcctcccttccaccacagcagccctacattgccggccagcaacctatgtatcagcaaatggccccttctggtggacctccacagcagcagcctcctgtggcccagcagccccaagctcaaggtcccccagctcagggttctgaagctcagctcatttcattcgattag

SEQ ID NO: 148945 - DNA, 2334 bp, Artificial Sequence
  derived and/or modified sequence
atgggtaggggatcagggaccttcgagagactgctggacaaggccacgtcccagctgttgctggagacggactgggagtctatcctgcagatctgcgacctgattagacaaggcgatacacaagccaagtatgccgttaattccatcaagaaaaaggtcaatgataagaacccacatgtagcattgtacgcgctggaggtcatggagagcgtggtgaagaattgcggccagacagtccacgacgaggtggcaaacaaacagactatggaggagcttaaggatctattgaaaagacaggtggaggtaaatgtgcgcaataagatcctgtacctcatccaggcttgggcacatgctttcaggaacgagcccaagtataaagtggttcaggacacgtaccagattatgaaggttgaggggcatgtgttcccagagttcaaagaatccgacgccatgtttgccgcagaacgagcccctgactgggtcgatgccgaggaatgtcaccggtgtagagttcagttcggggtaatgaccaggaagcaccattgccgcgcttgcggtcagatcttctgtggaaaatgctcttctaaatatagtacgataccaaagtttggaattgagaaagaagtaagagtgtgcgagccctgctatgagcagctcaacaggaaagcagagggaaaggccacaagtactacagagttgccgccagagtatctgactagccctctctcgcagcagtcacaacttcctcctaaacgcgatgaaacggctctgcaagaagaagaagagcttcagctggcacttgctctgtctcagtctgaggctgaggaaaaggagagacttcgtcagaaaagtacctatacctcctatcccaaggctgaacctatgccatcagccagctcagccccaccggcaagctctctctactccagccccgtcaattcatctgcccctctcgcagaagacatcgatccggagctagctagatatctcaataggaattattgggagaagaagcaggaggaggcccgtaaatctcctactcctagcgcccctgtccccctgacagaacctgccgctcagcctggagaaggccatgccgctcccaccaatgtggttgaaaaccccctgcctgagacagacagccaacctatcccgccttccggcggtccgtttagcgagccacagttccacaatggagagtcggaagagtcgcatgagcagtttctcaaggccctccaaaacgccgtgacgacgtttgtgaatcggatgaagagcaatcatatgagaggtaggtctattacgaacgattctgccgtactgagcctctttcagtcaattaatggaatgcacccccagctgctggagctgttgaatcaactggacgagcgcaggctctattacgaagggcttcaggacaagctggctcaaatccgcgacgccagaggggcattgtccgcgttgcgagaggagcatcgtgagaagctgagacgagcagccgaagaagcggagaggcagcgccaaattcaactggcacagaaactggagattatgaggcagaagaaacaagaatacctggaggtgcaacgacagcttgcgatccagcggctgcaagagcaagaaaaagagcgccagatgcgtctcgaacaacaaaagcagactgtccagatgagagcccagatgcctgccttcccccttccttatgcccagcttcaagccatgcccgcagctggaggcgtactctaccagccttccggaccggctagtttcccttcaactttctcacctgcaggttcagtggagggatcaccaatgcacggcgtgtacatgagtcagcctgcgcctgcggcagggccatacccatcgatgccatctactgctgccgaccctagtatggtctcagcctacatgtatccagctggggcaactggggctcaggcagcccctcaggctcaggctgggcctaccgcaagtcccgcttatagttcttatcagcccacccccacagcgggttaccagaatgtggctagtcaggcccctcagtcattaccagcaatctcacagccaccccagtcctccaccatgggctacatgggcagccaaagcgtcagcatggggtaccagccctacaacatgcagaaccttatgaccactctaccctctcaagacgctagcctaccgccacaacaaccttacatcgcgggtcagcagcccatgtaccagcaaatggccccatctggaggacctccccagcagcagccaccggtggcccagcagccacaagcgcaaggcccaccagcccaaggcagcgaggcccagctgatttctttcgattag

SEQ ID NO: 148946 - DNA, 2334 bp, Artificial Sequence
  derived and/or modified sequence
atgggcagaggcagcggcaccttcgagagactgctggacaaggccaccagccagctgctgctggagaccgactgggagagcatcctgcagatctgcgacctgatcagacagggcgacacccaggccaagtacgccgtgaacagcatcaagaagaaggtgaacgacaagaacccccacgtggccctgtacgccctggaggtgatggagagcgtggtgaagaactgcggccagaccgtgcacgacgaggtggccaacaagcagaccatggaggagctgaaggacctgctgaagagacaggtggaggtgaacgtgagaaacaagatcctgtacctgatccaggcctgggcccacgccttcagaaacgagcccaagtacaaggtggtgcaggacacctaccagatcatgaaggtggagggccacgtgttccccgagttcaaggagagcgacgccatgttcgccgccgagagagcccccgactgggtggacgccgaggagtgccacagatgcagagtgcagttcggcgtgatgaccagaaagcaccactgcagagcctgcggccagatcttctgcggcaagtgcagcagcaagtacagcaccatccccaagttcggcatcgagaaggaggtgagagtgtgcgagccctgctacgagcagctgaacagaaaggccgagggcaaggccaccagcaccaccgagctgccccccgagtacctgaccagccccctgagccagcagagccagctgccccccaagagagacgagaccgccctgcaggaggaggaggagctgcagctggccctggccctgagccagagcgaggccgaggagaaggagagactgagacagaagagcacctacaccagctaccccaaggccgagcccatgcccagcgccagcagcgccccccccgccagcagcctgtacagcagccccgtgaacagcagcgcccccctggccgaggacatcgaccccgagctggccagatacctgaacagaaactactgggagaagaagcaggaggaggccagaaagagccccacccccagcgcccccgtgcccctgaccgagcccgccgcccagcccggcgagggccacgccgcccccaccaacgtggtggagaaccccctgcccgagaccgacagccagcccatcccccccagcggcggccccttcagcgagccccagttccacaacggcgagagcgaggagagccacgagcagttcctgaaggccctgcagaacgccgtgaccaccttcgtgaacagaatgaagagcaaccacatgagaggcagaagcatcaccaacgacagcgccgtgctgagcctgttccagagcatcaacggcatgcacccccagctgctggagctgctgaaccagctggacgagagaagactgtactacgagggcctgcaggacaagctggcccagatcagagacgccagaggcgccctgagcgccctgagagaggagcacagagagaagctgagaagagccgccgaggaggccgagagacagagacagatccagctggcccagaagctggagatcatgagacagaagaagcaggagtacctggaggtgcagagacagctggccatccagagactgcaggagcaggagaaggagagacagatgagactggagcagcagaagcagaccgtgcagatgagagcccagatgcccgccttccccctgccctacgcccagctgcaggccatgcccgccgccggcggcgtgctgtaccagcccagcggccccgccagcttccccagcaccttcagccccgccggcagcgtggagggcagccccatgcacggcgtgtacatgagccagcccgcccccgccgccggcccctaccccagcatgcccagcaccgccgccgaccccagcatggtgagcgcctacatgtaccccgccggcgccaccggcgcccaggccgccccccaggcccaggccggccccaccgccagccccgcctacagcagctaccagcccacccccaccgccggctaccagaacgtggccagccaggccccccagagcctgcccgccatcagccagcccccccagagcagcaccatgggctacatgggcagccagagcgtgagcatgggctaccagccctacaacatgcagaacctgatgaccaccctgcccagccaggacgccagcctgcccccccagcagccctacatcgccggccagcagcccatgtaccagcagatggcccccagcggcggccccccccagcagcagccccccgtggcccagcagccccaggcccagggcccccccgcccagggcagcgaggcccagctgatcagcttcgactag

SEQ ID NO: 148947 - protein, 1076 aa, Artificial Sequence
  derived and/or modified sequence
MKSRFSTIDLRAVLAELNASLLGMRVNNVYDVDNKTYLIRLQKPDFKATLLLESGIRIHTTEFEWPKNMMPSSFAMKCRKHLKSRRLVSAKQLGVDRIVDFQFGSDEAAYHLIIELYDRGNIVLTDYEYVILNILRFRTDEADDVKFAVRERYPLDHARAAEPLLTLERLTEIVASAPKGELLKRVLNPLLPYGPALIEHCLLENGFSGNVKVDEKLETKDIEKVLVSLQKAEDYMKTTSNFSGKGYIIQKREIKPSLEADKPVEDILTYEEFHPFLFSQHSQCPYIEFESFDKAVDEFYSKIEGQKIDLKALQQEKQALKKLDNVRKDHENRLEALQQAQEIDKLKGELIEMNLQIVDRAIQVVRSALANQIDWTEIGLIVKEAQAQGDPVASAIKELKLQTNHVTMLLRNPYLLSEEEDDDVDGDVNVEKNETEPPKGKKKKQKNKQLQKPQKNKPLLVDVDLSLSAYANAKKYYDHKRYAAKKTQKTVEAAEKAFKSAEKKTKQTLKEVQTVTSIQKARKVYWFEKFLWFISSENYLIIGGRDQQQNEIIVKRYLTPGDIYVHADLHGATSCVIKNPTGEPIPPRTLTEAGTMALCYSAAWDARVITSAWWVYHHQVSKTAPTGEYLTTGSFMIRGKKNFLPPSYLMMGFSFLFKVDESCVWRHQGERKVRVQDEDMETLASCTSELISEEMEQLDGGDTSSDEDKEEHETPVEVELMTQVDQEDITLQSGRDELNEELIQEESSEDEGEYEEVRKDQDSVGEMKDEGEETLNYPDTTIDLSHLQPQRSIQKLASKEESSNSSDSKSQSRRHLSAKERREMKKKKLPSDSGDLEALEGKDKEKESTVHIETHQNTSKNVAAVQPMKRGQKSKMKKMKEKYKDQDEEDRELIMKLLGSAGSNKEEKGKKGKKGKTKDEPVKKQPQKPRGGQRVSDNIKKETPFLEVITHELQDFAVDDPHDDKEEQDLDQQGNEENLFDSLTGQPHPEDVLLFAIPICAPYTTMTNYKYKVKLTPGVQKKGKAAKTALNSFMHSKEATAREKDLFRSVKDTDLSRNIPGKVKVSAPNLLNVKRK

SEQ ID NO: 148948 - protein, 1034 aa, Artificial Sequence
  derived and/or modified sequence
MKSRFSTIDLRAVLAELNASLLGMRVNNVYDVDNKTYLIRLQKPDFKATLLLESGIRIHTTEFEWPKNMMPSSFAMKGNIVLTDYEYVILNILRFRTDEADDVKFAVRERYPLDHARAAEPLLTLERLTEIVASAPKGELLKRVLNPLLPYGPALIEHCLLENGFSGNVKVDEKLETKDIEKVLVSLQKAEDYMKTTSNFSGKGYIIQKREIKPSLEADKPVEDILTYEEFHPFLFSQHSQCPYIEFESFDKAVDEFYSKIEGQKIDLKALQQEKQALKKLDNVRKDHENRLEALQQAQEIDKLKGELIEMNLQIVDRAIQVVRSALANQIDWTEIGLIVKEAQAQGDPVASAIKELKLQTNHVTMLLRNPYLLSEEEDDDVDGDVNVEKNETEPPKGKKKKQKNKQLQKPQKNKPLLVDVDLSLSAYANAKKYYDHKRYAAKKTQKTVEAAEKAFKSAEKKTKQTLKEVQTVTSIQKARKVYWFEKFLWFISSENYLIIGGRDQQQNEIIVKRYLTPGDIYVHADLHGATSCVIKNPTGEPIPPRTLTEAGTMALCYSAAWDARVITSAWWVYHHQVSKTAPTGEYLTTGSFMIRGKKNFLPPSYLMMGFSFLFKVDESCVWRHQGERKVRVQDEDMETLASCTSELISEEMEQLDGGDTSSDEDKEEHETPVEVELMTQVDQEDITLQSGRDELNEELIQEESSEDEGEYEEVRKDQDSVGEMKDEGEETLNYPDTTIDLSHLQPQRSIQKLASKEESSNSSDSKSQSRRHLSAKERREMKKKKLPSDSGDLEALEGKDKEKESTVHIETHQNTSKNVAAVQPMKRGQKSKMKKMKEKYKDQDEEDRELIMKLLGSAGSNKEEKGKKGKKGKTKDEPVKKQPQKPRGGQRVSDNIKKETPFLEVITHELQDFAVDDPHDDKEEQDLDQQGNEENLFDSLTGQPHPEDVLLFAIPICAPYTTMTNYKYKVKLTPGVQKKGKAAKTALNSFMHSKEATAREKDLFRSVKDTDLSRNIPGKVKVSAPNLLNVKRK

SEQ ID NO: 148949 - DNA, 3231 bp, Artificial Sequence
  derived and/or modified sequence
atgaagtctagattttccactattgacctgagggctgttctggcagaattgaatgcttctttactggggatgagagttaataacgtgtacgatgtcgacaacaagacctacctgataagactgcagaagcccgacttcaaggcaactctgctgctggaatccggcatcaggattcataccacagagtttgagtggcctaagaatatgatgccttccagctttgccatgaagtgccggaagcatcttaagtcgaggagattagtgtccgccaagcagctgggtgttgatagaattgttgacttccagttcggatccgatgaggcagcctatcacctgattatcgagctgtacgacaggggcaacatagtgctgaccgattacgagtacgtcatcttaaacatactccggttcagaaccgatgaagccgatgacgttaaattcgcagtgagagaacgataccctctggaccacgccagagctgccgaacccctgctgaccttagagcggctgaccgaaatcgtggcctccgccccaaagggggaactcttgaagcgagtgttgaaccctctcctgccttacgggcccgcgcttatcgagcattgccttttggagaacggcttcagcgggaacgtgaaagtggacgaaaagctcgagaccaaggatatcgagaaggtgcttgtgagcctgcagaaggctgaggactatatgaagaccacatccaacttttccggaaaaggctatatcatacagaaaagagagatcaaaccttcattggaggctgacaaacctgtggaagacatactgacatatgaggaatttcatcctttcctgtttagtcagcactcccaatgcccctatatcgagttcgagagtttcgacaaggcggtcgatgaattctactctaagattgaggggcagaagattgacctgaaagccctccagcaggagaagcaggctctgaagaaactcgataacgtcagaaaagaccacgagaacagactggaagccttgcagcaggctcaggaaatcgataagctgaagggcgaactgatcgagatgaatctccagatcgtggatagagcaatccaggtggtccggagcgcgctggctaatcagattgattggacggaaatcggcttgattgttaaagaagcccaggcccagggtgatccggtggccagtgcaattaaagagctgaagttacagaccaaccacgtcactatgctcctccgcaatccgtaccttttgagcgaggaggaagatgacgacgtcgacggagatgtgaatgtcgagaagaacgaaacggagcccccaaagggtaagaagaaaaagcagaaaaataaacaactccagaagccgcagaaaaacaaacctctactggtggatgtggatctgtcactttccgcctacgcgaacgcgaagaagtactatgaccacaagcggtacgccgcaaagaaaacccagaaaacggtcgaagcagctgagaaagcttttaaatcagcagagaagaaaaccaagcagacattgaaagaagtccagacagtcacatccatccagaaagctaggaaagtctactggtttgaaaagtttttgtggttcataagctcagaaaattacttgattattggcggtcgggatcagcagcagaatgaaataatcgtgaagcggtaccttacaccgggtgacatctacgtgcatgccgatctacatggggccacctcttgcgtgataaaaaatcctacaggggaacccatccccccccgcactcttactgaggcgggtactatggcattgtgttacagcgctgcctgggacgcaagggtgataaccagcgcatggtgggtgtaccaccaccaggtgtccaagaccgccccaacgggcgagtatcttaccacaggcagctttatgattcgagggaagaaaaattttctgcccccatcctacctcatgatggggttctcctttctctttaaggtggacgaatcttgtgtgtggcggcaccaaggagaaaggaaggtgagagtgcaggatgaagacatggagaccttggcttcgtgcacatcagagctgatttcggaggagatggagcagttggatggaggggacacttctagtgatgaggacaaggaagagcatgaaactccagtggaagtcgagttgatgacccaggtcgatcaggaagacattacactgcagagcggcagggatgaactgaatgaggagctaattcaggaagaatcctccgaagatgaaggagagtacgaagaggtcagaaaagaccaggacagcgtgggagaaatgaaggacgagggagaagaaacacttaattatcccgatacaaccatcgatctttcccaccttcagccacagagaagtatccagaagcttgctagtaaagaggagtcatccaactcctctgattctaaaagccaaagccgcagacatctgtctgcgaaggagaggcgggaaatgaagaagaagaagctgccaagtgactcaggggacctggaggcactggagggaaaagacaaggaaaaagagtcaactgttcacatcgaaacacaccaaaatacttccaagaatgtcgcagccgtacaacccatgaaaaggggccaaaagtctaaaatgaagaaaatgaaggagaaatacaaagatcaggatgaggaagatagagagctgatcatgaagctcctgggaagtgcaggtagtaacaaagaagagaagggaaaaaagggcaagaagggcaagacgaaagatgagcccgtcaagaagcagccccagaagcccagaggaggtcagagggtcagcgacaatatcaagaaagagacaccattcctcgaagtgatcacacacgaactgcaggacttcgcagtggacgatcctcacgatgataaggaagagcaggacctggatcagcaggggaacgaggaaaacctctttgacagccttacggggcaaccccatccagaagacgtgctgttgttcgcgatccccatttgtgccccctacacaacaatgacaaactacaagtacaaggttaaactgacacccggtgtacagaaaaagggcaaagcggctaaaactgcgttaaattctttcatgcactcaaaggaagccacagccagggagaaggatttgttcaggagtgtcaaagatacggacctttcacgtaatataccagggaaggtcaaagtgagtgcaccaaatctcctgaatgtcaaaagaaagtag

SEQ ID NO: 148950 - DNA, 3231 bp, Artificial Sequence
  derived and/or modified sequence
atgaagagccgcttcagcaccatcgacctgcgggctgtgctggccgagctgaatgccagcctgctgggcatgagggtgaacaacgtgtatgatgtggacaacaagacctacctgatccggctgcagaagccagacttcaaggccaccctgctgctggagagcggcatccgcatccacaccacagaatttgagtggcccaagaacatgatgcccagcagctttgccatgaagtgcaggaagcacctgaagagccggcggctggtgtctgccaagcagctgggcgtggaccgcatcgtggacttccagtttggaagtgatgaggccgcctaccacctgatcatcgagctgtatgaccggggcaacatcgtgctgacagattatgaatatgtgatcctgaacatcctgcgcttcagaacagatgaagcagatgatgtgaagtttgctgtgcgggagcgctaccccctggaccacgcccgggctgctgagcccctgctgaccctggagcggctgacagaaattgtggccagcgcccccaagggggagctgctgaagagggtgctgaaccccctgctgccctacggccctgccctgattgagcactgcctgctggagaatggcttctctggaaatgtgaaggtggatgagaagctggagaccaaggacatcgagaaggtgctggtgtccctgcagaaggccgaggactacatgaagaccaccagcaacttcagcggcaagggctacatcatccagaagcgggagatcaagcccagcctggaggccgacaagcctgtggaggacatcctgacctatgaggagttccaccccttcctgttcagccagcacagccagtgcccctacattgaatttgagagctttgacaaggctgtggatgagttctacagcaagattgagggccagaagattgacctgaaggccctgcagcaggagaagcaggccctgaagaagctggacaacgtgaggaaggaccatgaaaatcggctggaggccctgcagcaggcccaggagattgacaagctgaagggggagctgattgagatgaacctgcagatcgtggaccgggccatccaggtggtgcgcagcgccctggccaaccagattgactggacagagatcggcctgattgtgaaggaggcccaggcccagggcgaccctgtggccagcgccatcaaggagctgaagctgcagaccaaccacgtgaccatgctgctgaggaacccctacctgctgtctgaggaggaggatgatgatgtggatggagatgtgaatgtggagaagaatgaaacagagccccccaagggcaagaagaagaagcagaagaacaagcagctgcagaagccccagaagaacaagcccctgctggtggatgtggacctgagcctgagcgcctatgccaatgccaagaagtactatgaccacaagagatatgctgccaagaagacccagaagacagtggaggccgctgagaaggccttcaagtctgctgagaagaagaccaagcagaccctgaaggaggtgcagacagtgaccagcatccagaaggccaggaaggtgtactggtttgagaagttcctgtggttcatcagcagcgagaactacctgatcatcggcggccgggaccagcagcagaatgagatcatcgtgaagcgctacctgacccctggggacatctacgtgcatgctgacctgcacggggccaccagctgtgtgatcaagaaccccactggagagcccatcccccccaggaccctgacagaagctggcaccatggccctgtgctacagcgctgcctgggatgcccgggtcatcaccagcgcctggtgggtgtaccaccaccaggtgtccaagacagcccccaccggggagtacctgaccaccggcagcttcatgatccggggcaagaagaacttcctgcccccatcctacctgatgatgggcttctccttcctgttcaaggtggatgagagctgtgtgtggaggcaccagggcgagaggaaggtgcgggtgcaggatgaggacatggagaccctggccagctgcaccagcgagctgatcagcgaggagatggagcagctggatggaggagacaccagcagtgatgaggacaaggaggagcacgagacccctgtggaggtggagctgatgacccaggtggaccaggaggacatcaccctgcagagcggcagagatgagctgaatgaggagctgatccaggaggagagcagtgaagatgaaggagaatatgaggaggtgaggaaggaccaggacagcgtgggggagatgaaggatgaaggagaggagaccctgaactacccagacaccaccatcgacctgagccacctgcagccccagaggagcatccagaagctggccagcaaggaggagagcagcaacagcagtgacagcaagagccagagcagaagacacctgagcgccaaggagcggcgggagatgaagaagaagaagctgcccagcgacagcggggacctggaggccctggagggcaaggacaaggagaaggagagcacagtgcacatcgagacccaccagaacaccagcaagaatgtggccgctgtgcagcccatgaagaggggccagaagagcaagatgaagaagatgaaggagaagtacaaggaccaggatgaagaagatcgggagctgatcatgaagctgctgggcagcgctggcagcaacaaggaggagaagggcaagaagggcaagaagggcaagaccaaggatgagcctgtgaagaagcagccccagaagccccggggcggccagagggtgtctgacaacatcaagaaggagacccccttcctggaggtgatcacccatgagctgcaggactttgctgtggatgacccccatgatgacaaggaggagcaggacctggaccagcagggcaatgaggagaacctgtttgacagcctgaccggccagccccacccagaagatgtgctgctgtttgccatccccatctgtgccccctacaccaccatgaccaactacaagtacaaggtgaagctgaccccaggagtgcagaagaagggcaaggccgccaagacagccctgaacagcttcatgcacagcaaggaggccacagcccgggagaaggacctcttccgctctgtgaaggacacagacctgagcaggaacatccctgggaaggtgaaggtgtctgcccccaacctgctgaatgtgaagaggaagtag

SEQ ID NO: 148951 - DNA, 3231 bp, Artificial Sequence
  derived and/or modified sequence
atgaagagccggttcagcaccatcgacctgcgggccgtgctggccgaactgaatgcgtccctactcggcatgagagtaaataatgtatatgatgtggacaataagacttatttgattagactccagaagccagatttcaaagctactctgctactcgagagcggtatcagaatccataccacagagttcgagtggcctaagaacatgatgcctagttctttcgcgatgaagtgccgcaagcatctcaagagccggagactcgtgagcgctaaacagctgggagtggaccggatcgttgactttcagtttgggtctgatgaagccgcctatcacttgattatcgaattatatgacaggggtaacatcgtactgaccgactacgaatacgttatcctcaatatacttcgcttcaggactgatgaggctgatgacgtgaagttcgctgtgcgtgagcgctatccactagaccatgctagggcagccgagccacttctcactttagaacgccttacagagattgtagccagcgctccaaaaggcgagcttctgaaaagggttcttaatccccttcttccctacgggccggcacttatcgagcactgcctgctggaaaatgggtttagcgggaatgtgaaggttgacgaaaagcttgagaccaaagatatagagaaggtcctcgtttccctgcagaaagccgaggattacatgaaaactacttccaatttcagcgggaaaggctatattatccagaagcgagaaatcaaaccttccctggaggccgacaagccagtcgaagatatactcacctacgaggaatttcacccgtttctgttcagccagcattcacagtgcccttacattgagttcgagtccttcgataaagccgtggacgagttctattccaaaatcgagggccaaaagatagacttgaaagccttacagcaggaaaaacaggccctgaagaagctcgacaacgtgcggaaagatcacgaaaatcgcctcgaagctcttcagcaggcacaggagatagataagctgaaaggggagctcatcgagatgaacctccaaattgtcgaccgggccattcaagtggtgcggtccgctttagccaaccagattgattggaccgagattggactcatcgttaaagaagcccaggcccaaggtgaccccgttgccagcgcaatcaaggaattaaaactgcagaccaatcacgtaacgatgctcctgcgcaacccctacctgctttcagaagaggaagatgacgatgtcgacggtgacgtgaacgtcgaaaagaatgaaacggagccaccaaagggaaagaagaagaaacagaagaataagcaactgcaaaagcctcagaagaacaagccgctcctagtcgacgtcgacctgtcgctgagtgcgtatgctaacgcgaagaagtattacgaccataagcgctacgctgccaagaaaactcagaagaccgtagaggccgcagagaaagcttttaaaagcgcagagaaaaagactaagcagacactgaaggaggtccaaacagttactagtattcagaaagccaggaaggtgtactggtttgagaaattcctctggttcatttcttcagagaattacctgattattggaggacgagaccagcaacagaatgaaatcattgtgaaacggtatctcaccccgggcgatatctatgtgcacgccgaccttcacggagccacatcatgcgtgataaagaaccccacgggagaacctattcccccgcggaccttgaccgaggccgggacgatggccctgtgctatagtgccgcatgggacgctagggttattaccagtgcttggtgggtgtatcaccatcaggtaagcaagactgccccaactggggaatatttgactaccggatcattcatgatacgggggaagaagaactttcttcctcctagctatttgatgatgggtttttctttcctgttcaaagtcgacgagtcctgtgtgtggcggcaccagggggagcgcaaggtgagagtgcaggacgaggacatggagacgttggcaagttgtacatccgagctgattagtgaagaaatggagcagctagatggtggtgatacatccagtgacgaagacaaggaggagcacgagactccagtcgaggtcgaacttatgacacaggtggaccaggaggacatcactctgcagtccgggcgcgacgagctcaatgaggagctgattcaggaagaaagttcagaggatgagggcgaatacgaggaagttagaaaggaccaggatagtgttggcgaaatgaaagacgagggcgaagagaccctcaattaccctgacactactatcgatctgagtcacctgcagccccaaagaagcattcaaaagctcgccagcaaggaagagtcttctaattcgagcgacagcaagtcccaaagtagaaggcatctgagtgcaaaggagcggagggagatgaagaaaaagaagctcccatcagactccggagaccttgaggccctcgagggcaaagacaaggagaaagaaagcacagtacacatcgaaacacaccagaatacctctaaaaacgtcgccgccgtacagcccatgaaacggggacagaagagcaaaatgaaaaagatgaaggagaaatataaggatcaagacgaagaggacagggaactcatcatgaaactgctgggcagcgccggctcaaataaagaggagaagggtaaaaagggtaaaaaagggaagaccaaggatgaaccagtcaagaagcagccacagaaaccacgcgggggacaacgcgtgtccgacaacatcaagaaagagactccctttttagaagtgatcacccatgaactccaggacttcgctgtagacgatccgcacgacgacaaggaagagcaggacctggaccaacaggggaacgaggaaaacttgttcgactccctgaccggacaaccacacccagaagacgttctgttattcgccatcccgatatgcgctccgtacactactatgacgaattacaagtacaaagtgaagctcactcccggtgtccagaagaaaggcaaggcggctaaaaccgcactgaactccttcatgcacagcaaggaagctaccgcccgtgagaaggacctgttccggtctgtgaaggacaccgacttgagcaggaatatccctggtaaagtgaaggtgagtgctccaaatcttctcaacgttaaacgaaaatag

SEQ ID NO: 148952 - DNA, 3231 bp, Artificial Sequence
  derived and/or modified sequence
atgaaatcgaggttttcaacaatcgacctgcgcgcagttctcgccgagcttaacgcctccctgttgggcatgagagtgaataatgtgtatgacgtagataacaaaacatatctgatcagactccagaagccagacttcaaggccacactgctgctggagtccgggattaggattcatacaacagagtttgagtggcctaaaaacatgatgccatcatcgttcgcgatgaagtgcaggaaacatcttaagtctcgtaggctcgtctcagctaagcagcttggggttgatcggattgtcgactttcaattcggctcagacgaggccgcatatcatctgattatcgagttatacgaccgaggaaacatcgttctgaccgactatgagtacgttattctcaacatcctacggtttcggacagacgaagcagatgatgttaagtttgcagtgagggaaaggtacccacttgaccacgcaagagctgctgagccattgcttacattagaaagactgactgagattgtggcctccgctcctaagggcgagctgcttaaacgcgtattaaacccgctgttaccttatggtcccgctctcatcgagcactgtttactcgagaatgggttctcgggcaatgtgaaggtggatgaaaagctggaaaccaaggacatcgagaaggtgctggtgtctctgcagaaggccgaggactacatgaagactacaagtaatttcagcgggaaagggtatatcatccagaaaagggaaatcaagccctcactggaggccgataaacccgtggaggacattcttacatatgaagagtttcacccttttctgttttctcagcactctcagtgcccgtacattgaatttgagagcttcgacaaggctgttgacgaattctattccaagatagagggccagaagattgatctcaaagccctacagcaggaaaaacaggccctcaaaaaacttgacaacgtcaggaaggaccacgaaaataggctcgaggcactccagcaagcccaggagatcgacaaactaaaaggagaactcattgagatgaacctgcagatcgtggatcgcgctatccaggtggtcagatcagctctggccaaccaaattgattggactgaaatcggacttatcgtgaaggaggctcaagcccagggcgaccctgttgcctccgcgatcaaggagctgaaactgcagacaaaccacgttacgatgttattgcggaacccatatctgttgtcagaggaggaggatgatgacgtagacggagatgtgaacgttgaaaagaatgaaactgaaccaccgaaggggaaaaagaaaaagcaaaaaaataaacagctgcaaaaaccccaaaaaaataagccactgttggtcgatgttgacctgagcctttccgcctacgccaacgcgaagaaatattatgaccacaaaaggtatgcggctaaaaaaactcagaagacagtggaggcagccgaaaaggccttcaagagtgccgagaaaaaaaccaaacaaaccctgaaagaagttcagacggtgacgagtattcagaaggctaggaaggtttattggttcgagaagttcctgtggtttatctctagtgagaactatctgatcattgggggaagggatcagcagcaaaacgagattatagtcaaaaggtaccttacgcctggggacatatacgtccacgctgacctgcatggagccacctcttgtgtgatcaaaaatcccacgggtgagccaattccccctcgcactctaacagaagcgggaactatggcactctgctatagcgctgcctgggacgcaagagttattacctctgcttggtgggtttaccaccaccaggtgagtaagactgccccaactggtgaatacctgacaacgggcagcttcatgatcaggggcaaaaaaaatttcttaccacctagttacctgatgatgggcttttccttcttgtttaaggtggacgagtcgtgtgtctggaggcaccagggggaacgaaaagtgagagtgcaagacgaagatatggagacccttgccagctgtacgtcagaactgatttcagaagaaatggagcagctagacgggggagataccagctcggatgaggataaggaagagcatgagacccccgtggaggtggagctcatgacacaggtcgaccaggaagatattactcttcagtctggcagggatgaactgaacgaggagctgatccaggaggaaagctctgaggacgagggggagtacgaggaagtacggaaagatcaagacagcgttggtgaaatgaaggacgaaggtgaggagactctcaattacccagacaccacaattgatctaagccatttgcaaccgcaacgatcaattcagaagctggcttccaaggaagagtccagcaatagcagcgactcgaagtcacagtcccggagacacctttcagctaaggagaggagagaaatgaagaagaagaaattgccatcagactccggcgacctggaggcactagagggcaaggataaagagaaggagagcaccgtgcatatcgaaacacaccaaaatacgagcaaaaatgtggccgctgtacagccaatgaagcggggtcaaaaatccaaaatgaagaagatgaaagagaagtacaaagaccaggatgaagaggaccgggagctcatcatgaagctgcttgggtctgcgggaagtaataaagaagaaaaaggtaaaaagggaaaaaaaggcaaaacaaaagatgagccggtgaagaaacagccacaaaagcctaggggaggccagcgcgtgagcgataatattaaaaaggaaacgccatttctcgaagtgatcacccacgagcttcaggatttcgcggtagatgatccccatgacgacaaggaggagcaggatctggatcaacaggggaatgaagagaacctatttgattctctgactggccaaccccaccctgaagatgtgctgttgttcgcaatcccaatctgcgcaccgtatactacaatgaccaactacaagtacaaggttaaacttacaccgggagtgcaaaagaagggaaaggccgctaagactgctctgaatagttttatgcactccaaggaagccacagcaagggagaaggacctattcagatctgtcaaggacacagacctgtcaagaaatatccctggtaaggtcaaggtgtccgctcctaacctgctgaatgtgaagcgcaaatag

SEQ ID NO: 148953 - DNA, 5038 bp, Artificial Sequence
  derived and/or modified sequence
atttcaaaatcttatgtcaaagtaagcgcgcagaaaggggtccttgctcttctacactgagccctacggcccccctgtggggaaatactcctgataatcatctcgaaaattgtttcgaccagcaggggtcactatgaaggctgacttgagcccaagacacaatggggcacggtaaccagactggtccgtaagggttccaggaaggaatgcagtttcaagagaacagtttgaatctttattcgaatttgaattttggtacaatgaagagagtcagctgcaacttgacaatcgaaatcttcagaaaagcgacacaaatacgttcgcctcgaggaatattgggtcttctgcgcggccgtagagctccgccaagtgcgcctgcgcggaggagaagtggcgtcgagtccggccgggcagtagaggaacttgcggtagtgaccctcgggcctcgccatgaagagccgctttagcaccattgacctccgcgccgtactcgcggagctgaatgctagcttgctaggaatgagagtaaacaatgtttatgatgtggataataagacataccttattcgtcttcaaaaaccggactttaaagctacacttttacttgaatctggcatacgaattcatacaacagaatttgagtggcctaagaatatgatgccgtctagttttgccatgaagtgccgaaaacatttgaagagtcggagattagtcagtgcaaaacagcttggtgtggatagaattgtagattttcaatttggaagtgatgaagctgcttaccatttaatcattgagctctatgatagggggaacattgttcttacagattatgagtacgtaattttaaatattctaaggtttcgaactgatgaggcagatgatgttaaatttgctgttcgtgaacgctatccacttgatcatgctagagctgctgaacctttgcttactttggaaaggttgactgaaatagtagccagcgcacctaagggtgaactactgaagagggtgcttaacccattacttccctatggaccagctctcattgaacactgtcttttagaaaatggattctcgggtaatgtcaaagtggatgaaaaacttgaaactaaagatattgaaaaagtacttgtttctctgcagaaagcagaagactatatgaaaacaacatccaacttcagtgggaagggatatatcattcagaaaagagaaataaaaccaagcttggaagcagataaaccagttgaagacatactgacgtatgaggaatttcatcctttcttgttttctcaacattcacaatgtccatatatagaatttgaatcatttgacaaggcggtggatgaattttattccaagatagaaggccagaaaattgacttaaaagctttacaacaggaaaagcaagcattgaagaaattagataatgttcgaaaggatcacgaaaacagattggaagctcttcagcaggctcaggaaatagacaaactgaaaggagagctcatagaaatgaacctacaaatagttgacagagccattcaggtagttcgaagtgctttagctaaccagatagattggacagaaattgggttaattgtgaaagaagcccaggctcaaggagaccctgttgcaagtgcaatcaaagaattaaaactacaaacaaaccatgttacaatgctgctaagaaatccatacttgttatcagaggaggaagatgatgatgttgatggtgacgtcaatgttgagaaaaatgaaactgaaccaccaaaaggaaaaaagaaaaaacaaaagaataaacagctgcagaagcctcagaaaaataagcccttacttgtagatgttgatctcagcttgtcagcatatgccaatgccaaaaagtattatgatcacaagagatatgctgctaagaaaacacaaaagactgttgaagctgctgagaaggcattcaagtcagcagaaaagaaaacaaagcaaacattaaaagaagttcagactgttacctctattcaaaaagcaagaaaagtatattggtttgagaaatttctgtggttcattagctcagagaactatctaattataggtggacgagatcagcaacagaatgaaataattgtgaaaagatacttgacaccaggagacatttatgtacatgctgatcttcatggagctactagctgtgtaattaagaatccaacaggagaacccatccccccacggaccttgactgaagctggcacaatggcactttgctacagtgctgcttgggatgcacgagttatcactagtgcttggtgggtgtaccatcatcaggtatctaaaacagcaccaactggagaatatttgacaacaggaagcttcatgataagaggaaaaaagaattttcttcctccctcatatctaatgatggggtttagcttcctttttaaggtagatgagtcttgtgtttggagacatcagggtgaacgaaaagtcagagtacaggatgaagacatggagacactggcaagttgtacaagtgaactcatatcagaagaaatggaacaattagatggaggtgacacgagcagtgatgaggataaagaagaacatgaaactcctgtggaagtagaactcatgactcaggttgaccaagaggatatcactcttcagagtggcagagatgaactaaatgaggagctcattcaggaagaaagctctgaagacgaaggagaatatgaagaggttagaaaagatcaggattctgttggtgaaatgaaggatgaaggggaagagacattaaattatcctgatactaccattgacttgtctcaccttcaaccccaaaggtccatccagaaattggcttcaaaagaggaatcttctaattctagtgacagtaaatcacagagccggagacatttgtcagccaaggaaagaagggaaatgaaaaagaaaaaacttccaagtgactcaggagatttagaagcgttagagggaaaggataaagaaaaagaaagtactgtacacattgaaactcatcagaacacaagcaaaaatgttgcggctgtgcagccaatgaaacgaggacaaaagagtaaaatgaaaaaaatgaaagaaaaatacaaagaccaggatgaagaagaccgtgaacttatcatgaagttgctggggtctgcaggttcaaacaaagaagaaaaagggaagaaggggaagaaaggaaaaacaaaggacgaacctgtgaagaaacagccccagaaacctagaggtggacagagggtctctgacaacattaagaaagaaactccgttccttgaggttataactcatgagttacaagactttgctgtagatgatccacatgatgacaaggaagagcaagatctggatcaacagggaaatgaggaaaacctatttgattctttgacaggccagccacatcctgaagatgtactactgtttgccattccaatatgtgccccttacaccaccatgacaaactacaaatataaagtgaaacttactcctggagtgcagaaaaagggaaaagctgcaaaaacagccttgaatagtttcatgcattccaaagaagcaacagcaagagaaaaagacttattccgcagcgtaaaggacacagatttatcaagaaacattcctggcaaagtgaaagtgtctgcacccaatcttctgaatgtaaaaaggaaatagctgaaatgaaattctaaaatatttgagaagagccaattttatagccttttggaagttcaaagatgaaagcaccatgtatcaggatttccgcattataaaaatgaactaaacattgccttgctatattcaccaaaaggacttacttcttgttttttcccagttttatatagaggaaacactgtctatgataggatttccaaaagtatttgtggacagttaaatgctaattaatatacatctgtagttattctacattttcttgaaatttgggaggttaataccaagtattcatttcatgatgtaaagaaactgaacagtgaagtggcttgattgcttaaactattgacttggtaagtctactgtatataacatctaatatatatattacaggccaaatgaactaaacattgccttgctatattcaccaaaaggacttaattcttgtttttttcccagttttatatagaggaaacactatgataggatttcctaaagtatttgtggacagttaaatgctaattatatacatctgtagttattctacattttcttgaaatttgggaggttaataccaagtattcatttcatgatgtaaagaaactgaacagtgaagtggcttgattgcttaaactattgacttggtaagtctactgtatataacatctaatatatatatattataggccagctacaaggggtttaaatatttaggattgtgtcttgaaaactaagtattggagtggattttcttctgctttcattgatacttgtcagaaaaaaatattagaccaaaatgtaaaatataagtaataattctcatgactcagcttaatcatttctattcatttgtagaccttcaggtttgatcttaattttttccttgtaatctgattcagttctgtaccattttaatttccacctttagtaattaattaccaatatagcacgttagagtatcttaacctataataccagaagcgcattttaggcttaccactaaagactctaacccacttttcctctgtctcttaacagaatggaaaatgatgtcatcattatttccattccttcatgagctataaaacctattaattaaaaaaaaactttttaattgactggacagcacctgcctgtattcagcatgaccacttgctccagcccctacactgaagcattaaggtcaaagtactgaacagttgttggtccctccacactttgtttttccagcttcgtcataatgtgaatattaatgtttaaaaaaaaaaacctttattatattgtatttacaacactaggttacataactatagactactcttgccattaaaaaaaaaaaaatctataatgttttcaaaaa

SEQ ID NO: 148954 - DNA, 3231 bp, Artificial Sequence
  derived and/or modified sequence
atgaagagcagattcagcaccatcgacctgagagccgtgctggccgagctgaacgccagcctgctgggcatgagagtgaacaacgtgtacgacgtggacaacaagacctacctgatcagactgcagaagcccgacttcaaggccaccctgctgctggagagcggcatcagaatccacaccaccgagttcgagtggcccaagaacatgatgcccagcagcttcgccatgaagtgcagaaagcacctgaagagcagaagactggtgagcgccaagcagctgggcgtggacagaatcgtggacttccagttcggcagcgacgaggccgcctaccacctgatcatcgagctgtacgacagaggcaacatcgtgctgaccgactacgagtacgtgatcctgaacatcctgagattcagaaccgacgaggccgacgacgtgaagttcgccgtgagagagagataccccctggaccacgccagagccgccgagcccctgctgaccctggagagactgaccgagatcgtggccagcgcccccaagggcgagctgctgaagagagtgctgaaccccctgctgccctacggccccgccctgatcgagcactgcctgctggagaacggcttcagcggcaacgtgaaggtggacgagaagctggagaccaaggacatcgagaaggtgctggtgagcctgcagaaggccgaggactacatgaagaccaccagcaacttcagcggcaagggctacatcatccagaagagagagatcaagcccagcctggaggccgacaagcccgtggaggacatcctgacctacgaggagttccaccccttcctgttcagccagcacagccagtgcccctacatcgagttcgagagcttcgacaaggccgtggacgagttctacagcaagatcgagggccagaagatcgacctgaaggccctgcagcaggagaagcaggccctgaagaagctggacaacgtgagaaaggaccacgagaacagactggaggccctgcagcaggcccaggagatcgacaagctgaagggcgagctgatcgagatgaacctgcagatcgtggacagagccatccaggtggtgagaagcgccctggccaaccagatcgactggaccgagatcggcctgatcgtgaaggaggcccaggcccagggcgaccccgtggccagcgccatcaaggagctgaagctgcagaccaaccacgtgaccatgctgctgagaaacccctacctgctgagcgaggaggaggacgacgacgtggacggcgacgtgaacgtggagaagaacgagaccgagccccccaagggcaagaagaagaagcagaagaacaagcagctgcagaagccccagaagaacaagcccctgctggtggacgtggacctgagcctgagcgcctacgccaacgccaagaagtactacgaccacaagagatacgccgccaagaagacccagaagaccgtggaggccgccgagaaggccttcaagagcgccgagaagaagaccaagcagaccctgaaggaggtgcagaccgtgaccagcatccagaaggccagaaaggtgtactggttcgagaagttcctgtggttcatcagcagcgagaactacctgatcatcggcggcagagaccagcagcagaacgagatcatcgtgaagagatacctgacccccggcgacatctacgtgcacgccgacctgcacggcgccaccagctgcgtgatcaagaaccccaccggcgagcccatcccccccagaaccctgaccgaggccggcaccatggccctgtgctacagcgccgcctgggacgccagagtgatcaccagcgcctggtgggtgtaccaccaccaggtgagcaagaccgcccccaccggcgagtacctgaccaccggcagcttcatgatcagaggcaagaagaacttcctgccccccagctacctgatgatgggcttcagcttcctgttcaaggtggacgagagctgcgtgtggagacaccagggcgagagaaaggtgagagtgcaggacgaggacatggagaccctggccagctgcaccagcgagctgatcagcgaggagatggagcagctggacggcggcgacaccagcagcgacgaggacaaggaggagcacgagacccccgtggaggtggagctgatgacccaggtggaccaggaggacatcaccctgcagagcggcagagacgagctgaacgaggagctgatccaggaggagagcagcgaggacgagggcgagtacgaggaggtgagaaaggaccaggacagcgtgggcgagatgaaggacgagggcgaggagaccctgaactaccccgacaccaccatcgacctgagccacctgcagccccagagaagcatccagaagctggccagcaaggaggagagcagcaacagcagcgacagcaagagccagagcagaagacacctgagcgccaaggagagaagagagatgaagaagaagaagctgcccagcgacagcggcgacctggaggccctggagggcaaggacaaggagaaggagagcaccgtgcacatcgagacccaccagaacaccagcaagaacgtggccgccgtgcagcccatgaagagaggccagaagagcaagatgaagaagatgaaggagaagtacaaggaccaggacgaggaggacagagagctgatcatgaagctgctgggcagcgccggcagcaacaaggaggagaagggcaagaagggcaagaagggcaagaccaaggacgagcccgtgaagaagcagccccagaagcccagaggcggccagagagtgagcgacaacatcaagaaggagacccccttcctggaggtgatcacccacgagctgcaggacttcgccgtggacgacccccacgacgacaaggaggagcaggacctggaccagcagggcaacgaggagaacctgttcgacagcctgaccggccagccccaccccgaggacgtgctgctgttcgccatccccatctgcgccccctacaccaccatgaccaactacaagtacaaggtgaagctgacccccggcgtgcagaagaagggcaaggccgccaagaccgccctgaacagcttcatgcacagcaaggaggccaccgccagagagaaggacctgttcagaagcgtgaaggacaccgacctgagcagaaacatccccggcaaggtgaaggtgagcgcccccaacctgctgaacgtgaagagaaagtag

SEQ ID NO: 148955 - DNA, 3105 bp, Artificial Sequence
  derived and/or modified sequence
atgaagagcagattcagcaccatcgacctgagagccgtgctggccgagctgaacgccagcctgctgggcatgagagtgaacaacgtgtacgacgtggacaacaagacctacctgatcagactgcagaagcccgacttcaaggccaccctgctgctggagagcggcatcagaatccacaccaccgagttcgagtggcccaagaacatgatgcccagcagcttcgccatgaagggcaacatcgtgctgaccgactacgagtacgtgatcctgaacatcctgagattcagaaccgacgaggccgacgacgtgaagttcgccgtgagagagagataccccctggaccacgccagagccgccgagcccctgctgaccctggagagactgaccgagatcgtggccagcgcccccaagggcgagctgctgaagagagtgctgaaccccctgctgccctacggccccgccctgatcgagcactgcctgctggagaacggcttcagcggcaacgtgaaggtggacgagaagctggagaccaaggacatcgagaaggtgctggtgagcctgcagaaggccgaggactacatgaagaccaccagcaacttcagcggcaagggctacatcatccagaagagagagatcaagcccagcctggaggccgacaagcccgtggaggacatcctgacctacgaggagttccaccccttcctgttcagccagcacagccagtgcccctacatcgagttcgagagcttcgacaaggccgtggacgagttctacagcaagatcgagggccagaagatcgacctgaaggccctgcagcaggagaagcaggccctgaagaagctggacaacgtgagaaaggaccacgagaacagactggaggccctgcagcaggcccaggagatcgacaagctgaagggcgagctgatcgagatgaacctgcagatcgtggacagagccatccaggtggtgagaagcgccctggccaaccagatcgactggaccgagatcggcctgatcgtgaaggaggcccaggcccagggcgaccccgtggccagcgccatcaaggagctgaagctgcagaccaaccacgtgaccatgctgctgagaaacccctacctgctgagcgaggaggaggacgacgacgtggacggcgacgtgaacgtggagaagaacgagaccgagccccccaagggcaagaagaagaagcagaagaacaagcagctgcagaagccccagaagaacaagcccctgctggtggacgtggacctgagcctgagcgcctacgccaacgccaagaagtactacgaccacaagagatacgccgccaagaagacccagaagaccgtggaggccgccgagaaggccttcaagagcgccgagaagaagaccaagcagaccctgaaggaggtgcagaccgtgaccagcatccagaaggccagaaaggtgtactggttcgagaagttcctgtggttcatcagcagcgagaactacctgatcatcggcggcagagaccagcagcagaacgagatcatcgtgaagagatacctgacccccggcgacatctacgtgcacgccgacctgcacggcgccaccagctgcgtgatcaagaaccccaccggcgagcccatcccccccagaaccctgaccgaggccggcaccatggccctgtgctacagcgccgcctgggacgccagagtgatcaccagcgcctggtgggtgtaccaccaccaggtgagcaagaccgcccccaccggcgagtacctgaccaccggcagcttcatgatcagaggcaagaagaacttcctgccccccagctacctgatgatgggcttcagcttcctgttcaaggtggacgagagctgcgtgtggagacaccagggcgagagaaaggtgagagtgcaggacgaggacatggagaccctggccagctgcaccagcgagctgatcagcgaggagatggagcagctggacggcggcgacaccagcagcgacgaggacaaggaggagcacgagacccccgtggaggtggagctgatgacccaggtggaccaggaggacatcaccctgcagagcggcagagacgagctgaacgaggagctgatccaggaggagagcagcgaggacgagggcgagtacgaggaggtgagaaaggaccaggacagcgtgggcgagatgaaggacgagggcgaggagaccctgaactaccccgacaccaccatcgacctgagccacctgcagccccagagaagcatccagaagctggccagcaaggaggagagcagcaacagcagcgacagcaagagccagagcagaagacacctgagcgccaaggagagaagagagatgaagaagaagaagctgcccagcgacagcggcgacctggaggccctggagggcaaggacaaggagaaggagagcaccgtgcacatcgagacccaccagaacaccagcaagaacgtggccgccgtgcagcccatgaagagaggccagaagagcaagatgaagaagatgaaggagaagtacaaggaccaggacgaggaggacagagagctgatcatgaagctgctgggcagcgccggcagcaacaaggaggagaagggcaagaagggcaagaagggcaagaccaaggacgagcccgtgaagaagcagccccagaagcccagaggcggccagagagtgagcgacaacatcaagaaggagacccccttcctggaggtgatcacccacgagctgcaggacttcgccgtggacgacccccacgacgacaaggaggagcaggacctggaccagcagggcaacgaggagaacctgttcgacagcctgaccggccagccccaccccgaggacgtgctgctgttcgccatccccatctgcgccccctacaccaccatgaccaactacaagtacaaggtgaagctgacccccggcgtgcagaagaagggcaaggccgccaagaccgccctgaacagcttcatgcacagcaaggaggccaccgccagagagaaggacctgttcagaagcgtgaaggacaccgacctgagcagaaacatccccggcaaggtgaaggtgagcgcccccaacctgctgaacgtgaagagaaagtag

SEQ ID NO: 148956 - DNA, 3105 bp, Artificial Sequence
  derived and/or modified sequence
atgaagtcccgattcagcaccatcgacttgagagccgtgctggccgagctcaatgccagtttgctcggcatgagagtcaacaatgtctatgatgttgataacaaaacctacttgataagactgcaaaagcctgattttaaagcaactctgttactggaatctggcatcagaatccatacaactgagtttgaatggccgaagaacatgatgcctagttcctttgccatgaagggaaacatagttttgacagactacgaatacgtcatcctcaacattttgaggtttcggaccgatgaggccgacgatgtgaagttcgccgttcgggagcgctatcccctcgaccacgcccgcgccgcagaaccattgcttaccctggaaaggctgaccgaaattgtcgcttcagccccgaaaggagagcttcttaagcgggttctcaatccactcctcccttacgggcccgcgctgatcgaacactgtctgctggaaaatggcttcagtggaaatgtgaaggtggacgagaaactggaaaccaaggacatagaaaaggtgctggtctccctgcaaaaggcagaggactatatgaaaacaacctccaacttcagcgggaaaggatacataatccagaaacgtgagatcaaacccagcctggaagctgacaagcccgtggaggatatcctgacttacgaggaatttcatccgttcctgttcagccagcattcacaatgtccctatattgaattcgagagcttcgacaaagcagtggatgaattttattccaagatagaaggccaaaagattgatctcaaggccctgcagcaggagaagcaggccctaaaaaagctggacaacgtgagaaaagaccacgaaaatcgcctcgaagccctgcaacaggctcaggagattgacaagctgaagggagaactcatcgagatgaacttgcagatagtggacagagccattcaggtggttaggagcgctctggccaatcagatcgattggactgaaatcgggctgattgtcaaggaggctcaagctcagggcgatcctgtggcatccgcaattaaggagttgaaactgcagacaaatcacgtaactatgctgttacgcaacccctatcttctgtccgaagaagaggacgatgatgtagacggcgacgtgaacgtcgaaaaaaatgaaacagaaccacccaaaggaaaaaagaaaaaacagaaaaacaaacaacttcagaaaccgcagaagaacaagcccctcctggtcgatgtcgacctgagcttatctgcttatgcgaatgcgaaaaaatattatgaccacaagcgctacgctgctaagaagactcagaaaaccgtggaggccgcagaaaaagcattcaaaagcgccgagaagaaaaccaaacaaacgctgaaggaggtgcagacagtaacttctatccaaaaagctagaaaagtgtactggttcgagaagttcctgtggtttatctctagcgaaaattaccttattatcggtggtagagaccagcagcagaatgagattatcgtgaagagatacctgacgcctggcgatatatacgtgcacgccgacttacatggggcaacctcttgtgtcataaagaatccaacaggggagcccatccccccgagaacgctcacagaagccgggaccatggccttatgctattccgcggcatgggacgcccgcgtgataacatctgcctggtgggtgtaccaccaccaggtgagtaaaaccgcccccacaggggagtacctcaccaccggatcatttatgatcagggggaaaaaaaacttcctgccaccctcttacctcatgatgggttttagcttcctcttcaaagtggatgaatcatgtgtatggagacaccagggcgaaagaaaggtgagggtgcaggacgaggatatggaaaccttagcttcttgtaccagcgaactgatctccgaagaaatggagcagctcgacggtggcgatacgtcttctgatgaagataaggaggagcacgaaacccctgtggaggtcgagctcatgacccaggttgaccaagaagatattaccctccagagtggcagggatgaactgaatgaagaattaatacaagaggagagctccgaggacgaaggagagtatgaggaggttcgaaaggaccaggatagtgtgggtgaaatgaaagacgagggagaagagactctgaactacccagacacaaccattgatctaagtcacttacaaccccagcggagtatccaaaagctcgcttccaaagaagaaagtagcaattcttcagactctaaatctcagtcacggcgccacctatccgctaaggagcgacgcgaaatgaaaaaaaaaaagcttccttcggatagtggcgacctggaggctttggagggtaaggacaaggagaaagagagcaccgtgcatatcgaaacccaccagaacactagcaaaaacgttgctgcggttcagcccatgaagagagggcagaaaagcaaaatgaagaagatgaaggagaaatacaaggatcaggatgaggaggaccgcgagttaattatgaagctgctgggctctgcgggatcaaacaaagaagaaaagggaaaaaagggtaagaagggtaagacgaaagatgagcccgtgaagaagcagccacagaaacctagaggaggccagagggtgagtgataatataaaaaaggagacccctttcctcgaagtgatcacgcatgagttacaagattttgccgtcgacgacccccacgacgataaagaggaacaagatcttgatcaacagggaaacgaagaaaatctgtttgattccctaaccggccaacctcatcctgaagacgtccttttgtttgccatccccatatgcgccccgtacaccaccatgacgaactataagtacaaggttaaactgacacctggggtgcagaaaaagggcaaagcggctaagaccgcactgaactcttttatgcattctaaggaagccaccgcccgcgaaaaagacctgtttcggtccgtgaaggataccgatctctccaggaatatcccagggaaggtgaaagtgtcagccccaaatctcttaaatgtgaaaaggaagtag

SEQ ID NO: 148957 - DNA, 3105 bp, Artificial Sequence
  derived and/or modified sequence
atgaagagccgcttcagcaccatcgacctgcgggctgtgctggccgagctgaatgccagcctgctgggcatgagggtgaacaacgtgtatgatgtggacaacaagacctacctgatccggctgcagaagccagacttcaaggccaccctgctgctggagagcggcatccgcatccacaccacagaatttgagtggcccaagaacatgatgcccagcagctttgccatgaagggcaacatcgtgctgacagattatgaatatgtgatcctgaacatcctgcgcttcagaacagatgaagcagatgatgtgaagtttgctgtgcgggagcgctaccccctggaccacgcccgggctgctgagcccctgctgaccctggagcggctgacagaaattgtggccagcgcccccaagggggagctgctgaagagggtgctgaaccccctgctgccctacggccctgccctgattgagcactgcctgctggagaatggcttctctggaaatgtgaaggtggatgagaagctggagaccaaggacatcgagaaggtgctggtgtccctgcagaaggccgaggactacatgaagaccaccagcaacttcagcggcaagggctacatcatccagaagcgggagatcaagcccagcctggaggccgacaagcctgtggaggacatcctgacctatgaggagttccaccccttcctgttcagccagcacagccagtgcccctacattgaatttgagagctttgacaaggctgtggatgagttctacagcaagattgagggccagaagattgacctgaaggccctgcagcaggagaagcaggccctgaagaagctggacaacgtgaggaaggaccatgaaaatcggctggaggccctgcagcaggcccaggagattgacaagctgaagggggagctgattgagatgaacctgcagatcgtggaccgggccatccaggtggtgcgcagcgccctggccaaccagattgactggacagagatcggcctgattgtgaaggaggcccaggcccagggcgaccctgtggccagcgccatcaaggagctgaagctgcagaccaaccacgtgaccatgctgctgaggaacccctacctgctgtctgaggaggaggatgatgatgtggatggagatgtgaatgtggagaagaatgaaacagagccccccaagggcaagaagaagaagcagaagaacaagcagctgcagaagccccagaagaacaagcccctgctggtggatgtggacctgagcctgagcgcctatgccaatgccaagaagtactatgaccacaagagatatgctgccaagaagacccagaagacagtggaggccgctgagaaggccttcaagtctgctgagaagaagaccaagcagaccctgaaggaggtgcagacagtgaccagcatccagaaggccaggaaggtgtactggtttgagaagttcctgtggttcatcagcagcgagaactacctgatcatcggcggccgggaccagcagcagaatgagatcatcgtgaagcgctacctgacccctggggacatctacgtgcatgctgacctgcacggggccaccagctgtgtgatcaagaaccccactggagagcccatcccccccaggaccctgacagaagctggcaccatggccctgtgctacagcgctgcctgggatgcccgggtcatcaccagcgcctggtgggtgtaccaccaccaggtgtccaagacagcccccaccggggagtacctgaccaccggcagcttcatgatccggggcaagaagaacttcctgcccccatcctacctgatgatgggcttctccttcctgttcaaggtggatgagagctgtgtgtggaggcaccagggcgagaggaaggtgcgggtgcaggatgaggacatggagaccctggccagctgcaccagcgagctgatcagcgaggagatggagcagctggatggaggagacaccagcagtgatgaggacaaggaggagcacgagacccctgtggaggtggagctgatgacccaggtggaccaggaggacatcaccctgcagagcggcagagatgagctgaatgaggagctgatccaggaggagagcagtgaagatgaaggagaatatgaggaggtgaggaaggaccaggacagcgtgggggagatgaaggatgaaggagaggagaccctgaactacccagacaccaccatcgacctgagccacctgcagccccagaggagcatccagaagctggccagcaaggaggagagcagcaacagcagtgacagcaagagccagagcagaagacacctgagcgccaaggagcggcgggagatgaagaagaagaagctgcccagcgacagcggggacctggaggccctggagggcaaggacaaggagaaggagagcacagtgcacatcgagacccaccagaacaccagcaagaatgtggccgctgtgcagcccatgaagaggggccagaagagcaagatgaagaagatgaaggagaagtacaaggaccaggatgaagaagatcgggagctgatcatgaagctgctgggcagcgctggcagcaacaaggaggagaagggcaagaagggcaagaagggcaagaccaaggatgagcctgtgaagaagcagccccagaagccccggggcggccagagggtgtctgacaacatcaagaaggagacccccttcctggaggtgatcacccatgagctgcaggactttgctgtggatgacccccatgatgacaaggaggagcaggacctggaccagcagggcaatgaggagaacctgtttgacagcctgaccggccagccccacccagaagatgtgctgctgtttgccatccccatctgtgccccctacaccaccatgaccaactacaagtacaaggtgaagctgaccccaggagtgcagaagaagggcaaggccgccaagacagccctgaacagcttcatgcacagcaaggaggccacagcccgggagaaggacctcttccgctctgtgaaggacacagacctgagcaggaacatccctgggaaggtgaaggtgtctgcccccaacctgctgaatgtgaagaggaagtag

SEQ ID NO: 148958 - DNA, 3105 bp, Artificial Sequence
  derived and/or modified sequence
atgaagagccggttcagcaccatcgacctgcgggccgtgctggccgagctgaacgcctcccttttgggtatgcgtgtgaataacgtgtatgacgtggacaataagacctatctgatccggctccagaaaccggactttaaggctacacttctgttggagagtggaattcgtatccacaccacggagttcgagtggcccaaaaatatgatgcctagctccttcgcgatgaagggcaatatcgtgctgaccgattacgaatacgtaatcctgaacatcctgcgtttccgtacagatgaggcagacgacgtaaagtttgcagtcagagagcgatatccattggatcacgcacgggctgccgagcccttactcactctggagaggctcacagaaatcgtcgcttcagctcctaagggagagttattgaagcgtgtcctgaacccactcctgccctacggcccagctctgatcgagcactgtctcctggaaaacggcttttccggtaatgttaaagtggacgagaaattggagacaaaggatattgagaaggtgcttgtctctttgcaaaaggctgaggactacatgaaaaccaccagcaatttctcgggtaagggctatattatccagaaacgggagattaaaccatccctagaggcagacaaaccagtggaagacattctcacctacgaggaatttcatcctttcttattttcccaacactctcagtgcccgtacatagagtttgaaagctttgataaggctgtggatgagttttattcgaagattgagggtcagaagatcgacctgaaagccttgcagcaggaaaagcaggctctgaaaaaactcgacaatgtgcggaaggatcacgagaacagactcgaggcattgcaacaggcacaggaaatcgataagctcaaaggtgaactgatcgaaatgaacctgcagattgtggacagagctattcaagtggtgaggtccgcgctggccaatcaaattgactggactgaaatagggctgattgtgaaagaggctcaggctcagggggaccccgtggcaagtgctattaaagaacttaaattacagactaatcacgtgaccatgttgcttcgcaacccatacttgctttctgaggaggaggacgatgatgttgacggtgacgttaatgtggaaaagaatgagactgagccccctaaaggaaagaagaagaaacagaaaaataaacagctccagaaaccacagaagaataagcctctgcttgtggatgtagacctgtccctgtccgcttacgcgaacgcaaagaagtactatgatcacaaacgttatgccgcgaagaaaacgcaaaagacagtggaggctgcagagaaagcctttaaatctgcagaaaaaaaaaccaaacagaccctgaaggaagtgcagactgtgaccagcatccagaaggcaagaaaggtctactggttcgaaaagttcttgtggtttataagcagtgaaaactatctgatcatcggaggcagagatcagcagcagaacgagatcattgtaaaaaggtatcttacccccggcgacatctatgtccacgcagacctgcatggcgcgacctcttgcgttatcaagaacccaaccggcgagcccataccgccccgaactttgacggaagccggcacaatggcattgtgttactctgctgcctgggacgccagagtcattacctccgcatggtgggtgtaccaccaccaggtctccaaaactgccccaaccggggaatacctgaccaccggttctttcatgattcggggaaaaaaaaactttctgcctcccagctacctgatgatggggttctcatttctgtttaaggtagatgaaagttgcgtatggaggcatcaaggagaaaggaaagttcgagtgcaagacgaggatatggaaacactggcatcttgtacctcagaactgattagcgaagaaatggaacagctggatggaggtgacacctctagcgatgaagataaggaagagcatgagacccctgtagaagtggagctgatgacgcaggtggaccaagaggacatcactctacagagtggccgagacgaactcaatgaggagctcattcaggaggaatcctccgaggatgagggggaatacgaagaagtgaggaaggaccaagatagcgtgggcgaaatgaaagatgaaggtgaggagaccctgaattatccggacacaaccatcgacctctcccatctgcaaccccagcggtctatccagaagctggcttccaaagaggaatccagcaactcttccgatagcaaatcccagagtaggcggcatctgagcgctaaggagcgcagggagatgaaaaagaagaaactgccatcagattcgggagatctcgaggctcttgaagggaaggacaaagagaaggagagcaccgtccatatcgagacgcatcaaaatacatctaaaaacgtggcggccgttcagccgatgaagcggggccagaagtctaagatgaaaaaaatgaaagagaagtataaggaccaagatgaggaagaccgtgagttgatcatgaaactccttgggtccgccgggagcaacaaggaggagaaaggaaagaaaggaaaaaaaggaaagacaaaagatgagcccgttaaaaagcagccacagaaaccaaggggcggccagagggtgtccgacaacatcaaaaaagagacgccgttcctcgaggtgatcactcatgaactgcaggacttcgccgtagatgatccacatgacgataaagaggagcaggacctggaccagcagggaaacgaagaaaatttatttgactcgttgactggccaacctcacccagaggacgtgcttctcttcgccatacctatctgcgcaccatacactacaatgaccaactacaaatataaggtcaagctcactcccggcgtgcagaagaaggggaaggctgctaaaaccgctctgaattccttcatgcactcgaaggaggcgacggctcgggagaaggacctgtttcggtctgtcaaggacacggacctgtcgcggaatatacctggtaaggtcaaagtgagcgctcctaatctgctgaatgtaaagaggaagtag

SEQ ID NO: 148959 - DNA, 3995 bp, Artificial Sequence
  derived and/or modified sequence
gaggagaagtggcgtcgagtccggccgggcagtagaggaacttgcggtagtgaccctcgggcctcgccatgaagagccgctttagcaccattgacctccgcgccgtactcgcggagctgaatgctagcttgctaggaatgagagtaaacaatgtttatgatgtggataataagacataccttattcgtcttcaaaaaccggactttaaagctacacttttacttgaatctggcatacgaattcatacaacagaatttgagtggcctaagaatatgatgccgtctagttttgccatgaaggggaacattgttcttacagattatgagtacgtaattttaaatattctaaggtttcgaactgatgaggcagatgatgttaaatttgctgttcgtgaacgctatccacttgatcatgctagagctgctgaacctttgcttactttggaaaggttgactgaaatagtagccagcgcacctaagggtgaactactgaagagggtgcttaacccattacttccctatggaccagctctcattgaacactgtcttttagaaaatggattctcgggtaatgtcaaagtggatgaaaaacttgaaactaaagatattgaaaaagtacttgtttctctgcagaaagcagaagactatatgaaaacaacatccaacttcagtgggaagggatatatcattcagaaaagagaaataaaaccaagcttggaagcagataaaccagttgaagacatactgacgtatgaggaatttcatcctttcttgttttctcaacattcacaatgtccatatatagaatttgaatcatttgacaaggcggtggatgaattttattccaagatagaaggccagaaaattgacttaaaagctttacaacaggaaaagcaagcattgaagaaattagataatgttcgaaaggatcacgaaaacagattggaagctcttcagcaggctcaggaaatagacaaactgaaaggagagctcatagaaatgaacctacaaatagttgacagagccattcaggtagttcgaagtgctttagctaaccagatagattggacagaaattgggttaattgtgaaagaagcccaggctcaaggagaccctgttgcaagtgcaatcaaagaattaaaactacaaacaaaccatgttacaatgctgctaagaaatccatacttgttatcagaggaggaagatgatgatgttgatggtgacgtcaatgttgagaaaaatgaaactgaaccaccaaaaggaaaaaagaaaaaacaaaagaataaacagctgcagaagcctcagaaaaataagcccttacttgtagatgttgatctcagcttgtcagcatatgccaatgccaaaaagtattatgatcacaagagatatgctgctaagaaaacacaaaagactgttgaagctgctgagaaggcattcaagtcagcagaaaagaaaacaaagcaaacattaaaagaagttcagactgttacctctattcaaaaagcaagaaaagtatattggtttgagaaatttctgtggttcattagctcagagaactatctaattataggtggacgagatcagcaacagaatgaaataattgtgaaaagatacttgacaccaggagacatttatgtacatgctgatcttcatggagctactagctgtgtaattaagaatccaacaggagaacccatccccccacggaccttgactgaagctggcacaatggcactttgctacagtgctgcttgggatgcacgagttatcactagtgcttggtgggtgtaccatcatcaggtatctaaaacagcaccaactggagaatatttgacaacaggaagcttcatgataagaggaaaaaagaattttcttcctccctcatatctaatgatggggtttagcttcctttttaaggtagatgagtcttgtgtttggagacatcagggtgaacgaaaagtcagagtacaggatgaagacatggagacactggcaagttgtacaagtgaactcatatcagaagaaatggaacaattagatggaggtgacacgagcagtgatgaggataaagaagaacatgaaactcctgtggaagtagaactcatgactcaggttgaccaagaggatatcactcttcagagtggcagagatgaactaaatgaggagctcattcaggaagaaagctctgaagacgaaggagaatatgaagaggttagaaaagatcaggattctgttggtgaaatgaaggatgaaggggaagagacattaaattatcctgatactaccattgacttgtctcaccttcaaccccaaaggtccatccagaaattggcttcaaaagaggaatcttctaattctagtgacagtaaatcacagagccggagacatttgtcagccaaggaaagaagggaaatgaaaaagaaaaaacttccaagtgactcaggagatttagaagcgttagagggaaaggataaagaaaaagaaagtactgtacacattgaaactcatcagaacacaagcaaaaatgttgcggctgtgcagccaatgaaacgaggacaaaagagtaaaatgaaaaaaatgaaagaaaaatacaaagaccaggatgaagaagaccgtgaacttatcatgaagttgctggggtctgcaggttcaaacaaagaagaaaaagggaagaaggggaagaaaggaaaaacaaaggacgaacctgtgaagaaacagccccagaaacctagaggtggacagagggtctctgacaacattaagaaagaaactccgttccttgaggttataactcatgagttacaagactttgctgtagatgatccacatgatgacaaggaagagcaagatctggatcaacagggaaatgaggaaaacctatttgattctttgacaggccagccacatcctgaagatgtactactgtttgccattccaatatgtgccccttacaccaccatgacaaactacaaatataaagtgaaacttactcctggagtgcagaaaaagggaaaagctgcaaaaacagccttgaatagtttcatgcattccaaagaagcaacagcaagagaaaaagacttattccgcagcgtaaaggacacagatttatcaagaaacattcctggcaaagtgaaagtgtctgcacccaatcttctgaatgtaaaaaggaaatagctgaaatgaaattctaaaatatttgagaagagccaattttatagccttttggaagttcaaagatgaaagcaccatgtatcaggatttccgcattataaaaatgaactaaacattgccttgctatattcaccaaaaggacttacttcttgttttttcccagttttatatagaggaaacactgtctatgataggatttccaaaagtatttgtggacagttaaatgctaattaatatacatctgtagttattctacattttcttgaaatttgggaggttaataccaagtattcatttcatgatgtaaagaaactgaacagtgaagtggcttgattgcttaaactattgacttggtaagtctactgtatataacatctaatatatatattacaggccaaatgaactaaacattgccttgctatattcaccaaaaggacttaattcttgtttttttcccagttttatatagaggaaacactatgataggatttcctaaagtatttgtggacagttaaatgctaattatatacatctgtagttattctacattttcttgaaatttgggaggttaataccaagtattcatttcatgatgtaaagaaactgaacagtgaagtggcttgattgcttaaactattgacttggtaagtctactgtatataacatctaatatatatatattataggccagctacaaggggtttaaatatttaggattgtgtcttgaaaactaagtattggagtggattttcttctgctttcattgatacttgtcagaaaaaaatattagaccaaaatgtaaaatataagtaataattctcatga

SEQ ID NO: 148960 - DNA, 3105 bp, Artificial Sequence
  derived and/or modified sequence
atgaaatcccgcttcagtaccattgatcttcgcgcagtgctggcggagctgaacgcctccctgctgggtatgagagtgaataacgtgtatgacgtggacaacaagacctacctcatccggctccagaagcctgacttcaaggcaacgcttttgcttgagagcggcatcagaatccacacaaccgaattcgaatggcccaaaaatatgatgccttctagttttgcaatgaagggtaatattgtcttaacagactacgagtacgttatactgaatatcctgcgctttagaaccgacgaagccgatgatgtaaagttcgcggtgcgcgagaggtatccactcgaccacgcacgggcagcagaaccacttctcaccctggagcgactcaccgaaatcgtggcgagcgcccctaaaggggagctgcttaagagggtgcttaaccccctgcttccatacgggccagcactgatcgagcactgtttgctggaaaacgggttttcaggtaacgtgaaagtggatgaaaaactcgagactaaagacatcgagaaggtgctggtctcactgcagaaagcagaggattatatgaaaactacctctaacttctcaggcaagggctacattatccagaagagagagattaagccctcactcgaggccgacaaacccgttgaagatatcttaacttatgaagagttccaccccttcctctttagccagcatagccagtgcccctatatagagttcgaatcattcgataaagcagttgatgagttttattcaaagatcgaggggcagaagatcgatcttaaagccctacaacaggaaaaacaggcccttaagaaactggataacgtccgcaaggatcatgagaatcggcttgaggcactacagcaggcccaggaaatcgataagctaaaaggtgagctgatagaaatgaatcttcagatcgtggatagagcaatccaggtcgtgcgctcggccctggcaaatcagattgattggaccgaaattgggttgatcgttaaggaagcccaagcgcagggtgatcccgtcgcctcggccatcaaggagctgaagctccaaaccaaccacgtgaccatgttgctcagaaacccctacctgttaagtgaggaagaagatgacgacgtcgatggcgacgttaatgtggaaaagaacgaaacggaacctcctaagggaaagaagaagaagcaaaagaataaacagctgcagaaacctcagaaaaataaaccactgctggtcgacgttgatttgtcactgtctgcttacgctaatgccaagaaatattatgatcacaaacgctacgcagcaaagaagactcagaagacagttgaggccgctgagaaggccttcaaatcagccgagaaaaagacaaaacagaccctgaaggaagtacagaccgtcacctccattcagaaagctcggaaggtttattggttcgaaaagttcttatggtttatctcatcagagaactacctgattataggaggcagggaccagcagcagaatgaaattatcgtgaaacggtacctcacccctggggacatttacgtgcacgcagatctgcacggagctacttcctgtgtgattaagaaccctaccggcgaacctatcccccctaggaccttgacagaggcgggtaccatggccctctgctactccgctgcatgggacgcaagggtcatcaccagtgcctggtgggtttatcaccaccaggtcagtaaaaccgctcccaccggcgaatatctgacgacaggcagctttatgatcagagggaagaaaaactttttaccaccaagctacttgatgatggggttcagttttcttttcaaggtagatgaatcctgcgtctggcgacaccaaggcgagcgcaaagtacgcgtacaggacgaggacatggaaaccctagcttcttgcacatcagagctgatctctgaggagatggagcagcttgatggcggagatacatcctctgacgaagataaggaagaacacgagacacctgtggaggtggagctgatgacccaagttgaccaggaggacattactctgcagagtggtcgcgacgagctgaacgaggagctcatccaggaggagtcaagcgaagacgagggcgaatatgaggaagtgcggaaggaccaagatagcgtgggagagatgaaggacgagggagaagagaccctgaactatcctgatactactatcgatctctcccacttgcagccccagagaagcatacaaaagctagcatccaaggaggaatcctccaattccagtgactctaagtctcagtccagaaggcatctatccgcaaaggagcgtagggaaatgaagaagaagaagcttcccagtgactctggagatcttgaagcgctagaaggcaaggacaaagaaaaggagtcaactgtccacatcgaaacccaccaaaacacctcgaaaaacgttgccgcagtgcagccaatgaagcgcggacagaagagcaaaatgaaaaagatgaaggaaaagtataaagaccaagacgaggaagaccgtgagcttataatgaaactgttaggctccgcaggctcgaacaaggaggaaaaaggaaagaagggcaaaaaaggcaagactaaagacgagcccgtgaaaaagcagcctcagaagcccagaggcggacagcgggtctccgacaatatcaagaaagagactccgttcctggaagttatcactcacgagcttcaggattttgccgtcgacgacccacacgatgacaaagaagagcaggatttggaccagcagggaaacgaagagaacctttttgactcgctgaccgggcagccccatccagaggatgtgcttctattcgccatccccatttgtgctccttatacaacgatgactaactataagtacaaggtgaagttaacccctggtgtacagaagaaaggaaaggcagcaaaaactgccttgaattccttcatgcattctaaggaggcaacagccagggagaaggatctgtttcggtccgtcaaggacacagacctctcacggaatatcccaggcaaagtgaaggtgtctgccccaaacctactgaacgtaaagaggaaatag

SEQ ID NO: 148961 - protein, 629 aa, Artificial Sequence
  derived and/or modified sequence
MAVPPGHGPFSGFPGPQEHTQVLPDVRLLPRRLPLAFRDATSAPLRKLSVDLIKTYKHINEVYYAKKKRRAQQAPPQDSSNKKEKKVLNHGYDDDNHDYIVRSGERWLERYEIDSLIGKGSFGQVVKAYDHQTQELVAIKIIKNKKAFLNQAQIELRLLELMNQHDTEMKYYIVHLKRHFMFRNHLCLVFELLSYNLYDLLRNTHFRGVSLNLTRKLAQQLCTALLFLATPELSIIHCDLKPENILLCNPKRSAIKIVDFGSSCQLGQRIYQYIQSRFYRSPEVLLGTPYDLAIDMWSLGCILVEMHTGEPLFSGSNEVDQMNRIVEVLGIPPAAMLDQAPKARKYFERLPGGGWTLRRTKELRKDYQGPGTRRLQEVLGVQTGGPGGRRAGEPGHSPADYLRFQDLVLRMLEYEPAARISPLGALQHGFFRRTADEATNTGPAGSSASTSPAPLDTCPSSSTASSISSSGGSSGSSSDNRTYRYSNRYCGGPGPPITDCEMNSPQVPPSQPLRPWAGGDVPHKTHQAPASASSLPGTGAQLPPQPRYLGRPPSPTSPPPPELMDVSLVGGPADCSPPHPAPAPQHPAASALRTRMTGGRPPLPPPDDPATLGPHLGLRGVPQSTAASS

SEQ ID NO: 148962 - DNA, 1890 bp, Artificial Sequence
  derived and/or modified sequence
atggcagtccccccaggccacggccccttctcagggtttcccgggcctcaggagcatacacaggtcctccccgacgtgcgacttcttcccaggcgattgccactggcatttagggatgccacttccgctcccctgcggaagctgtcagtggatctgatcaaaacttataaacacattaacgaagtctattacgctaagaagaaacgccgcgcgcagcaagcacccccacaggattcctcaaacaaaaaggagaagaaggtgctcaatcatgggtacgacgacgacaatcatgactatattgtgcggtccggtgagcgttggcttgaacgctacgagatcgatagcctgataggcaaagggagtttcggccaggtcgtcaaggcctatgatcatcaaacacaggaactggtcgccatcaagattataaagaataaaaaagcgttcctaaatcaggctcagattgagctcagactgctggagttgatgaaccagcacgataccgaaatgaaatactacatcgtgcacctgaagagacatttcatgttccggaaccatctgtgtctcgtgttcgaactacttagctacaatctgtacgatttactacgaaatactcatttccgcggcgtgtctctgaacctaacacggaagctggcccagcagctgtgcaccgcactcctttttctcgcaacaccagagctgagtattattcattgcgacctaaaaccggagaatattctgctgtgcaaccctaaaagatcggccatcaaaattgtggactttggttctagctgccaactaggccaacggatatatcaatacatccaaagtcgattttacaggtcaccggaagtgcttctcggaactccatacgacctggcgatagatatgtggagccttgggtgcatattagttgaaatgcataccggggaacctttgttctctggatcgaacgaggtggatcagatgaatcgcattgtcgaggtgctgggcatcccaccggccgcaatgctggaccaagccccaaaagcccggaagtactttgaacggcttcctggggggggctggacactgagaagaaccaaagagttgcggaaagactaccaggggcccggcacaaggcgattgcaggaggtgctcggcgtgcagactggcggtcctggcggaaggcgggctggggaaccaggacactccccagcagactacttgaggtttcaagacctcgtgttaaggatgttggagtacgaaccagcggcgcgcatttcccccctgggagccctgcagcatggattctttcggagaactgctgatgaggcgaccaacaccggtcctgctggctccagcgcttctacctctccagctcccctcgacacatgcccatcctctagcaccgcctcatcgatttcatcttctggcgggtcaagcggctcctctagcgacaacagaacgtatcgttactcaaataggtactgcggaggaccaggcccaccaatcaccgattgcgagatgaacagtcctcaggtgcccccatctcagcctctgcgcccctgggcaggtggcgatgttcctcataaaacccatcaggcccccgcaagcgcctcgtctttacctggaaccggggctcagcttcctccccaacctaggtatcttggccggccaccttctcccacaagcccccccccgcccgagcttatggacgtgtccctggtggggggacctgccgattgtagccccccccaccctgccccagcaccccagcaccccgctgctagtgccctgcggaccaggatgactggcgggagacctcccctgcccccgcccgatgaccctgctacccttggtccccacctcgggctgaggggagtgccacaatctactgctgcctcgtcatag

SEQ ID NO: 148963 - DNA, 1890 bp, Artificial Sequence
  derived and/or modified sequence
atggctgtgcccccaggccacggccccttcagcggcttccctggcccccaggagcacacccaggtgctgcctgatgtgcggctgctgccccggcggctgcccctggccttcagagatgccaccagcgcccccctgaggaagctgtctgtggacctgatcaagacctacaagcacatcaatgaggtgtactatgccaagaagaagagaagagcccagcaggccccaccccaggacagcagcaacaagaaggagaagaaggtgctgaaccacggctatgatgatgacaaccacgactacatcgtgcgctctggagagcgctggctggagagatatgaaattgacagcctgattggcaagggcagctttggccaggtggtgaaggcctatgaccaccagacccaggagctggtggccatcaagatcatcaagaacaagaaggccttcctgaaccaggcccagatcgagctgcggctgctggagctgatgaaccagcacgacacagagatgaagtactacatcgtgcacctgaagaggcacttcatgttcaggaaccacctgtgcctggtgtttgagctgctgagctacaacctgtatgacctgctgaggaacacccacttccggggcgtgtccctgaacctgaccaggaagctggcccagcagctgtgcacagccctgctcttcctggccaccccagagctgagcatcatccactgtgacctgaagccagagaacatcctgctgtgcaaccccaagaggtctgccatcaagatcgtggactttggcagcagctgccagctgggccagaggatctaccagtacatccagagccgcttctaccgcagccctgaggtgctgctgggcaccccctatgacctggccatcgacatgtggagcctgggctgcatcctggtggagatgcacactggagagcccctcttcagcggcagcaatgaggtggaccagatgaacagaattgtggaggtgctgggcatccccccagctgccatgctggaccaggcccccaaggccaggaagtactttgagcggctgcccggcggcggctggaccctgcggaggaccaaggagctgaggaaggactaccagggccctggcacccggcggctgcaggaggtgctgggcgtgcagacaggaggccctgggggcagaagagctggggagcccggccacagccctgctgactacctgcgcttccaggacctggtgctgaggatgctggagtatgagcctgctgcccgcatcagccccctgggcgccctgcagcacggcttcttccggaggacagcagatgaggccaccaacacaggccctgctggcagcagcgccagcaccagccctgcccccctggacacctgccccagcagcagcacagccagcagcatcagcagcagcggcggcagcagcggcagcagcagtgacaacagaacctaccgctacagcaaccgctactgcggcggccctggcccccccatcacagactgtgagatgaacagcccccaggtgccccccagccagcccctgcggccctgggccggaggagatgtgccccacaagacccaccaggccccagccagcgccagcagcctgcccggcaccggggcccagctgcccccccagccccgctacctgggccggccccccagccccaccagccccccacctcctgagctgatggatgtgtccctggtgggcggccctgctgactgcagccccccccacccagccccagccccccagcaccctgctgccagcgccctgcggaccaggatgactggaggccggccccccctgcccccaccagatgatcctgccaccctgggcccccacctgggcctgcggggcgtgccccagagcacagctgccagcagctag

SEQ ID NO: 148964 - DNA, 1890 bp, Artificial Sequence
  derived and/or modified sequence
atggccgtgccccccggccacggccccttcagcggcttccccggcccccaagagcacacccaggtgctccccgacgtccgcttgctcccacggcgcctgcctctcgctttccgggatgctacctccgcacccttgcgcaagttgagtgtggatctgatcaaaacgtacaaacacattaatgaggtatattacgctaaaaagaagcggcgggcccagcaggcccctcctcaagacagctccaacaagaaggagaaaaaagtgctgaaccatggttacgacgatgacaaccacgactacattgtgagaagtggagaacgttggctcgaacgctatgagatcgacagtcttatcggtaaaggctccttcgggcaggtcgtcaaagcttatgatcatcagacacaggaattggtcgctatcaagataattaaaaacaaaaaggcctttttaaatcaagctcagatcgaactacgcctgctggagctgatgaatcagcatgatacggagatgaaatattacatcgttcacttgaaacgccatttcatgttccgcaaccacctgtgccttgtgttcgagttgctctcctacaacttatatgacttattacgcaacacccactttcggggcgttagtctgaatctgacgcgaaaattagcccagcagctgtgtactgctctgttgtttcttgctacgccggagctgagcatcatccattgcgacctgaagccggaaaatatcctcctatgcaatcccaagcggtctgccatcaaaatcgtggacttcggcagtagctgccaactaggacaacggatttatcagtacattcaatccaggttttatcggagcccagaagtccttcttggcacaccatacgacctcgccatcgacatgtggtccttgggttgcatacttgtggaaatgcatacaggcgagccactgttcagtgggtctaacgaggtggatcagatgaacagaattgtggaagtgctgggaattccaccagccgctatgctggaccaggcccccaaagcccggaagtactttgagaggttgcccggcggaggctggaccctgcgaaggaccaaggaactgcgaaaggattatcaggggcccggtacaaggagattgcaggaagtgctgggcgtgcagacgggagggccagggggccgtcgggccggagaaccgggccacagccctgccgattatctgcggttccaggacctggtactgagaatgttggagtatgaacccgcggccagaatctcccctttgggggcacttcagcacgggttcttcaggcgtactgcagacgaagcaacaaataccggaccggccggctcaagcgcctcaacatcgccagctcccttggacacatgtccctcatcaagtaccgcttcctctattagtagcagtggcggatcaagcggatcaagttccgataacagaacttatagatacagtaatagatattgcggaggccccggcccccctatcactgactgcgagatgaattccccacaggtccctccctctcaaccactgaggccatgggctggcggcgatgtgcctcataagacacaccaggcaccagccagcgctagttccttacccgggacaggggctcaactacctcctcaacccagatatctgggaagaccccccagtcccactagtcccccaccgccagaactcatggacgtgagcctcgtcggagggccggctgactgcagtcccccacaccctgcccccgcgccacagcaccccgctgcgagcgccctgcggacgaggatgaccggcgggaggcctcccctgccaccgccagatgacccggccacattggggccccatttgggcctgagaggcgttccacagtcgacagccgcaagctcctag

SEQ ID NO: 148965 - DNA, 1890 bp, Artificial Sequence
  derived and/or modified sequence
atggcagtgccacccggtcatggaccattctccggcttcccaggtccacaggagcatacccaggttctgccagatgtccgacttttgcctcgccgattgcctttagcttttagggatgctacgagtgctccacttagaaagctttctgtggatttaattaaaacctacaagcatataaatgaggtctactatgccaagaagaagcgaagggcccagcaggctcctcctcaggattcatcaaataaaaaagagaaaaaagtcctcaaccatggatatgatgatgacaatcacgactatattgtacggagcggggaacggtggctggaaaggtatgagatcgactcccttattggcaaaggcagttttggccaagttgtgaaagcctatgatcaccagacgcaggaattagttgccattaaaattatcaaaaacaagaaggcctttctaaaccaggcccagatcgagctgagactgctggagctgatgaaccagcatgacacagagatgaaatactatattgtgcacctgaagagacattttatgtttcgcaaccacctttgtctggtttttgagctgttaagctataatttgtacgatttactgcggaatacccacttccgcggagtgtcactgaacctaacacgcaaactggctcagcagctctgtaccgcactactgttcctcgctacgccagaactatcaattatccactgtgatctgaagccagaaaatattctgctctgcaaccccaagcgctccgcaatcaagatcgttgatttcgggagttcctgccagctcggccagaggatatatcagtatattcagtcaagattttacagaagcccggaagtgctgctcggaaccccctacgacctcgctattgacatgtggtcattgggatgcattctggtggagatgcacaccggagagccattgttcagtggctccaacgaagtggatcaaatgaacagaattgtcgaggtattggggataccacccgctgccatgctggaccaggccccaaaagctcgtaaatattttgaacgtcttccagggggaggctggacactacggagaaccaaggagctaaggaaggactatcaaggtcccggaaccaggcgcctacaagaggtactgggcgtgcaaactggaggacctggaggcagaagagcaggggagcctgggcactcccccgcagattaccttcgcttccaggatctggtcctgaggatgctagagtacgagccggcagcacgaatctcacctctgggggctctgcagcatgggtttttccggaggaccgcggatgaagctaccaacactgggccagccggttcgagcgcctctacttcgccagcccctttggacacatgtccttcctcttctaccgcctcaagcatcagcagttccggcggttcaagcggcagctcctctgacaaccgcacgtaccgatactctaataggtactgcggaggtcctggtccccctatcaccgattgtgaaatgaactctcctcaggtgcccccaagccaaccactccggccttgggccggaggcgatgtgcctcacaagacccaccaagcccctgccagtgcatcctcactgcctggaaccggtgcacagcttccccctcagcctcggtacttagggagacccccaagcccaacgagccctccccctcccgaactgatggatgtatctctggttggcggacccgcagattgcagccctccccatcccgcaccggcaccccaacaccccgctgcctcagcgctgagaacacgcatgaccggcggtcgaccccctctcccgccaccagatgaccccgctactctcgggccacatctcggcctgaggggcgtgccacagtctaccgccgctagttcttag

SEQ ID NO: 148966 - DNA, 1890 bp, Artificial Sequence
  derived and/or modified sequence
atggccgtgccccccggccacggccccttcagcggcttccccggcccccaggagcacacccaggtgctgcccgacgtgagactgctgcccagaagactgcccctggccttcagagacgccaccagcgcccccctgagaaagctgagcgtggacctgatcaagacctacaagcacatcaacgaggtgtactacgccaagaagaagagaagagcccagcaggcccccccccaggacagcagcaacaagaaggagaagaaggtgctgaaccacggctacgacgacgacaaccacgactacatcgtgagaagcggcgagagatggctggagagatacgagatcgacagcctgatcggcaagggcagcttcggccaggtggtgaaggcctacgaccaccagacccaggagctggtggccatcaagatcatcaagaacaagaaggccttcctgaaccaggcccagatcgagctgagactgctggagctgatgaaccagcacgacaccgagatgaagtactacatcgtgcacctgaagagacacttcatgttcagaaaccacctgtgcctggtgttcgagctgctgagctacaacctgtacgacctgctgagaaacacccacttcagaggcgtgagcctgaacctgaccagaaagctggcccagcagctgtgcaccgccctgctgttcctggccacccccgagctgagcatcatccactgcgacctgaagcccgagaacatcctgctgtgcaaccccaagagaagcgccatcaagatcgtggacttcggcagcagctgccagctgggccagagaatctaccagtacatccagagcagattctacagaagccccgaggtgctgctgggcaccccctacgacctggccatcgacatgtggagcctgggctgcatcctggtggagatgcacaccggcgagcccctgttcagcggcagcaacgaggtggaccagatgaacagaatcgtggaggtgctgggcatcccccccgccgccatgctggaccaggcccccaaggccagaaagtacttcgagagactgcccggcggcggctggaccctgagaagaaccaaggagctgagaaaggactaccagggccccggcaccagaagactgcaggaggtgctgggcgtgcagaccggcggccccggcggcagaagagccggcgagcccggccacagccccgccgactacctgagattccaggacctggtgctgagaatgctggagtacgagcccgccgccagaatcagccccctgggcgccctgcagcacggcttcttcagaagaaccgccgacgaggccaccaacaccggccccgccggcagcagcgccagcaccagccccgcccccctggacacctgccccagcagcagcaccgccagcagcatcagcagcagcggcggcagcagcggcagcagcagcgacaacagaacctacagatacagcaacagatactgcggcggccccggcccccccatcaccgactgcgagatgaacagcccccaggtgccccccagccagcccctgagaccctgggccggcggcgacgtgccccacaagacccaccaggcccccgccagcgccagcagcctgcccggcaccggcgcccagctgcccccccagcccagatacctgggcagaccccccagccccaccagcccccccccccccgagctgatggacgtgagcctggtgggcggccccgccgactgcagccccccccaccccgcccccgccccccagcaccccgccgccagcgccctgagaaccagaatgaccggcggcagaccccccctgcccccccccgacgaccccgccaccctgggcccccacctgggcctgagaggcgtgccccagagcaccgccgccagcagctag

SEQ ID NO: 148967 - protein, 961 aa, Artificial Sequence
  derived and/or modified sequence
MEVPAAGRVPAEGAPTAAVAEVRCPGPAPLRLLEWRVAAGAAVRIGSVLAVFEAAASAQSSGASQSRVASGGCVRPARPERRLRSERAGVVRELCAQPGQVVAPGAVLVRLEGCSHPVVMKGLCAECGQDLTQLQSKNGKQQVPLSTATVSMVHSVPELMVSSEQAEQLGREDQQRLHRNRKLVLMVDLDQTLIHTTEQHCQQMSNKGIFHFQLGRGEPMLHTRLRPHCKDFLEKIAKLYELHVFTFGSRLYAHTIAGFLDPEKKLFSHRILSRDECIDPFSKTGNLRNLFPCGDSMVCIIDDREDVWKFAPNLITVKKYVYFQGTGDMNAPPGSRESQTRKKVNHSRGTEVSEPSPPVRDPEGVTQAPGVEPSNGLEKPARELNGSEAATPRDSPRPGKPDERDIWPPAQAPTSSQELAGAPEPQGSCAQGGRVAPGQRPAQGATGTDLDFDLSSDSESSSESEGTKSSSSASDGESEGKRGRQKPKAAPEGAGALAQGSSLEPGRPAAPSLPGEAEPGAHAPDKEPELGGQEEGERDGLCGLGNGCADRKEAETESQNSELSGVTAGESLDQSMEEEEEEDTDEDDHLIYLEEILVRVHTDYYAKYDRYLNKEIEEAPDIRKIVPELKSKVLADVAIIFSGLHPTNFPIEKTREHYHATALGAKILTRLVLSPDAPDRATHLIAARAGTEKVLQAQECGHLHVVNPDWLWSCLERWDKVEEQLFPLRDDHTKAQRENSPAAFPDREGVPPTALFHPMPVLPKAQPGPEVRIYDSNTGKLIRTGARGPPAPSSSLPIRQEPSSFRAVPPPQPQMFGEELPDAQDGEQPGPSRRKRQPSMSETMPLYTLCKEDLESMDKEVDDILGEGSDDSDSEKRRPEEQEEEPQPRKPGTRRERTLGAPASSERSAAGGRGPRGHKRKLNEEDAASESSRESSNEDEGSSSEADEMAKALEAELNDLM

SEQ ID NO: 148968 - DNA, 2886 bp, Artificial Sequence
  derived and/or modified sequence
atggaagttccggctgctggcagggtgccagcggagggggctcctacagccgcagttgccgaagtccgctgccccggccctgcaccgctgcgtctcctggagtggcgtgtggccgccggcgctgccgtacgcattgggtccgtgctggccgtattcgaagcggctgcatctgcccaatctagtggagcaagccagtcacgggtcgcttcagggggttgtgtgaggcctgcaagacccgaacgacgactgagatcagaacgcgcaggcgtggtacgggagctctgtgcgcagcccggacaggtggtggctccgggggccgtactggtgaggctcgaagggtgcagccatcctgtggtgatgaaaggtttatgcgctgaatgcggccaggacctgactcaattgcagtctaaaaacggcaagcagcaggtgcccttaagcactgccaccgtcagtatggtgcacagcgtgccagagctgatggtgagttcagagcaggcagaacagctaggcagagaagaccaacagaggctgcacaggaataggaagctcgtgctgatggtcgacctggatcagaccctaatccacactacagagcagcattgccagcagatgtcaaataaaggaatcttccacttccagctcgggaggggggaaccgatgctccataccagacttagaccgcattgtaaagacttcctggaaaaaattgctaaactgtatgagctacacgtctttacctttggaagtcgactatatgcacataccatcgccggttttttagatcctgagaagaagttattcagccaccgaattctctcaagagacgagtgtatcgatccattttcaaaaacgggcaacttaagaaatctgttcccatgcggcgattctatggtatgcattattgacgatagggaggacgtctggaaattcgcccccaacctgatcacggtaaagaagtatgtctactttcagggaactggggatatgaatgccccaccggggtctcgcgagagccagacgcgcaaaaaggtgaatcactccagagggactgaggtcagcgaacccagtccccccgttcgagaccccgaaggggtgacacaggcgcccggtgtggagccgtcaaatggcctcgaaaaaccggcgcgagaactgaatgggagtgaggccgccacaccccgtgattcccctcgtccaggcaaaccggatgagcgggacatatggccaccagcccaggctcctacttcgtctcaagagctcgcaggagccccggagcctcagggctcttgcgcccagggaggcagagtcgcacctgggcagagacctgcacaaggagccacaggtacagatctggatttcgacctgtcctcagattcagaaagcagcagcgaatcggaagggaccaagtcttccagcagcgcctctgacggcgaatccgaggggaagagagggcggcagaaacccaaggcggcgccggagggagctggggctctggctcaaggttcatctctggaaccagggagaccagcggccccctcgttgccgggcgaggcagagcccggggctcacgccccagacaaggagccagagctgggcggacaagaggaaggggagagagacggactgtgcggactgggaaatggatgcgctgatcgtaaggaggctgaaaccgagagtcaaaatagcgagctctccggtgttacagcgggggagtccctggaccaatcgatggaagaggaggaggaagaggacactgatgaggacgatcaccttatatatcttgaagagattctcgtccgtgttcacacagattactacgcaaaatatgataggtacctgaacaaggagattgaggaagctcctgacatccgcaagatcgtccctgaacttaaatcaaaagtgctcgccgacgtggctatcatcttttctgggttgcaccccacaaacttccccattgaaaagacgagggaacattaccacgccaccgcgctcggcgccaagattctgactcgactcgtccttagccctgatgccccagatcgcgcaacacatctgatcgcagcaagggccggcacagagaaggtgcttcaggcacaggagtgcggacatctgcatgtcgtgaatcctgactggttgtggtcgtgtttggaacggtgggacaaggtggaagagcagctcttcccattgcgggatgaccatacgaaggcccagagagaaaatagtcccgctgctttccctgatcgcgaaggagtcccccccacggctctgttccaccccatgccggtactgccaaaggcccaacctggaccagaagtgagaatttacgattctaatactgggaagctcatccgaactggggctaggggcccgcctgcaccgtcaagctcgctacccatacggcaggagccgtcatctttccgagctgtccccccaccccaacctcagatgtttggggaggagttaccagatgcacaggacggggagcagcctggcccttctcgtcggaaaagacagccgagtatgtcggaaacgatgcctctgtatacactgtgcaaagaggatctggaaagtatggacaaggaggtcgatgacatcctgggtgagggaagcgacgactccgattctgaaaagcggcgccccgaggaacaggaggaggagccgcagccacggaagcctggaactagacgcgaacgtaccctaggcgcacccgctagcagtgaaagatctgcggccggcggaagagggccaagggggcacaagcgcaaactcaatgaggaggacgctgctagtgaaagttctcgagaaagttctaatgaagatgagggttcttctagcgaggcggatgagatggcgaaggctctggaagccgagttgaacgatttgatgtag

SEQ ID NO: 148969 - DNA, 2886 bp, Artificial Sequence
  derived and/or modified sequence
atggaggtgcctgctgctggccgggtgcctgctgagggcgcccccacagctgctgtggccgaggtgcgctgccccggccctgcccccctgcggctgctggagtggagggtggccgccggggctgctgtgagaattggctctgtgctggccgtgtttgaggccgccgccagcgcccagagcagcggggccagccagagccgggtggccagcggcggctgtgtgcggcctgcccggcctgagcggcggctgcggtctgagcgggccggcgtggtgcgggagctgtgtgcccagcccggccaggtggtggcccctggagctgtgctggtgcggctggagggctgcagccaccctgtggtgatgaagggcctgtgtgccgagtgtggccaggacctgacccagctgcagagcaagaatggcaagcagcaggtgcccctgagcacagccaccgtgtccatggtgcacagcgtgcctgagctgatggtgtcctctgagcaggccgagcagctgggccgggaggaccagcagaggctgcacaggaacaggaagctggtgctgatggtggacctggaccagaccctcatccacaccacagagcagcactgccagcagatgagcaacaagggcatcttccacttccagctgggccgcggggagcccatgctgcacacccggctgcggccccactgcaaggacttcctggagaagatcgccaagctgtatgagctgcacgtgttcaccttcggcagccggctgtatgcccacaccatcgccggcttcctggaccctgagaagaagctgttcagccaccgcatcctgagcagagatgagtgcatcgaccccttcagcaagacaggcaacctgaggaacctcttcccctgtggggacagcatggtgtgcatcattgatgacagagaagatgtgtggaagtttgcccccaacctgatcaccgtgaagaagtatgtgtacttccagggcaccggggacatgaatgcccctcctggcagccgggagagccagaccaggaagaaggtgaaccacagccggggcacagaggtgtctgagcccagcccccctgtgcgggaccctgagggcgtgacccaggcccctggggtggagcccagcaatggcctggagaagccagcccgggagctgaatggaagtgaagctgccaccccccgggacagccccaggcctgggaagccagatgagcgggacatctggcccccagcccaggcccccaccagcagccaggagctggccggggcccctgagccccagggcagctgtgcccagggcggccgggtggcccctggccagaggcctgcccagggcgccaccggcacagacctggactttgacctgagcagtgacagcgagagcagcagcgagagcgagggcaccaagagcagcagcagcgccagtgatggagagagcgagggcaagaggggccggcagaagcccaaggccgcccctgagggcgctggggccctggcccagggcagcagcctggagcccggccggcctgctgcccccagcctgcccggggaggccgagcccggggcccacgccccagacaaggagcctgagctgggcggccaggaggagggggagagagatggcctgtgtggcctgggcaatggctgtgccgacaggaaggaggccgagacagagagccagaacagcgagctgagcggcgtgacagctggggagagcctggaccagagcatggaggaggaggaggaggaggacacagatgaagatgaccacctgatctacctggaggagatcctggtgcgggtgcacacagactactatgccaagtatgaccgctacctgaacaaggagattgaggaggccccagacatcaggaagatcgtgcctgagctgaagagcaaggtgctggctgatgtggccatcatcttcagcggcctgcaccccaccaacttccccatcgagaagacccgggagcactaccacgccacagccctgggcgccaagatcctgacccggctggtgctgagcccagatgccccagaccgggccacccacctgattgctgcccgggccggcacagagaaggtgctgcaggcccaggagtgtggccacctgcacgtggtgaacccagactggctgtggagctgcctggagcgctgggacaaggtggaggagcagctgttccccctgagagatgaccacaccaaggcccagcgggagaacagccctgctgccttcccagaccgggagggcgtgcccccaacagccctcttccaccccatgcctgtgctgcccaaggcccagcccggccctgaggtgcgcatctatgacagcaacacaggcaagctgatcagaactggagcccggggccccccagcccccagcagcagcctgcccatccggcaggagcccagcagcttccgggctgtgcccccaccccagccccagatgtttggagaggagctgcctgatgcccaggatggagagcagcccggccccagcaggaggaagaggcagcccagcatgtctgagaccatgcccctgtacaccctgtgcaaggaggacctggagagcatggacaaggaggtggatgacatcctgggggagggcagtgatgacagcgacagcgagaagagaagacctgaggagcaggaggaggagccccagcccaggaagccaggcacccggcgggagaggaccctgggcgccccagccagcagcgagaggtctgctgctgggggccggggcccccggggccacaagaggaagctgaatgaagaagatgctgccagcgagagcagccgggagagcagcaatgaagatgagggcagcagcagcgaggctgatgagatggccaaggccctggaggccgagctgaatgacctgatgtag

SEQ ID NO: 148970 - DNA, 2886 bp, Artificial Sequence
  derived and/or modified sequence
atggaggtgcccgccgccggccgggtgcccgccgagggcgcccccacagcggccgtagcagaggtcagatgtcccggcccagccccactgcggctgctggagtggagggtagctgctggcgcagccgtaagaatcggaagcgttttggcggtgttcgaagccgccgcttccgcccagagtagcggggccagccagagccgcgtcgcatctgggggttgtgtgcggcccgccaggccggagcgcaggctgagatctgaacgggcaggggttgtgagagagctctgcgctcagcctggacaggtggtcgccccgggcgcggtcctggtgcgcctcgagggatgttcacacccggtggtgatgaagggcctgtgcgctgaatgcggccaggatctcactcaactgcagagtaaaaatggcaagcagcaggtgccactatccaccgccaccgtctccatggtgcactctgtgccagagctgatggtatcgtccgagcaggccgagcagttagggcgcgaggaccagcaaagactgcatcggaatcgcaaattagtgttaatggtggatctcgaccagacgctgattcatactacggaacaacactgccagcaaatgagtaataagggaatctttcattttcagctggggcgcggcgagcctatgctgcacacacgcctgagaccacattgtaaagacttcctcgaaaagattgctaaactgtacgagctccatgtgttcacatttggcagcaggctttatgcccatacaattgctggcttcctggatcctgagaagaaactattctcacataggatcttgagtagagacgagtgtatagaccctttctctaagaccggcaacctgcggaacctgttcccttgtggagactcaatggtgtgtatcattgatgatagagaggatgtctggaaattcgccccaaatcttataactgtgaaaaaatacgtgtattttcagggaaccggtgacatgaatgcaccgccaggctctagggagtctcagacaaggaaaaaggtcaatcattccaggggaactgaggttagtgaaccaagcccccctgtcagggaccctgagggggtgacacaggcacccggagtggaacccagcaacggattggaaaagccagcccgagagcttaacggctcagaagcagcaacccctcgtgatagtccccgtcccgggaagccagatgagcgagatatttggcctccagctcaggcccccaccagttcacaggagctggccggggctcctgagcctcagggctcttgcgctcaaggaggcagggtagcgcccggtcaaaggccagcacagggcgccactggaactgacctggattttgatttatccagtgactccgagtcatcatcggaatcggaggggaccaaatcgtcctcatcagcctctgatggtgagtcagaaggaaagagaggccgacagaaacctaaagctgcgcctgagggtgctggcgccttggcccaagggagctccctagagcctgggcggccagctgcgccctccctgcccggcgaagcagaacctggggcgcacgcccccgacaaagagcctgaactgggagggcaagaagagggcgagcgcgacggcctttgtggtctgggcaatggttgcgcagacaggaaggaggccgaaaccgagtctcaaaactctgagctgtctggagtcacggccggagaatctttagaccaatctatggaggaagaagaagaagaggatacagatgaagatgatcacctgatctatctggaagaaattctggttagagtgcacactgactactacgctaaatacgacagatatctgaacaaggagatcgaggaagctcctgatattcggaagattgtcccggagctcaagtctaaggttctcgcagacgtggccataatattcagcggcctgcaccctaccaattttccaatcgaaaaaacaagggagcattaccacgccacagctctaggagctaagatattgactcgactagtgctgagcccagacgcacctgacagagccacccacttaatcgccgcccgggccggaaccgagaaggtacttcaagcacaggagtgcgggcatctgcacgttgtgaatccagattggctatggtcatgcctggaaaggtgggataaggtagaagagcagctgtttccactgcgcgacgaccacaccaaggcgcagagagagaattccccagccgcgttccccgatcgggagggagtgccccctacagcgctgtttcacccaatgccagttctgcccaaggcccaaccaggccccgaggttaggatctatgactctaatacaggcaagctgattaggacgggagcacgcggcccgccagctccctctagctcactgcctattcggcaggaaccatcatcatttagagccgtaccgcctccgcagccccagatgttcggcgaagagctgcctgatgcgcaggatggcgagcagcccggaccttctcgcaggaaacgccagccaagtatgtccgagacaatgccactgtacacgctgtgcaaagaggacctggagtcaatggataaggaagtggacgatatacttggagaggggagcgacgacagtgattctgagaaaaggcgccccgaggaacaagaggaggagccacagcccagaaagcccggtacacgccgtgagaggaccctcggggcacctgcttcctccgagcgctcagccgcaggtgggaggggaccccggggacataagaggaaactgaatgaggaggatgcagccagtgaatcatcccgggaatcttccaatgaggacgagggaagctccagcgaagccgatgagatggctaaagctctggaggctgaattgaacgatctgatgtag

SEQ ID NO: 148971 - DNA, 2886 bp, Artificial Sequence
  derived and/or modified sequence
atggaagtgcccgcagctggtcgcgtgcccgcagagggcgctccaacagccgctgttgcagaggtcagatgccctggtcccgctccactgcgactactggagtggcgcgtcgctgctggagcagctgttcggataggctccgtgctggcagtctttgaagcagcagccagcgcgcagagcagtggagccagccagagccgtgttgccagtgggggttgtgtgagaccagccaggcccgagcgccgtttgcgcagtgaacgcgcaggggtggtacgcgaactgtgtgctcagcctggtcaggtggttgccccaggagccgtgttggtgaggctggagggatgtagccaccctgtcgtgatgaaaggcctgtgcgccgaatgtggccaagaccttacccagctgcaaagtaaaaacggaaaacagcaggtacccctttcaaccgccaccgtttctatggtacacagcgtgccggagctgatggtttcatccgaacaggcagagcagctgggcagagaggaccaacaaaggctgcatagaaatcgtaaattggtactcatggttgatttggaccagactctgattcatacaacagaacaacactgccagcagatgtccaacaagggaattttccattttcagctcggtagaggcgagccaatgctccacacaaggttgcgccctcactgcaaggacttcctcgagaagattgctaaactgtatgaacttcacgtgtttactttcggctctaggttgtacgcgcacaccatcgctgggtttctcgacccggagaagaagctgttttctcacaggattctgtctcgggatgagtgtatagacccattctccaagacaggcaacttgcggaatctattcccttgcggcgattccatggtgtgcataattgatgatcgcgaggacgtgtggaagtttgctccaaatctaatcacagtgaagaaatacgtgtactttcagggcacaggtgatatgaacgccccacctgggtcacgagagtcacagacccgaaagaaggtgaaccattcacgcggaaccgaggtgtccgaacccagccccccagttcgcgatccagaaggcgtgactcaggctccaggggttgaaccctcaaacggactggaaaaacctgcccgagagctgaacggcagcgaagccgctacccctagggacagccccagacccggtaagccagatgagcgggatatatggccacccgcacaagcgcctacttcaagccaggaacttgccggtgctcccgagccacaaggcagctgtgcccaagggggacgagtggctccaggacagcgtccagcccagggggcaacgggaactgaccttgattttgacttgtcttctgattccgaatcttcaagcgagtccgaaggaaccaagagctcctcctcggcctcagatggggagagcgaaggcaagcgcggacggcagaagcccaaagctgcccctgaaggcgctggagccctggcacagggctccagtcttgagcccggtcgtcccgcagccccttccttgcctggtgaggcggagccaggagcacacgccccagacaaagagcctgaattaggcggtcaggaggagggcgagcgggacgggttgtgcggcctgggcaatggttgtgccgacaggaaagaagccgagacggagtcgcagaacagtgagctgtcaggcgtaactgccggagagtcccttgaccagagcatggaggaagaggaggaggaggatacagacgaagacgatcatctgatttatctcgaagaaattcttgtcagagtgcataccgactactatgcaaagtatgaccggtaccttaacaaagagatcgaggaagcacccgatatccgaaagattgtacctgaactgaaaagtaaggttctggctgatgtcgctataatctttagtggactgcacccgacaaacttccctattgaaaagacaagagagcactatcatgcaaccgccctgggagcaaaaatccttacacgcctagtgctgtcaccagatgcccctgatagagctacacatctgatcgcggctcgggcaggaacagagaaggtactgcaggcacaggagtgtggacaccttcatgtggtgaatcctgattggctgtggagctgtcttgagcggtgggataaggtagaggaacagttgttcccactcagagatgatcatacaaaggctcagagggagaacagtcctgccgcatttccagaccgcgagggggtgcctcctacagcattgtttcatccaatgccggtactacccaaagcgcaaccaggaccggaggtccggatctatgattcaaatacaggcaagctcattaggaccggcgctagaggcccaccagcaccatctagctcactgccaattagacaggagccaagcagcttccgggcagttccacccccacagccacagatgttcggagaggaactgcctgatgctcaggacggcgagcaaccaggccctagtcggaggaagagacaaccctccatgagcgagactatgcctctttataccctctgcaaggaggatctggaatcaatggataaggaggtggatgatatcctgggtgaaggcagcgatgactctgatagcgaaaaaaggcgccctgaagaacaagaggaagagccccagccacgtaaacctgggactaggagagagcgcaccctgggcgctcccgcttctagtgaacgctctgctgccggtggccgaggccctcgaggccataaacgaaaactgaacgaggaggatgctgcttccgaaagttcaagagagagctcaaatgaggacgaaggaagcagcagtgaggccgatgagatggctaaggccttggaggccgagttgaatgacctgatgtag

SEQ ID NO: 148972 - DNA, 3753 bp, Artificial Sequence
  derived and/or modified sequence
ggaagtcggcgcgggctaggcgacgggtggaagccggtaccgagaggaactacagcgtcgccgcctgggttgtgtcgccgcggtaggcgctgcgctctgagcgcagcgcaggccccgtaccgaccgcccgcccgccctctgtccgcgatggaggtgccggccgcgggtcgcgttcctgccgagggcgccccgacggcggctgtggccgaggtgcgctgcccggggcccgcgccgctgcgcctgctggagtggagggtggcggcgggcgcggccgtgcgcatcggctcggtgctggccgtgttcgaggccgccgcctccgcgcagtcctccggggcctctcagtcccgtgtagcctccgggggctgcgtgcgccccgcgcggccggaacgcaggctgaggtcggagcgcgcgggcgtggtgcgggagctgtgcgcgcagccgggccaggtggtcgccccaggagcggttctggtgaggttggaaggatgcagccacccggttgtcatgaaaggcctgtgtgctgaatgtggccaagacctcacccagttgcagagtaagaacgggaagcagcaggtgccgctgtccacggcgaccgtgtccatggtgcacagcgtgccggagttgatggtgagctccgagcaagctgaacagctgggaagagaagaccagcagcgactgcaccgaaaccggaagctggtgctcatggtggacttggaccagacgttgattcacacaaccgagcagcactgtcagcagatgtcgaataaaggcatctttcacttccagctgggccggggtgagcccatgctgcacacgcgcctgcgtccacactgcaaggacttcctggagaagatcgccaagctgtacgagctgcacgtcttcaccttcggcagccggctgtacgcacacaccatcgcaggctttttagaccccgagaagaagcttttttctcaccgaatattatcaagggatgaatgtattgacccattttctaaaacgggaaaccttagaaatctctttccttgtggagactcaatggtttgcattattgatgatcgagaagatgtctggaagtttgcccccaatctgataactgtgaagaaatatgtatacttccagggcacgggtgatatgaatgcgccccctgggtcccgagaatctcagacgagaaagaaagtaaatcattctcgaggcactgaggtctcagagccatctccgcccgtgagagaccctgagggggtaacgcaggcccctggagtggagcccagcaatggcctggagaagcctgcacgggagctgaacggcagcgaggccgccaccccgcgggactcaccccgccccgggaagccagacgagagggacatctggccccctgcccaggcccccaccagcagccaagagctggcaggcgctcctgagccccagggatcctgtgcgcagggtggccgggtggcaccgggacagcggcctgcccagggtgccacgggcactgacctggactttgacttatccagcgacagcgagagcagcagtgagtccgagggcacgaagtcctcctcctccgcctctgatggcgaaagcgaggggaaaagaggccggcagaagccgaaggctgccccagagggagccggggcgctggcacagggcagttccctggagccggggcggcctgcagcaccgagtctccccggagaggccgagcctggcgcgcatgccccggacaaggagcctgagctgggtgggcaggaggagggcgagcgggatggcctctgcggcctgggcaacggctgtgccgacaggaaggaggcggagaccgagtcacagaacagcgagctgtcgggggtcactgcgggtgagtccctggaccagagcatggaggaggaggaggaggaggacacggatgaggatgaccacctcatctacctggaggagatcctggtccgtgtacacactgactactatgccaagtatgaccgctacctcaacaaggagatcgaggaggcgccggacatccgcaagatcgtgccggagctcaagagcaaggtgctggcagacgtggccataattttcagtgggctacacccgacaaacttcccgatagagaagacgcgggagcattaccacgccacggcgctgggagcgaagatcctcactcggctggtgctgagccccgacgcccctgacagggccacgcacctgatcgccgcgcgagctggcacagagaaggtgctgcaggcacaggagtgcggacacctgcacgtggtcaaccctgactggctgtggagctgcctggagcgctgggacaaggtggaggagcagctcttcccgctcagggacgatcacaccaaggcacagagggagaacagccctgcggcctttcccgaccgggagggtgtgccccccaccgccttgttccacccgatgccggttcttcccaaggcccagcctggccccgaggttcggatctacgactccaacacggggaagctcatcaggacgggcgcccgggggcccccagcaccctccagctccctacccatccgccaggagccctcttccttcagagcggttccgccaccccagccgcagatgtttggtgaagagctgcctgacgctcaggacggagagcagcctggcccttctagaagaaagcgacagcccagtatgtctgagacaatgccgctgtacactctttgtaaggaggatttagagagtatggacaaagaggtggacgacatccttggagaaggcagcgacgacagcgacagcgagaagaggaggcctgaggagcaggaggaggagccccagccccggaagccagggacccgcagggagcggacgctcggggcacctgcgtccagcgagaggagcgcggcagggggccgggggcccagaggccacaagaggaagctgaatgaagaggacgccgccagcgagtccagcagggagtccagcaacgaggatgagggcagcagctccgaggccgacgagatggccaaggcgctggaggcggagctcaacgacctcatgtgagcgcgggcagcgggcagggactgaagcctgaccgacctccagcagcactcggacgtccccggaccagccctcagtctcggtccacgctgctttcttcccaaaggacatgtatatttgcagagctccacatacagaaacacattattttgcagaaataggtgtttttaagaagttttactacaggaatgtctacttttgtaagtgacaggtgttaaaggcccaggtgtgctgtgccaaagagctcagcagaggctcacgtggcccaggctggtgcgcccgctgtctcggtaaggggcgggttggtgtgttttccccttgtgtaccagagcacattccttaggggacggctttgggggtcccacgagacatggactaggagtttaagcaggacagtgtgcgtgcacgagctccgagcccagcacagacatgcctggaacccccgccgcctgctgctccctcctagggaacccatttccggggaacgccgtgactgtcgggcagcctggagcttcctgcagcctcctacgcagggtccacgccacgtggcctgggctgccatcctgccgtcctcccactggcatcctggcaagggggcgttgcttttcctgggcggccttttatgtcttggagacacctgatgtaaagtttctgtaaatctatttcatatctgacccaccaaacagatttctctttaataaaaatcctttttgtaagttctct

SEQ ID NO: 148973 - DNA, 2886 bp, Artificial Sequence
  derived and/or modified sequence
atggaggtgcccgccgccggcagagtgcccgccgagggcgcccccaccgccgccgtggccgaggtgagatgccccggccccgcccccctgagactgctggagtggagagtggccgccggcgccgccgtgagaatcggcagcgtgctggccgtgttcgaggccgccgccagcgcccagagcagcggcgccagccagagcagagtggccagcggcggctgcgtgagacccgccagacccgagagaagactgagaagcgagagagccggcgtggtgagagagctgtgcgcccagcccggccaggtggtggcccccggcgccgtgctggtgagactggagggctgcagccaccccgtggtgatgaagggcctgtgcgccgagtgcggccaggacctgacccagctgcagagcaagaacggcaagcagcaggtgcccctgagcaccgccaccgtgagcatggtgcacagcgtgcccgagctgatggtgagcagcgagcaggccgagcagctgggcagagaggaccagcagagactgcacagaaacagaaagctggtgctgatggtggacctggaccagaccctgatccacaccaccgagcagcactgccagcagatgagcaacaagggcatcttccacttccagctgggcagaggcgagcccatgctgcacaccagactgagaccccactgcaaggacttcctggagaagatcgccaagctgtacgagctgcacgtgttcaccttcggcagcagactgtacgcccacaccatcgccggcttcctggaccccgagaagaagctgttcagccacagaatcctgagcagagacgagtgcatcgaccccttcagcaagaccggcaacctgagaaacctgttcccctgcggcgacagcatggtgtgcatcatcgacgacagagaggacgtgtggaagttcgcccccaacctgatcaccgtgaagaagtacgtgtacttccagggcaccggcgacatgaacgccccccccggcagcagagagagccagaccagaaagaaggtgaaccacagcagaggcaccgaggtgagcgagcccagcccccccgtgagagaccccgagggcgtgacccaggcccccggcgtggagcccagcaacggcctggagaagcccgccagagagctgaacggcagcgaggccgccacccccagagacagccccagacccggcaagcccgacgagagagacatctggccccccgcccaggcccccaccagcagccaggagctggccggcgcccccgagccccagggcagctgcgcccagggcggcagagtggcccccggccagagacccgcccagggcgccaccggcaccgacctggacttcgacctgagcagcgacagcgagagcagcagcgagagcgagggcaccaagagcagcagcagcgccagcgacggcgagagcgagggcaagagaggcagacagaagcccaaggccgcccccgagggcgccggcgccctggcccagggcagcagcctggagcccggcagacccgccgcccccagcctgcccggcgaggccgagcccggcgcccacgcccccgacaaggagcccgagctgggcggccaggaggagggcgagagagacggcctgtgcggcctgggcaacggctgcgccgacagaaaggaggccgagaccgagagccagaacagcgagctgagcggcgtgaccgccggcgagagcctggaccagagcatggaggaggaggaggaggaggacaccgacgaggacgaccacctgatctacctggaggagatcctggtgagagtgcacaccgactactacgccaagtacgacagatacctgaacaaggagatcgaggaggcccccgacatcagaaagatcgtgcccgagctgaagagcaaggtgctggccgacgtggccatcatcttcagcggcctgcaccccaccaacttccccatcgagaagaccagagagcactaccacgccaccgccctgggcgccaagatcctgaccagactggtgctgagccccgacgcccccgacagagccacccacctgatcgccgccagagccggcaccgagaaggtgctgcaggcccaggagtgcggccacctgcacgtggtgaaccccgactggctgtggagctgcctggagagatgggacaaggtggaggagcagctgttccccctgagagacgaccacaccaaggcccagagagagaacagccccgccgccttccccgacagagagggcgtgccccccaccgccctgttccaccccatgcccgtgctgcccaaggcccagcccggccccgaggtgagaatctacgacagcaacaccggcaagctgatcagaaccggcgccagaggcccccccgcccccagcagcagcctgcccatcagacaggagcccagcagcttcagagccgtgccccccccccagccccagatgttcggcgaggagctgcccgacgcccaggacggcgagcagcccggccccagcagaagaaagagacagcccagcatgagcgagaccatgcccctgtacaccctgtgcaaggaggacctggagagcatggacaaggaggtggacgacatcctgggcgagggcagcgacgacagcgacagcgagaagagaagacccgaggagcaggaggaggagccccagcccagaaagcccggcaccagaagagagagaaccctgggcgcccccgccagcagcgagagaagcgccgccggcggcagaggccccagaggccacaagagaaagctgaacgaggaggacgccgccagcgagagcagcagagagagcagcaacgaggacgagggcagcagcagcgaggccgacgagatggccaaggccctggaggccgagctgaacgacctgatgtag

SEQ ID NO: 148974 - protein, 785 aa, Artificial Sequence
  derived and/or modified sequence
MPKGRQKVPHLDAPLGLPTCLWLELAGLFLLVPWVMGLAGTGGPDGQGTGGPSWAVHLESLEGDGEEETLEQQADALAQAAGLVNAGRIGELQGHYLFVQPAGHRPALEVEAIRQQVEAVLAGHEAVRWHSEQRLLRRAKRSVHFNDPKYPQQWHLNNRRSPGRDINVTGVWERNVTGRGVTVVVVDDGVEHTIQDIAPNYSPEGSYDLNSNDPDPMPHPDVENGNHHGTRCAGEIAAVPNNSFCAVGVAYGSRIAGIRVLDGPLTDSMEAVAFNKHYQINDIYSCSWGPDDDGKTVDGPHQLGKAALQHGVIAGRQGFGSIFVVASGNGGQHNDNCNYDGYANSIYTVTIGAVDEEGRMPFYAEECASMLAVTFSGGDKMLRSIVTTDWDLQKGTGCTEGHTGTSAAAPLAAGMIALMLQVRPCLTWRDVQHIIVFTATRYEDRRAEWVTNEAGFSHSHQHGFGLLNAWRLVNAAKIWTSVPYLASYVSPVLKENKAIPQSPRSLEVLWNVSRMDLEMSGLKTLEHVAVTVSITHPRRGSLELKLFCPSGMMSLIGAPRSMDSDPNGFNDWTFSTVRCWGERARGTYRLVIRDVGDESFQVGILRQWQLTLYGSVWSAVDIRDRQRLLESAMSGKYLHDDFALPCPPGLKIPEEDGYTITPNTLKTLVLVGCFTVFWTVYYMLEVYLSQRNVASNQVCRSGPCHWPHRSRKAKEEGTELESVPLCSSKDPDEVETESRGPPTTSDLLAPDLLEQGDWSLSQNKSALDCPHQHLDVPHGKEEQIC

SEQ ID NO: 148975 - protein, 113 aa, Artificial Sequence
  derived and/or modified sequence
MPKGRQKVPHLDAPLGLPTCLWLELAGLFLLVPWVMGLAGTGGPDGQGTGGPSWAVHLESLEGDGEEETLEQQADALAQAAGLVNAGRIGELQGHYLFVQPAGHRPALEVEAI

SEQ ID NO: 148976 - DNA, 2358 bp, Artificial Sequence
  derived and/or modified sequence
atgcccaagggcagacagaaggtgccccacctggacgcccccctgggcctgcccacctgcctgtggctggagctggccggcctgttcctgctggtgccctgggtgatgggcctggccggcaccggcggccccgacggccagggcaccggcggccccagctgggccgtgcacctggagagcctggagggcgacggcgaggaggagaccctggagcagcaggccgacgccctggcccaggccgccggcctggtgaacgccggcagaatcggcgagctgcagggccactacctgttcgtgcagcccgccggccacagacccgccctggaggtggaggccatcagacagcaggtggaggccgtgctggccggccacgaggccgtgagatggcacagcgagcagagactgctgagaagagccaagagaagcgtgcacttcaacgaccccaagtacccccagcagtggcacctgaacaacagaagaagccccggcagagacatcaacgtgaccggcgtgtgggagagaaacgtgaccggcagaggcgtgaccgtggtggtggtggacgacggcgtggagcacaccatccaggacatcgcccccaactacagccccgagggcagctacgacctgaacagcaacgaccccgaccccatgccccaccccgacgtggagaacggcaaccaccacggcaccagatgcgccggcgagatcgccgccgtgcccaacaacagcttctgcgccgtgggcgtggcctacggcagcagaatcgccggcatcagagtgctggacggccccctgaccgacagcatggaggccgtggccttcaacaagcactaccagatcaacgacatctacagctgcagctggggccccgacgacgacggcaagaccgtggacggcccccaccagctgggcaaggccgccctgcagcacggcgtgatcgccggcagacagggcttcggcagcatcttcgtggtggccagcggcaacggcggccagcacaacgacaactgcaactacgacggctacgccaacagcatctacaccgtgaccatcggcgccgtggacgaggagggcagaatgcccttctacgccgaggagtgcgccagcatgctggccgtgaccttcagcggcggcgacaagatgctgagaagcatcgtgaccaccgactgggacctgcagaagggcaccggctgcaccgagggccacaccggcaccagcgccgccgcccccctggccgccggcatgatcgccctgatgctgcaggtgagaccctgcctgacctggagagacgtgcagcacatcatcgtgttcaccgccaccagatacgaggacagaagagccgagtgggtgaccaacgaggccggcttcagccacagccaccagcacggcttcggcctgctgaacgcctggagactggtgaacgccgccaagatctggaccagcgtgccctacctggccagctacgtgagccccgtgctgaaggagaacaaggccatcccccagagccccagaagcctggaggtgctgtggaacgtgagcagaatggacctggagatgagcggcctgaagaccctggagcacgtggccgtgaccgtgagcatcacccaccccagaagaggcagcctggagctgaagctgttctgccccagcggcatgatgagcctgatcggcgcccccagaagcatggacagcgaccccaacggcttcaacgactggaccttcagcaccgtgagatgctggggcgagagagccagaggcacctacagactggtgatcagagacgtgggcgacgagagcttccaggtgggcatcctgagacagtggcagctgaccctgtacggcagcgtgtggagcgccgtggacatcagagacagacagagactgctggagagcgccatgagcggcaagtacctgcacgacgacttcgccctgccctgcccccccggcctgaagatccccgaggaggacggctacaccatcacccccaacaccctgaagaccctggtgctggtgggctgcttcaccgtgttctggaccgtgtactacatgctggaggtgtacctgagccagagaaacgtggccagcaaccaggtgtgcagaagcggcccctgccactggccccacagaagcagaaaggccaaggaggagggcaccgagctggagagcgtgcccctgtgcagcagcaaggaccccgacgaggtggagaccgagagcagaggcccccccaccaccagcgacctgctggcccccgacctgctggagcagggcgactggagcctgagccagaacaagagcgccctggactgcccccaccagcacctggacgtgccccacggcaaggaggagcagatctgctag

SEQ ID NO: 148977 - DNA, 1776 bp, Artificial Sequence
  derived and/or modified sequence
atgcccaagggcagacagaaggtgccccacctggacgcccccctgggcctgcccacctgcctgtggctggagctggccggcctgttcctgctggtgccctgggtgatgggcctggccggcaccggcggccccgacggccagggcaccggcggccccagctgggccgtgcacctggagagcctggagggcgacggcgaggaggagaccctggagcagcaggccgacgccctggcccaggccgccggcctggtgaacgccggcagaatcggcgagctgcagggccactacctgttcgtgcagcccgccggccacagacccgccctggaggtggaggccatcagacagcaggtggaggccgtgctggccggccacgaggccgtgagatggcacagcgagcagagactgctgagaagagccaagagaagcgtgcacttcaacgaccccaagtacccccagcagtggcacctgaacaacagaagaagccccggcagagacatcaacgtgaccggcgtgtgggagagaaacgtgaccggcagaggcgtgaccgtggtggtggtggacgacggcgtggagcacaccatccaggacatcgcccccaactacagccccgagggcagctacgacctgaacagcaacgaccccgaccccatgccccaccccgacgtggagaacggcaaccaccacggcaccagatgcgccggcgagatcgccgccgtgcccaacaacagcttctgcgccgtgggcgtggcctacggcagcagaatcgccggcatcagagtgctggacggccccctgaccgacagcatggaggccgtggccttcaacaagcactaccagatcaacgacatctacagctgcagctggggccccgacgacgacggcaagaccgtggacggcccccaccagctgggcaaggccgccctgcagcacggcgtgatcgccggcagacagggcttcggcagcatcttcgtggtggccagcggcaacggcggccagcacaacgacaactgcaactacgacggctacgccaacagcatctacaccgtgaccatcggcgccgtggacgaggagggcagaatgcccttctacgccgaggagtgcgccagcatgctggccgtgaccttcagcggcggcgacaagatgctgagaagcatcgtgaccaccgactgggacctgcagaagggcaccggctgcaccgagggccacaccggcaccagcgccgccgcccccctggccgccggcatgatcgccctgatgctgcaggtgagaccctgcctgacctggagagacgtgcagcacatcatcgtgttcaccgccaccagatacgaggacagaagagccgagtgggtgaccaacgaggccggcttcagccacagccaccagcacggcttcggcctgctgaacgcctggagactggtgaacgccgccaagatctggaccagcgtgccctacctggccagctacgtgagccccgtgctgaaggagaacaaggccatcccccagagccccagaagcctggaggtgctgtggaacgtgagcagaatggacctggagatgagcggcctgaagaccctggagcacgtggccgtgaccgtgagcatcacccaccccagaagaggcagcctggagctgaagctgttctgccccagcggcatgatgagcctgatcggcgcccccagaagcatggacagctggctgtgcgtggagtgcagcagacaccagggccagaccaaggccgtgagagagtgccacgagtggaagatccccgccagatag

SEQ ID NO: 148978 - DNA, 2358 bp, Artificial Sequence
  derived and/or modified sequence
atgcccaaaggtcggcagaaggttccccatctcgatgcccctctcggcctgccaacatgtctctggctggaactggccgggctttttcttctggtgccatgggttatgggcctggccggcacaggcggccccgatggacagggcactggcggtccgtcttgggccgttcacttggagagcctggagggagatggggaagaagagaccttagaacagcaggctgatgcccttgcccaggcagctggattggttaacgccggtcgtattggggaactgcagggccattatctattcgtccaaccagcaggtcacagacccgctctcgaggtagaggctattcggcagcaggtcgaggccgtccttgctggccatgaggcagttaggtggcactcagagcaacgtctcctaagacgggccaaacggagcgtgcatttcaacgatcccaagtacccgcagcaatggcatctgaataatcgtcggagccccggtcgcgatattaatgtaacaggcgtgtgggaacggaacgtgaccgggcgaggcgtaacagtcgttgtggtggatgacggcgttgaacataccatacaggacatagcgcctaattattctccggaaggcagctatgacctgaattcaaatgacccggacccaatgccacatccagatgtggaaaacgggaaccatcatgggacaaggtgtgctggtgaaatcgccgccgttccgaacaacagcttttgcgctgtgggagtggcctatggatccagaatcgcagggattagggtgctggacggcccactcacggatagcatggaagccgtggctttcaataaacactaccagattaacgatatttacagctgctcttggggacccgatgatgacggaaaaaccgtggacggacctcaccagctcggcaaagccgcactgcagcacggcgttattgctgggcggcaagggtttggatcaattttcgtggtggccagcggtaacggtggtcagcacaacgataactgcaattacgatggctatgctaactctatttataccgtgactattggtgccgtggatgaagagggccggatgccattctacgccgaggagtgcgctagtatgttggccgtgacttttagcggcggagacaaaatgcttaggtcaattgtaacaacggactgggatctgcaaaagggcactgggtgcaccgagggacacaccggtacctctgccgcagcaccactggcagccggcatgattgctttgatgttgcaggtcagaccatgtctgacttggagggatgtgcagcatataatcgtgttcaccgctacccgttatgaggatcgccgggccgaatgggtgacaaacgaagcaggattctctcacagccaccagcacggctttggactgctgaacgcgtggcgcctggtgaacgccgccaagatctggacaagcgtgccatacttggcctcatacgtgagtccagtcctgaaggagaacaaagccatcccccaatcaccacggtctctggaggtgctgtggaatgtatctcgtatggaccttgaaatgtcaggattgaaaacactagagcacgtggcagtcaccgtctccattacccatccaaggaggggaagcctcgaactgaagctcttttgccctagcggtatgatgagcctcatcggggccccgcgctccatggactctgatcccaacggattcaacgattggacattttcaacagtacgatgctggggagagcgagcgaggggcacctaccgcctggttattcgggacgtgggggatgaatcttttcaggttggtatcctccgacagtggcagctgactctttatggttccgtttggagcgccgtggacatacgggaccgtcagcggctccttgaatcagccatgtctggtaaataccttcacgatgatttcgctctgccgtgcccccctggccttaagatcccggaggaggacgggtatacgatcaccccaaacaccctgaaaacactcgttctcgtgggatgctttacagtcttctggaccgtctactatatgctggaagtgtacctgagccaaagaaatgtggcaagtaaccaggtttgcagatccggcccctgccattggccacatcgcagcaggaaagcaaaggaagaagggaccgaactggaatcagtcccactgtgtagctccaaggatcctgacgaagtcgagactgagagcaggggccccccaaccacgagcgacctgctggcccccgacctacttgagcaaggcgattggtcactctctcagaacaagtctgcattggactgcccacaccagcacctcgatgtgccccacggaaaagaagaacagatctgctag

SEQ ID NO: 148979 - DNA, 1776 bp, Artificial Sequence
  derived and/or modified sequence
atgccgaagggcagacaaaaggtcccacaccttgatgctcccctcggcttgccgacatgcttgtggctcgagctggctggactctttctgttagtgccctgggtgatgggactagccggaaccggtggaccagatggacaggggaccggagggccatcttgggctgtgcacttggagagtctggagggggacggtgaagaagagaccctggaacagcaggccgatgccctggcccaagctgccggcctggttaatgccggccggatcggggagctgcagggccactatctgttcgttcagcctgccggccacaggcctgctttagaagtcgaagccatcaggcaacaggtggaggctgtactggcgggccacgaggctgtgcgatggcactctgaacagcgattgctgcgtagggccaaaaggtcagttcactttaatgatcccaagtatccccagcagtggcaccttaataacagaaggagccctgggcgggatatcaatgttaccggagtgtgggagcgtaatgttacagggagaggcgttacagtcgttgttgtggacgatggggttgagcataccatccaggacattgcaccaaactattcccctgaaggaagttatgacttgaactctaacgatccagacccgatgccccacccagacgttgagaatgggaatcatcacgggacgaggtgtgccggagagatagccgccgtaccgaacaacagcttctgcgccgtgggcgtggcgtacgggagccgtatagctggcatcagggtactggacggcccacttacagacagcatggaggcggttgcgtttaacaaacactaccagataaacgacatctattcttgctcctgggggcctgacgacgacggaaagactgtagacggtcctcaccagctagggaaggccgcccttcaacacggagttattgccggcagacagggttttgggtccattttcgtagtcgcctctggtaacggcggacagcataacgacaattgtaactacgatggatacgcaaactcaatctataccgttactatcggtgccgttgatgaggagggtcgtatgccattttatgccgaggagtgtgcatccatgctagcggtgacttttagcggcggtgacaagatgctacgaagtattgttactacagattgggacctccagaagggtactggctgtacagaagggcataccggaacttcagccgccgcccctttggcagctggtatgatcgccctcatgcttcaagtgagaccctgtctgacctggcgtgacgtccagcacatcattgtattcactgccacccgctacgaagatcggcgcgccgagtgggtgacgaatgaagctgggttcagccatagtcatcagcacggcttcggcctcctgaatgcgtggagactcgttaatgctgccaagatctggacttctgttccttatctggcctcctatgtgtcccctgtgctgaaggagaacaaagccatcccacagtcgcctcgcagtctggaagtgttgtggaatgtatcgcggatggacctggaaatgagcggcctgaaaacactcgaacacgtggccgtgactgttagtattacacaccctagacgaggaagcctggagctgaagctattctgtccatctgggatgatgtcgttgattggagcgccccggagtatggacagctggctgtgtgtggagtgtagccgccatcaaggacagacaaaagccgttagggagtgtcacgagtggaagataccagcgagatag

SEQ ID NO: 148980 - DNA, 2358 bp, Artificial Sequence
  derived and/or modified sequence
atgcccaagggccggcagaaggtgccccacctggatgcccccctgggcctgcccacctgcctgtggctggagctggccggcctcttcctgctggtgccctgggtgatgggcctggccggcactggaggcccagatggccagggcactggaggccccagctgggccgtgcacctggagagcctggagggagatggagaggaggagaccctggagcagcaggctgatgccctggcccaggccgccggcctggtgaatgccggcagaattggagagctgcagggccactacctgtttgtgcagcctgctggccacaggcctgccctggaggtggaggccatccggcagcaggtggaggccgtgctggccggccacgaggccgtgcgctggcacagcgagcagaggctgctgcggcgggccaagaggtctgtgcacttcaatgaccccaagtacccccagcagtggcacctgaacaacagaagaagccctggccgggacatcaacgtgactggagtgtgggagagaaatgtgacaggccggggcgtgacagtggtggtggtggatgatggagtggagcacaccatccaggacatcgcccccaactacagccctgagggcagctatgacctgaacagcaatgaccctgaccccatgccccacccagatgtggagaatggaaaccaccacggcacccgctgtgccggggagattgctgctgtgcccaacaacagcttctgtgctgtgggcgtggcctacggcagcagaattgctggcatccgggtgctggatggccccctgacagacagcatggaggccgtggccttcaacaagcactaccagatcaatgacatctacagctgctcctggggcccagatgatgatggcaagacagtggatggcccccaccagctgggcaaggccgccctgcagcacggcgtgattgctggccggcagggcttcggcagcatctttgtggtggccagcggaaatggaggccagcacaatgacaactgcaactatgatggctacgccaacagcatctacacagtgaccatcggggctgtggatgaggagggccgcatgcccttctacgccgaggagtgtgcctccatgctggccgtgaccttcagcggcggggacaagatgctgcggagcatcgtgaccacagactgggacctgcagaagggcaccggctgcacagagggccacacaggcaccagcgctgctgcccccctggccgccggcatgattgccctgatgctgcaggtgcggccctgcctgacctggagagatgtgcagcacatcatcgtgttcaccgccaccaggtatgaagatagaagagctgagtgggtgaccaatgaggccggcttcagccacagccaccagcacggcttcggcctgctgaatgcctggaggctggtgaatgctgccaagatctggacctctgtgccctacctggccagctatgtgtcccctgtgctgaaggagaacaaggccatcccccagagccccaggagcctggaggtgctgtggaatgtgtccaggatggacctggagatgagcggcctgaagaccctggagcacgtggccgtgacagtgtccatcacccacccccggcggggcagcctggagctgaagctgttctgccccagcggcatgatgagcctcatcggggcccccaggtccatggacagcgaccccaacggcttcaatgactggaccttcagcacagtgcgctgctggggcgagcgggcccggggcacctaccgcctggtgatcagagatgtgggagatgagagcttccaggtgggcatcctgcggcagtggcagctgaccctgtatggctctgtgtggagcgctgtggacatccgggaccggcagaggctgctggagagcgccatgtctgggaagtacctgcatgatgactttgccctgccctgccccccaggcctgaagatcccagaagaagatggctacaccatcacccccaacaccctgaagaccctggtgctggtgggctgcttcaccgtcttctggacagtgtactacatgctggaggtgtacctgagccagagaaatgtggccagcaaccaggtgtgccgcagcggcccctgccactggccccacaggagcaggaaggccaaggaggagggcacagagctggagagcgtgcccctgtgcagcagcaaggaccctgatgaggtggagacagagagccggggcccccccaccaccagtgacctgctggccccagacctgctggagcagggcgactggagcctgagccagaacaagagcgccctggactgcccccaccagcacctggatgtgccccacggcaaggaggagcagatctgctag

SEQ ID NO: 148981 - DNA, 1776 bp, Artificial Sequence
  derived and/or modified sequence
atgcccaagggccggcagaaggtgccccacctggatgcccccctgggcctgcccacctgcctgtggctggagctggccggcctcttcctgctggtgccctgggtgatgggcctggccggcactggaggcccagatggccagggcactggaggccccagctgggccgtgcacctggagagcctggagggagatggagaggaggagaccctggagcagcaggctgatgccctggcccaggccgccggcctggtgaatgccggcagaattggagagctgcagggccactacctgtttgtgcagcctgctggccacaggcctgccctggaggtggaggccatccggcagcaggtggaggccgtgctggccggccacgaggccgtgcgctggcacagcgagcagaggctgctgcggcgggccaagaggtctgtgcacttcaatgaccccaagtacccccagcagtggcacctgaacaacagaagaagccctggccgggacatcaacgtgactggagtgtgggagagaaatgtgacaggccggggcgtgacagtggtggtggtggatgatggagtggagcacaccatccaggacatcgcccccaactacagccctgagggcagctatgacctgaacagcaatgaccctgaccccatgccccacccagatgtggagaatggaaaccaccacggcacccgctgtgccggggagattgctgctgtgcccaacaacagcttctgtgctgtgggcgtggcctacggcagcagaattgctggcatccgggtgctggatggccccctgacagacagcatggaggccgtggccttcaacaagcactaccagatcaatgacatctacagctgctcctggggcccagatgatgatggcaagacagtggatggcccccaccagctgggcaaggccgccctgcagcacggcgtgattgctggccggcagggcttcggcagcatctttgtggtggccagcggaaatggaggccagcacaatgacaactgcaactatgatggctacgccaacagcatctacacagtgaccatcggggctgtggatgaggagggccgcatgcccttctacgccgaggagtgtgcctccatgctggccgtgaccttcagcggcggggacaagatgctgcggagcatcgtgaccacagactgggacctgcagaagggcaccggctgcacagagggccacacaggcaccagcgctgctgcccccctggccgccggcatgattgccctgatgctgcaggtgcggccctgcctgacctggagagatgtgcagcacatcatcgtgttcaccgccaccaggtatgaagatagaagagctgagtgggtgaccaatgaggccggcttcagccacagccaccagcacggcttcggcctgctgaatgcctggaggctggtgaatgctgccaagatctggacctctgtgccctacctggccagctatgtgtcccctgtgctgaaggagaacaaggccatcccccagagccccaggagcctggaggtgctgtggaatgtgtccaggatggacctggagatgagcggcctgaagaccctggagcacgtggccgtgacagtgtccatcacccacccccggcggggcagcctggagctgaagctgttctgccccagcggcatgatgagcctcatcggggcccccaggtccatggacagctggctgtgtgtggagtgcagccgccaccagggccagaccaaggctgtgcgggagtgccacgagtggaagatcccagccaggtag

SEQ ID NO: 148982 - DNA, 2358 bp, Artificial Sequence
  derived and/or modified sequence
atgcccaagggccggcagaaggtgccccacctggacgcccccctgggcttacccacatgtctgtggctggaactggcaggcctgttcctgcttgtaccctgggtgatggggctggctggcacggggggaccagacggacagggcacagggggccctagctgggcggttcacctcgagtccctcgagggagatggggaggaggaaaccctggagcaacaggcagacgctttggctcaggccgctggccttgtaaatgctggcagaattggggaactccagggccactacctgttcgtgcagcccgcagggcacaggcccgctctggaggttgaggctattagacagcaggttgaggccgtgcttgccggccacgaagccgttaggtggcacagcgaacagaggctgctcaggagagccaagcgttctgtgcacttcaatgaccctaagtatccacagcagtggcacctgaacaacagacgaagtccaggtagagacattaatgtgactggggtgtgggaacgtaatgtaacgggaagaggcgtgacagtggtggttgtcgatgacggagtggagcatacgattcaggatatagcccctaattattcccctgagggtagttacgatctgaacagcaatgatccagatccaatgcctcatccagatgtcgaaaacggcaatcaccacggaaccaggtgcgctggcgaaatagcggcagttccaaacaacagtttttgcgccgtgggggttgcttacggctccaggattgcagggatcagagtgctagatggcccactgaccgactcaatggaagccgttgcctttaataagcattatcagatcaacgacatttacagttgcagttggggacccgacgacgacggaaaaactgtggacgggccccatcagctgggcaaagcagcccttcagcacggcgtgattgccggaaggcagggattcggcagtatcttcgttgtcgcttcgggcaacggcggccaacacaatgataactgtaactatgacggctatgctaacagtatctatacagttactatcggggctgttgacgaggagggccggatgcccttctatgctgaggaatgtgcatccatgcttgccgtaaccttcagcggaggtgataaaatgctaagatcgattgttactacagactgggacctacagaagggaaccgggtgtaccgagggccacacgggcaccagcgccgccgcgccgctggctgctgggatgatagcactaatgctgcaggtgcggccttgcctgacctggcgggacgtgcagcatatcatcgtgtttactgctacccggtacgaggacagaagggcagaatgggtgaccaatgaagcagggttttctcattcccatcagcatggctttggcctgttaaacgcttggcggctcgtgaatgccgccaagatttggacgtctgtcccgtacctggcatcatacgtgtcccccgtgcttaaggaaaataaggcaatcccccagagtccccgcagcctggaggtcctttggaatgtgtctcgcatggacttagagatgagcggtttgaagaccctcgagcatgtagcggtgactgtatctataacccatccccggaggggatccttagagctgaaactcttctgtccctcgggaatgatgtccctgattggggcaccccggagcatggactctgatcccaatggctttaacgattggaccttctcaactgtccggtgctggggtgaacgggcccggggcacctatcgccttgttattcgggacgtcggcgatgagagcttccaggtgggcatcctgaggcagtggcagctgaccttatacggaagcgtctggtctgctgtggacatccgggaccgccagagattgctggagagcgccatgtccggcaaatatctgcacgacgacttcgctctgccgtgcccacctggcttaaaaattcctgaggaagacggctacacaattactcctaatacgcttaagacacttgtcctggtgggatgcttcaccgtattttggaccgtgtactacatgcttgaggtgtatctaagccagcggaacgtggcctcaaaccaggtgtgcagaagcggtccatgtcattggccacacaggagtaggaaagccaaggaagaaggtaccgagttggaaagcgtgcccttgtgtagctctaaggatcccgacgaggtggagaccgaaagtagaggtccacctacgacatcagatttactcgctcccgacctgctggagcagggagactggtccctgtcccaaaacaagtccgcattggattgtccacaccaacatctcgatgtgccccacggaaaagaggagcaaatttgttag

SEQ ID NO: 148983 - DNA, 1776 bp, Artificial Sequence
  derived and/or modified sequence
atgcccaagggccggcagaaggtgccccacctggacgcccccctggggctccctacctgcctttggctggagctcgcaggactgttcctcctggtgccctgggttatggggctggctggcactgggggaccagacggacaaggcaccggaggccctagttgggctgtccatcttgaaagtctggaaggggatggggaagaggagacactggagcagcaggcagacgccctcgcacaggctgccggcctggtgaacgctggtcgaatcggggagttacagggtcactatctgtttgtccagcctgcgggccaccggcccgctctggaggtcgaggctatacgccagcaggtggaagccgttctcgctggccatgaggcggttcggtggcacagtgaacaacgccttttgcgacgggctaagaggtcagtacattttaacgatcccaaatatccccagcagtggcacctgaataacagacgctccccaggccgtgacataaatgtcaccggcgtttgggagagaaacgtgacaggaagaggggtaactgtggtggtcgtggacgacggagtggagcacactatccaggatattgcgcctaattacagccccgagggctcctatgacctgaatagcaacgaccctgatcccatgccgcaccctgatgtcgagaatggtaatcaccacgggaccagatgtgccggcgagatcgccgctgtacctaacaactccttttgtgccgttggtgtggcctacgggagtcgcatagcaggaatcagggtgctggacgggccactcactgatagtatggaagccgttgctttcaacaagcactaccagatcaacgacatttacagctgtagctggggcccagacgacgacggcaagaccgtagatgggcctcatcagctagggaaagccgctctgcagcacggtgtgatcgccggtcggcaaggcttcggcagcatcttcgtggtcgctagcggtaacggggggcagcacaatgacaactgtaattacgatgggtatgcaaactcaatttatacagtgacaataggcgccgtggacgaagagggcagaatgccattctacgctgaggagtgtgcttcgatgctggcagtgacatttagcgggggagacaagatgctccgttccattgtgacaactgattgggatcttcagaagggaacaggctgcaccgagggccatacagggacctccgccgccgcgcctctggccgctggaatgatagccctgatgctgcaagtgaggccatgtctcacgtggcgtgatgtccaacacatcatcgtctttactgccactcggtatgaagatcgccgagcagaatgggtgacaaacgaagccggattcagccatagtcaccagcatggctttggtctactgaacgcgtggagactggtgaatgctgctaaaatatggacttcagtgccttacctcgcatcttacgtctctccggtgctaaaagagaacaaagccatccctcaaagtcctcgcagccttgaagtgctttggaatgtgagtcgaatggacctagaaatgtctgggctgaaaactcttgaacacgtggccgtcactgtgagcattacacatcctcggagaggctctctggagctgaaactcttttgcccctctggaatgatgagcctgatcggagccccaaggagcatggactcctggctgtgcgtcgaatgcagcagacatcagggacaaacaaaagccgtccgagaatgccacgaatggaagattcctgcccggtag

SEQ ID NO: 148984 - DNA, 4649 bp, Artificial Sequence
  derived and/or modified sequence
gatgctgcgggagacccctgagatacaagtggactctcccggggcgcggggaagaagggagagccgactgcgagaaggaaggcgacctgggtgggcaggatcccctctgggaagattacagggacagtcggggccatggcggtcagaaggagaagagcaacgagtggcttttaaaggtcggaaccgaaatgccctttacagaggacgccatgaaggagagccttctgaagagggaccatgtggaagatgccccgaggactcggggaggcggagcccgcgggttcagcccccagcgcccgcacggcccctgcctgcgtaggccgcccgcgggagccggaccccgggcgccggttgctgtggcccgcgggggtcgccgggccgcaggcgccgcgctgattggctgcgccgcgggcggaagtgatgctgctgtcactgctcctccggctcccgggaagccgcgagtttccgcagggaggcggcggcagctgcggcggggccggtctgtagcctttgctgagtcaacactactcacagtgaaagtgatgccttttctccatttgcacaacatgagtgtgacgtggttagccagaccaggagctcaacctcatgtagaatccagtccactgctctgatgccgaaggggaggcagaaagtgccacacttggatgcccccctgggcctgcccacctgcctctggctggaattagccgggctcttcttactggttccctgggtcatgggcctggcagggacaggtgggcctgatggccagggcacaggggggccgagctgggctgtgcacctggaaagcctggaaggtgacggggaggaagagactctggagcagcaggcggatgccttggcccaggcagcagggctggtgaatgctggacgcatcggagagcttcaggggcactacctctttgtccagcctgctgggcacaggccggccctggaggtggaggccatccggcagcaggtggaggctgtgttggctgggcatgaagctgtgcgctggcactcagagcagaggctgctaaggcgggccaagcgcagcgtccacttcaacgaccccaagtacccgcagcaatggcacctgaataaccgacggagcccgggcagggacatcaacgtgacgggtgtgtgggaacgcaatgtgactgggcgaggggtgacggtggtggtagtggatgacggagtggaacacaccatccaggacattgcacccaactatagccctgagggtagctatgacctcaactctaatgaccctgaccccatgccccacccggatgtggagaatggcaaccaccatggcacgcgatgtgcaggagagatcgcggctgtgcccaacaacagcttctgtgccgtgggcgtggcctacgggagccgcatcgcaggtatccgggtactggatggacctctcacagacagcatggaggcagtggcgttcaacaagcactatcagatcaatgacatctacagctgcagctggggaccagatgacgatgggaagacagtggatggcccccatcagcttggaaaggctgccttacaacatggggtgattgctggtcgccagggctttgggagcatctttgtggtagccagtggcaacggaggccaacacaacgacaactgcaactacgatggctacgccaactccatctacaccgtcaccataggagctgtggatgaggagggacgcatgcctttctatgcagaagaatgtgcctccatgctggcagtcaccttcagtggtggggacaagatgcttcggagcattgtgaccactgactgggaccttcagaagggcactggctgcactgagggccacacagggacctcagctgcagcgcctctggcagctggcatgatagccttaatgctgcaggtgcggccctgcctcacgtggcgtgacgtccagcacatcattgtcttcacagccacccggtatgaggatcgccgtgcagagtgggtcaccaacgaggcaggcttcagccatagccaccagcacggtttcggcctcctcaacgcctggaggctcgtgaatgcagccaagatctggacatctgtcccttacttagcatcctacgtcagtcccgtgttaaaagaaaacaaggcgattccgcagtccccccgttccctggaggtcctgtggaatgtcagcaggatggacctggagatgtcagggctgaagaccctggagcatgtggcagtgacagtctccatcactcacccacggcgcggcagcttggagctgaagctgttctgccccagtggcatgatgtccctcatcggcgccccccgcagcatggactcggatcccaacggcttcaatgactggaccttctccactgtgcgatgctggggggagagagcccgagggacctacaggcttgtcatcagggatgtcggggatgagtcattccaggtcggcatcctccggcaatggcagctgaccctatatggctctgtgtggagtgcagtagacatcagggacagacaaaggctgttagagagtgccatgagtggaaaatacctgcacgatgacttcgccctgccctgcccaccggggctgaaaattcctgaggaagatggttacaccatcacccccaacaccctcaagaccctggtgctggtaggctgtttcaccgtcttctggactgtttactacatgctggaagtatatttgagccagaggaatgtggcttccaatcaagtttgtaggagtggaccctgccactggccccatcggagccggaaagccaaggaggaagggacagagctagaatcagtgccactttgcagcagcaaggatccagacgaagtggaaacagagagcaggggccctcccaccacctctgacctccttgccccagacctgctggagcaaggggactggagcctgtcccagaacaagagcgccctggactgccctcatcagcacctagacgtaccgcacgggaaggaggagcagatctgctgacctcagggcctgacagtgtgggacaggctcttctttcccaaaattagggagctcttgacagaaagcagttctgatgcttacatctggaatctgaggcatcctctgactccactcaaagagggtgagggccttcttaagatacaaatggtggaggattgctgccagagaagtctggtcagagccacagggtctgcctccagccaaacgggagcttttggtgagaaggtgttggacaggggattggcgcccccctttggtttggcctccatcctcatctctcttgggccaagccagctgcctaggtcccccaagcatgggggaccccttcccacatataagttgagaaggtgcctgccatagccaggagcgcatctcaatggaaacatcactggggtcacttgggaagaggacttcggggtagaggctgggaggagcccctggacatgcctgtcctgaaagcggctgcctccattatccattcccaagatgcctgatcagaaaccaaccatgaatgaacccctggctccttcaccacccccacgattggtatgatgctgccggcacagctgggatacacacggctcccccaggcctgagctgcttcactagggaatcctgcggcaggactgcagagcagatggcagatgcacatgttggaggagagagccttgggagccactgccactccagtcctgccaccaccctgtcttcctctgcaagtgctcagggaaatggccttcccgccggaggccagctatctgcctgacaggctgtgactcttctctcaaccttggccttctcccctcttctgagctagttggttgaattttttttaatgcttaagatttgtttttctcttttcacagcaacattttcttgaatttttttctgcacagcttttccaaaataaaaaccttccaaacaattctgccactcgcaatctctcctttcctctgtctccccaaagccactgcatgctgctgagtggctcctttttcccttcggtccccaagattcactctcctgttctatggcctgtttcctctgaaagaatctgactgtcctggaatcttggcacatgaagggtccttcagaggacggcagccaggaacacatacaagcccgagatgcctgcctgtcccctgcgcagatctgaaaccataacaaaagtgaccagggcaaatcaaactctgccagccaggcctgagaaaagattgattttttttttttttttttgagttccaaccccaaaaatattccaggacaagatagggggcaggctgggctggttcttcttcaatgggcttttgccgccaaggaggacagtggacttggcccacatccaggctacccccagcccgcttctcccctgcttagcccagggaggagacagtagaggtgatgggggcagccgggagggaggggccaaggcagtgatgctttcgggtaagaagttgggctgaggctgggggcacagggaggagctgcccaggtgcagttaccattgctcagtgacagagcctcaaagcttggccagggctgaaggtaccacacgggtgtgggtgaggcaggctaagcgggatggctgcagccaaggagctgggggagggccgggctcagggctagccctctccgctctaactgatgatctgccgaggtc

SEQ ID NO: 148985 - DNA, 3169 bp, Artificial Sequence
  derived and/or modified sequence
atctttgtggtagccagtggcaacggaggccaacacaacgacaactgcaactacgatggctacgccaactccatctacaccgtcaccataggtagtcacccaatgtttctgtgctcctgtgtgtgtgtcaccgaagggttagggcatcacacgtcttgtcctagcttctgtgtgtgtctaaatgtgtgagcacaataatctctttgggctcagataggactagccctgcttgcagaggaccttgggacttcttagatgtcagcataccctgggaacaccttcaagccatcatctggagatcaccgagctgcctccaccccaccacagctggttaggcctctgctctggcctgtctttctgtgggccaccttctgcctgctggaagcctcccctgactccccacaggcctaaattaagtgccctttgcctgtgctcccagttagcatgtgtttatttacttacctgacttctacctgactctaggctcctcgagactaggactgcggccttttccatatggccctgatgcctggcacgggtgtgacccacagtagatgggtaatgaatgttgaaaacagtaagcatgtgaatgaataagtgggtatgaaggtagaaggctgccagttgtaccccagagcctactgaaagaatggtattgcggcacagaatgccctctgccacttgagactgcctgttcagaagaggatcaggactgctctgagggacgtgggccgctcagatcatgtttcaaactcaggacagccccccaggatggtaactccaagataactgacattagcaagcccctgccacaggaccccctctgcatctcagctctaatctccctcctctgtccctaggagctgtggatgaggagggacgcatgcctttctatgcagaagaatgtgcctccatgctggcagtcaccttcagtggtggggacaagatgcttcggagcattgtgaccactgactgggaccttcagaagggcactggctgcactgagggccacacagggacctcagctgcagcgcctctggcagctggcatgatagccttaatgctgcaggtgcggccctgcctcacgtggcgtgacgtccagcacatcattgtcttcacagccacccggtatgaggatcgccgtgcagagtgggtcaccaacgaggcaggcttcagccatagccaccagcacggtttcggcctcctcaacgcctggaggctcgtgaatgcagccaagatctggacatctgtcccttacttagcatcctacgtcagtcccgtgttaaaagaaaacaaggcgattccgcagtccccccgttccctggaggtcctgtggaatgtcagcaggatggacctggagatgtcagggctgaagaccctggagcatgtggcagtgacagtctccatcactcacccacggcgcggcagcttggagctgaagctgttctgccccagtggcatgatgtccctcatcggcgccccccgcagcatggactcggatcccaacggcttcaatgactggaccttctccactgtgcgatgctggggggagagagcccgagggacctacaggcttgtcatcagggatgtcggatagcaacaaaaagtccttgtcgaaaccacatttcaagtccttttacgtataaccatccttcggccagccccggtaggcaggggatgagtcattccaggtcggcatcctccggcaatggcagctgaccctatatggctctgtgtggagtgcagtagacatcagggacagacaaaggctgttagagagtgccatgagtggaaaatacctgcacgatgacttcgccctgccctgcccaccggggctgaaaattcctgaggaagatggttacaccatcacccccaacaccctcaagaccctggtgctggtaggctgtttcaccgtcttctggactgtttactacatgctggaagtatatttgagccagaggaatgtggcttccaatcaagtttgtaggagtggaccctgccactggccccatcggagccggaaagccaaggaggaagggacagagctagaatcagtgccactttgcagcagcaaggatccagacgaagtggaaacagagagcaggggccctcccaccacctctgacctccttgccccagacctgctggagcaaggggactggagcctgtcccagaacaagagcgccctggactgccctcatcagcacctagacgtaccgcacgggaaggaggagcagatctgctgacctcagggcctgacagtgtgggacaggctcttctttcccaaaattagggagctcttgacagaaagcagttctgatgcttacatctggaatctgaggcatcctctgactccactcaaagagggtgagggccttcttaagatacaaatggtggaggattgctgccagagaagtctggtcagagccacagggtctgcctccagccaaacgggagcttttggtgagaaggtgttggacaggggattggcgcccccctttggtttggcctccatcctcatctctcttgggccaagccagctgcctaggtcccccaagcatgggggaccccttcccacatataagttgagaaggtgcctgccatagccaggagcgcatctcaatggaaacatcactggggtcacttgggaagaggacttcggggtagaggctgggaggagcccctggacatgcctgtcctgaaagcggctgcctccattatccattcccaagatgcctgatcagaaaccaaccatgaatgaacccctggctccttcaccacccccacgattggtatgatgctgccggcacagctgggatacacacggctcccccaggcctgagctgcttcactagggaatcctgcggcaggactgcagagcagatggcagatgcacatgttggaggagagagccttgggagccactgccactccagtcctgccaccaccctgtcttcctctgcaagtgctcagggaaatggccttcccgccggaggccagctatctgcctgacaggctgtgactcttctctcaaccttggccttctcccctcttctgagctagttggttgaattttttttaatgcttaagatttgtttttctcttttcacagcaacattttcttgaatttttttctgcacagcttttccaaaataaaaaccttccaaac

SEQ ID NO: 148986 - DNA, 3264 bp, Artificial Sequence
  derived and/or modified sequence
cagctgcggcggggccggtctgtagcctttgctgagtcaacactactcacagtgaaagtgatgccttttctccatttgcacaacatgagtgtgacgtggttagccagaccaggagctcaacctcatgtagaatccagtccactgctctgatgccgaaggggaggcagaaagtgccacacttggatgcccccctgggcctgcccacctgcctctggctggaattagccgggctcttcttactggttccctgggtcatgggcctggcagggacaggtgggcctgatggccagggcacaggggggccgagctgggctgtgcacctggaaagcctggaaggtgacggggaggaagagactctggagcagcaggcggatgccttggcccaggcagcagggctggtgaatgctggacgcatcggagagcttcaggggcactacctctttgtccagcctgctgggcacaggccggccctggaggtggaggccatccggcagcaggtggaggctgtgttggctgggcatgaagctgtgcgctggcactcagagcagaggctgctaaggcgggccaagcgcagcgtccacttcaacgaccccaagtacccgcagcaatggcacctgaataaccgacggagcccgggcagggacatcaacgtgacgggtgtgtgggaacgcaatgtgactgggcgaggggtgacggtggtggtagtggatgacggagtggaacacaccatccaggacattgcacccaactatagccctgagggtagctatgacctcaactctaatgaccctgaccccatgccccacccggatgtggagaatggcaaccaccatggcacgcgatgtgcaggagagatcgcggctgtgcccaacaacagcttctgtgccgtgggcgtggcctacgggagccgcatcgcaggtatccgggtactggatggacctctcacagacagcatggaggcagtggcgttcaacaagcactatcagatcaatgacatctacagctgcagctggggaccagatgacgatgggaagacagtggatggcccccatcagcttggaaaggctgccttacaacatggggtgattgctggtcgccagggctttgggagcatctttgtggtagccagtggcaacggaggccaacacaacgacaactgcaactacgatggctacgccaactccatctacaccgtcaccataggagctgtggatgaggagggacgcatgcctttctatgcagaagaatgtgcctccatgctggcagtcaccttcagtggtggggacaagatgcttcggagcattgtgaccactgactgggaccttcagaagggcactggctgcactgagggccacacagggacctcagctgcagcgcctctggcagctggcatgatagccttaatgctgcaggtgcggccctgcctcacgtggcgtgacgtccagcacatcattgtcttcacagccacccggtatgaggatcgccgtgcagagtgggtcaccaacgaggcaggcttcagccatagccaccagcacggtttcggcctcctcaacgcctggaggctcgtgaatgcagccaagatctggacatctgtcccttacttagcatcctacgtcagtcccgtgttaaaagaaaacaaggcgattccgcagtccccccgttccctggaggtcctgtggaatgtcagcaggatggacctggagatgtcagggctgaagaccctggagcatgtggcagtgacagtctccatcactcacccacggcgcggcagcttggagctgaagctgttctgccccagtggcatgatgtccctcatcggcgccccccgcagcatggactcatggctctgtgtggagtgcagtagacatcagggacagacaaaggctgttagagagtgccatgagtggaaaatacctgcacgatgacttcgccctgccctgcccaccggggctgaaaattcctgaggaagatggttacaccatcacccccaacaccctcaagaccctggtgctggtaggctgtttcaccgtcttctggactgtttactacatgctggaagtatatttgagccagaggaatgtggcttccaatcaagtttgtaggagtggaccctgccactggccccatcggagccggaaagccaaggaggaagggacagagctagaatcagtgccactttgcagcagcaaggatccagacgaagtggaaacagagagcaggggccctcccaccacctctgacctccttgccccagacctgctggagcaaggggactggagcctgtcccagaacaagagcgccctggactgccctcatcagcacctagacgtaccgcacgggaaggaggagcagatctgctgacctcagggcctgacagtgtgggacaggctcttctttcccaaaattagggagctcttgacagaaagcagttctgatgcttacatctggaatctgaggcatcctctgactccactcaaagagggtgagggccttcttaagatacaaatggtggaggattgctgccagagaagtctggtcagagccacagggtctgcctccagccaaacgggagcttttggtgagaaggtgttggacaggggattggcgcccccctttggtttggcctccatcctcatctctcttgggccaagccagctgcctaggtcccccaagcatgggggaccccttcccacatataagttgagaaggtgcctgccatagccaggagcgcatctcaatggaaacatcactggggtcacttgggaagaggacttcggggtagaggctgggaggagcccctggacatgcctgtcctgaaagcggctgcctccattatccattcccaagatgcctgatcagaaaccaaccatgaatgaacccctggctccttcaccacccccacgattggtatgatgctgccggcacagctgggatacacacggctcccccaggcctgagctgcttcactagggaatcctgcggcaggactgcagagcagatggcagatgcacatgttggaggagagagccttgggagccactgccactccagtcctgccaccaccctgtcttcctctgcaagtgctcagggaaatggccttcccgccggaggccagctatctgcctgacaggctgtgactcttctctcaaccttggccttctcccctcttctgagctagttggttgaattttttttaatgcttaagatttgtttttctcttttcacagcaacattttcttgaatttttttctgcacagcttttcc

SEQ ID NO: 148987 - DNA, 2358 bp, Artificial Sequence
  derived and/or modified sequence
atgcctaaaggaaggcaaaaagtccctcacctggacgcccctcttgggctcccaacgtgtctatggctcgaactggccggactcttcctgctggtcccctgggttatgggactggctgggactggcggtccagatggacagggaaccggcggacctagctgggcagtgcacctggagagccttgaaggcgatggggaagaagaaaccctggagcagcaggccgatgctctcgcccaagcggcaggactggtcaacgcagggagaatcggcgagttgcagggacactacctctttgtccagcccgctggccaccgacccgctctagaagtggaggccattcgccaacaagtagaggctgtgctagcgggacatgaagcagtcagatggcattccgaacagagattgctcaggcgtgccaagcggtcagtacactttaacgaccccaaatatcctcagcagtggcatcttaacaacagacgcagcccagggcgagatatcaacgtgacgggggtgtgggaacgcaacgtgactggccgtggcgtgacagttgtagtcgtcgatgatggtgtagaacacacaatccaggatattgcgccaaactattcccctgagggcagctacgatctaaacagtaatgaccctgatcctatgcctcatcccgatgtggagaacggcaaccatcacggaactagatgcgcaggtgaaatagcagctgtcccgaataactccttttgcgcagttggcgtggcctacggttcccgaatagccggaataagagtgttggatggaccactgacagactcgatggaagctgtggcctttaacaaacattaccagatcaacgacatttatagctgtagttggggtcctgatgacgatgggaagaccgttgatggaccccaccaactgggaaaggccgcactgcagcacggagtgatcgccggtcggcagggctttggtagtatattcgtcgtggcatctggcaacggcggacagcacaatgacaattgcaactatgatggttacgccaatagtatttacaccgtaactataggcgcagtcgatgaggaaggccgaatgccattttacgctgaggagtgcgcatcgatgctggccgttacgttctccggaggtgacaagatgctacggagcattgtgaccacagactgggatcttcagaagggcactggttgtacagaaggacatacgggtacctctgctgcggctccattagctgctggcatgattgctctgatgctgcaggtgaggccgtgtctgacttggcgggatgttcagcacatcatcgtttttacagctaccagatacgaggatagacgggcagagtgggtgaccaatgaagcgggattttctcatagtcaccagcacggcttcggcctccttaacgcctggcgactagtcaacgccgctaagatctggaccagtgtcccctacttggctagctatgtttctcccgtgctgaaagagaataaggccatacctcaatctcccagatcgctggaggtcctgtggaatgtgtcaagaatggacctcgagatgagtggtttaaagaccctcgaacatgtcgcagtgactgtgagcattactcaccctagacgcggttctctggagttgaaacttttttgccccagtgggatgatgtcacttattggggcaccgaggtcaatggactcagaccccaatggcttcaacgactggaccttttcaaccgtccgttgttggggggaacgagctcggggtacctacaggctcgtaattcgggacgttggcgatgagagcttccaagttggcatccttcgacagtggcaattgaccttatatggaagcgtctggagtgccgtggatataagggatcgccagcgactactcgagtcggctatgtctggtaaatacctccatgatgatttcgctctgccttgcccacctgggctgaagattcccgaagaggatggctatactattacaccaaatacgttgaagaccctggtcctcgttgggtgcttcaccgtattctggaccgtatactacatgctcgaggtgtaccttagtcagcggaacgtggcatcgaaccaggtttgcagatcaggaccctgccactggcctcaccggtcacgcaaggccaaagaggagggaacagaactggaaagcgtgccactgtgcagctcaaaggaccccgacgaagtcgaaacagagtcccggggtcctcccactactagcgatttgttggcccctgacttgctggaacagggagattggtcactgagccaaaataagagcgctttagattgcccgcaccagcatcttgacgtgccgcatggtaaggaagagcagatctgttag

SEQ ID NO: 148988 - DNA, 1776 bp, Artificial Sequence
  derived and/or modified sequence
atgccaaagggaaggcagaaggtacctcaccttgatgcaccactcggcctgcctacctgcctctggctggagctggccggactttttttgctggtgccatgggttatgggtctcgcaggcacgggcggtcctgacggacagggaacagggggaccctcctgggctgtacatctagaaagcctcgagggagatggagaggaagagaccttagaacaacaggccgacgctcttgcacaggccgcaggactcgtcaacgccggacgaatcggcgaactccagggccattatctcttcgtgcagcctgccggacaccggcctgccctcgaagtggaggccatccggcagcaagtcgaggccgtcctggctggccatgaagccgtcagatggcactctgagcagcggctgctgagacgcgcaaagcgttccgtacacttcaatgatccaaagtatccccagcagtggcacctgaataatcggagatccccgggacgcgacatcaacgtgaccggagtctgggagcggaatgtgacgggtagaggggtaacagtcgtggtcgtagacgacggcgttgaacacaccatccaggacattgcccctaattatagtccggagggcagttacgatttgaatagcaatgatccagaccctatgcctcatcctgacgtggagaacggaaaccatcatgggactcgttgtgctggtgaaattgccgctgtccccaataactccttttgtgctgtgggggtggcatacggctccaggatagccggaatccgcgtcttggatgggccactcacagatagcatggaggccgtcgcttttaacaagcactatcagatcaatgacatttattcatgctcctggggaccagacgacgacggtaagaccgtggacgggcctcaccaactgggcaaggccgcactccaacacggcgtgatcgccggtagacaggggtttggtagtatttttgttgtggcatctggcaacgggggtcaacacaatgacaactgtaactacgacgggtatgccaacagtatctacaccgtgacgatcggcgcagtagacgaggaagggaggatgccattctatgccgaagaatgcgcttccatgctggccgtgacattctccgggggagataagatgctgcggagtatcgtcaccactgactgggacctccagaagggcacgggctgtacggaaggtcataccggtacaagcgcggcagctccgttagcagccggaatgatcgccctgatgcttcaggtgagaccctgcctgacctggagagacgtgcaacatatcatcgtgttcacggctacacgctatgaggaccgtcgggcagagtgggttacaaatgaagccggattttcgcatagtcatcaacacggttttggcctgctgaacgcttggaggctggtcaacgccgctaagatatggacatctgttccctatctcgctagctatgtctccccagtcctgaaggagaataaggctattccccagtccccaaggtccctggaagtgctgtggaatgtgagtcggatggacctggagatgagtggtcttaaaaccctggaacacgtggcagtcacagtcagtatcacacacccacggaggggtagtttagaattgaaactcttctgtccttccggcatgatgtctctcattggggctcctcgtagcatggacagctggttgtgtgtggagtgctcccggcaccaaggacaaaccaaggctgtcagagaatgccacgagtggaagatacctgctagatag

SEQ ID NO: 148989 - protein, 1065 aa, Artificial Sequence
  derived and/or modified sequence
MDAAGRGCHLLPLPAARGPARAPAAAAAAAASPPGPCSGAACAPSAAAGAGAMNPSSSAGEEKGATGGSSSSGSGAGSCCLGAEGGADPRGAGSAAAAGAAALDEPAAAGQKEKDEALEEKLRNLTFRKQVSYRKAISRAGLQHLAPAHPLSLPVANGPAKEPRATLDWSENAVNGEHLWLETNVSGDLCYLGEENCQVRFAKSALRRKCAVCKIVVHTACIEQLEKINFRCKPTFREGGSRSPRENFVRHHWVHRRRQEGKCKQCGKGFQQKFSFHSKEIVAISCSWCKQAFHNKVTCFMLHHIEEPCSLGAHAAVIVPPTWIIKVKKPQNSLKASNRKKKRTSFKRKASKRGMEQENKGRPFVIKPISSPLMKPLLVFVNPKSGGNQGTKVLQMFMWYLNPRQVFDLSQEGPKDALELYRKVPNLRILACGGDGTVGWILSILDELQLSPQPPVGVLPLGTGNDLARTLNWGGGYTDEPVSKILCQVEDGTVVQLDRWNLHVERNPDLPPEELEDGVCKLPLNVFNNYFSLGFDAHVTLEFHESREANPEKFNSRFRNKMFYAGAAFSDFLQRSSRDLSKHVKVVCDGTDLTPKIQELKFQCIVFLNIPRYCAGTMPWGNPGDHHDFEPQRHDDGYIEVIGFTMASLAALQVGGHGERLHQCREVMLLTYKSIPMQVDGEPCRLAPAMIRISLRNQANMVQKSKRRTSMPLLNDPQSVPDRLRIRVNKISLQDYEGFHYDKEKLREASISDWLRTIAGELVQSFGAIPLGILVVRGDCDLETCRMYIDRLQEDLQSVSSGSQRVHYQDHETSFPRALSAQRLSPRWCFLDDRSQEHLHFVMEISQDEIFILDPDMVVSQPAGTPPGMPDLVVEQASGISDWWNPALRKRMLSDSGLGMIAPYYEDSDLKDLSHSRVLQSPVSSEDHAILQAVIAGDLMKLIESYKNGGSLLIQGPDHCSLLHYAAKTGNGEIVKYILDHGPSELLDMADSETGETALHKAACQRNRAVCQLLVDAGASLRKTDSKGKTPQERAQQAGDPDLAAYLESRQNYKVIGHEDLETAV

SEQ ID NO: 148990 - protein, 1068 aa, Artificial Sequence
  derived and/or modified sequence
MDAAGRGCHLLPLPAARGPARAPAAAAAAAASPPGPCSGAACAPSAAAGAGAMNPSSSAGEEKGATGGSSSSGSGAGSCCLGAEGGADPRGAGSAAAAGAAALDEPAAAGQKEKDEALEEKLRNLTFRKQVSYRKAISRAGLQHLAPAHPLSLPVANGPAKEPRATLDWSENAVNGEHLWLETNVSGDLCYLGEENCQVRFAKSALRRKCAVCKIVVHTACIEQLEKINFRCKPTFREGGSRSPRENFVRHHWVHRRRQEGKCKQCGKGFQQKFSFHSKEIVAISCSWCKQAFHNKVTCFMLHHIEEPCSLGAHAAVIVPPTWIIKVKKPQNSLKASNRKKKRTSFKRKASKRGMEQENKGRPFVIKPISSPLMKPLLVFVNPKSGGNQGTKVLQMFMWYLNPRQVFDLSQEGPKDALELYRKVPNLRILACGGDGTVGWILSILDELQLSPQPPVGVLPLGTGNDLARTLNWGGGYTDEPVSKILCQVEDGTVVQLDRWNLHVERNPDLPPEELEDGVCKLPLNVFNNYFSLGFDAHVTLEFHESREANPEKFNSRFRNKMFYAGAAFSDFLQRSSRDLSKHVKVVCDGTDLTPKIQELKFQCIVFLNIPRYCAGTMPWGNPGDHHDFEPQRHDDGYIEVIGFTMASLAALQVGGHGERLHQCREVMLLTYKSIPMQVDGEPCRLAPAMIRISLRNQANMVQKSKRRTSMPLLNDIHQVQTADLRRVSAPPGSFTIPQSVPDRLRIRVNKISLQDYEGFHYDKEKLREASIPLGILVVRGDCDLETCRMYIDRLQEDLQSVSSGSQRVHYQDHETSFPRALSAQRLSPRWCFLDDRSQEHLHFVMEISQDEIFILDPDMVVSQPAGTPPGMPDLVVEQASGISDWWNPALRKRMLSDSGLGMIAPYYEDSDLKDLSHSRVLQSPVSSEDHAILQAVIAGDLMKLIESYKNGGSLLIQGPDHCSLLHYAAKTGNGEIVKYILDHGPSELLDMADSETGETALHKAACQRNRAVCQLLVDAGASLRKTDSKGKTPQERAQQAGDPDLAAYLESRQNYKVIGHEDLETAV

SEQ ID NO: 148991 - DNA, 3198 bp, Artificial Sequence
  derived and/or modified sequence
atggatgccgcaggccgagggtgccaccttcttccactccccgccgctcgagggcctgcccgtgctcccgcagctgcagccgccgctgcggcgagcccacctggaccttgcagcggcgcagcatgtgcaccaagcgccgctgcgggggctggggccatgaatccatcttctagcgctggagaagagaaaggcgcaacaggggggtcgtcgtctagtgggtccggagccgggtcctgctgtctaggcgctgaaggtggcgccgatcctcggggagcggggtccgcagctgctgcaggggccgcagccttggatgaaccagctgctgctgggcagaaggagaaggatgaggccttggaagagaaactccggaatctgacctttcgaaagcaggtgtcatatcgcaaggctatcagccgcgccggattacagcacctagctcctgctcaccctctgtctttgcctgtagccaatgggcctgctaaggaacctcgcgctacactcgattggagcgaaaacgctgtaaatggagaacatctgtggcttgagacaaatgttagtggggacttatgctatctgggagaagagaattgccaggtccgcttcgcaaagtcagctctgcgcagaaagtgcgctgtctgtaaaattgtcgtgcataccgcctgcatcgaacagctcgaaaagatcaatttcaggtgtaagcctacatttcgtgagggggggagccgttcccctcgggagaatttcgtacggcaccactgggtccaccgcaggcggcaggagggtaaatgcaagcaatgtggtaaagggtttcagcagaaattctcctttcattccaaagaaatcgtggccatcagctgcagttggtgtaagcaggccttccataacaaggttacttgttttatgctgcaccacatcgaggaaccttgctccctaggtgcacacgccgccgtcatagttcctcccacctggatcataaaagttaagaagccccagaactctctcaaggccagcaatcgaaagaagaaaagaacttcattcaagcgaaaggcctctaaacggggcatggagcaggaaaacaagggccgacccttcgtgatcaagcccataagtagcccactcatgaagcctctactcgtgtttgtgaacccgaagtccggtggaaaccagggcacgaaggttctccagatgttcatgtggtacctgaatcctagacaggtctttgacctgtcccaggagggtcctaaggatgcactggagctttatcgaaaagtgcctaatctgcgcattctggcctgcggcggggacggtacagtgggatggatactcagcattttggacgaactgcagctgtcgccacagcctcccgtcggggtccttcccttgggaaccggcaatgatctggcccggaccctgaattggggaggggggtacaccgacgaaccggtgtccaagatcctttgtcaggtggaggatgggacagtggtccaattagatcgttggaacctgcacgtggaacgtaaccccgaccttcccccagaagagctcgaggacggcgtttgcaagctgcccctgaatgtcttcaataactatttctctttggggttcgatgctcatgtgacattagagtttcacgagagtcgcgaggccaatccagaaaaattcaattcacggtttcgcaataagatgttttacgcaggagctgccttcagtgacttcctacagagatctagccgcgacctatcgaagcatgtgaaggtggtttgcgacggcaccgatctcacaccaaagattcaggaacttaagtttcagtgtatcgtcttcttgaatatacccaggtactgtgcgggaacgatgccgtggggcaaccctggggatcaccacgattttgagcctcagcgtcatgatgacggctacatcgaggtcattggctttacaatggctagtctggcagccctgcaggtgggtggccacggcgaaaggcttcatcagtgccgggaggtgatgcttctgacatacaagtcaatcccaatgcaagttgacggggaaccctgtcgacttgctccggccatgattcggatttcgctcaggaatcaggccaatatggtgcagaaatctaagcggcggacctcgatgccgttgctcaacgaccctcagtctgtgcccgacagactgagaatacgcgtgaacaaaattagtctccaggattacgaaggattccactatgataaggagaagcttcgcgaggcaagtatttcggattggctcagaaccatcgccggggaattggtgcaatcctttggggctataccactcggcattctggtagtgagaggggattgtgaccttgaaacctgtcgtatgtacatagacaggttgcaggaagatctccagagcgttagtagcgggagccagagagttcactaccaggaccacgagactagctttcctcgcgccttgtctgcccaacgcctgagcccaaggtggtgctttctcgatgacagaagccaggagcatttgcacttcgtcatggaaatctcccaggacgagatattcatcctggatcctgatatggtggtgagtcaacccgcgggaacgcctcccggcatgccggatctagtggtagaacaggcgtccgggattagcgattggtggaatccagctctgagaaaacggatgctgagtgactccggcctgggaatgattgcaccttactacgaggattccgatctcaaggatctgtctcattccagagtattacagtcgcccgtaagctctgaggatcatgccatcctccaggcagtcatcgccggtgatctgatgaaattgatcgagtcatacaagaacggcggcagcctgctgatccaaggcccagaccattgttccctcttacattacgcagccaaaactgggaacggagaaatcgtgaagtacatcctcgatcacggtccaagcgaattactggacatggccgacagcgaaacaggagagaccgccctgcataaagcggcctgtcagaggaatcgagctgtgtgtcagctgctcgtggatgctggcgcgagtctcaggaaaaccgatagtaagggcaaaacaccacaggagcgcgcacagcaagcgggagatcctgacctggccgcatatttggaatcccggcagaactataaggttatcggtcatgaagatctagagacagcggtgtag

SEQ ID NO: 148992 - DNA, 3198 bp, Artificial Sequence
  derived and/or modified sequence
atggatgctgctggccggggctgccacctgctgcccctgcctgctgcccggggccctgcccgggccccagctgctgctgctgctgctgctgccagccccccaggcccctgcagcggggccgcctgtgcccccagcgctgctgctggggccggggccatgaaccccagcagcagcgctggggaggagaagggggccaccggcggcagcagcagcagcggcagcggggccggcagctgctgcctgggcgctgagggcggcgctgaccccaggggggccggcagcgctgctgctgctggagctgctgccctggatgagcctgctgctgctggccagaaggagaaggatgaggccctggaggagaagctgaggaacctgaccttcaggaagcaggtgtcctacaggaaggccatcagccgggccggcctgcagcacctggccccagcccaccccctgagcctgcctgtggccaatggacctgccaaggagccccgggccaccctggactggagcgaaaatgctgtgaatggagagcacctgtggctggagaccaacgtgtctggggacctgtgctacctgggggaggagaactgccaggtgcgctttgccaagagcgccctgcggaggaaatgtgctgtgtgcaagatcgtggtgcacacagcctgcatcgagcagctggagaagatcaacttccgctgcaagcccaccttccgggagggcggcagccgcagcccccgggagaactttgtgcgccaccactgggtgcacagaagacggcaggagggcaagtgcaagcagtgtgggaagggcttccagcagaagttctccttccacagcaaggagatcgtggccatcagctgctcctggtgcaagcaggccttccacaacaaggtgacctgcttcatgctgcaccacatcgaggagccctgcagcctgggcgcccatgctgctgtgattgtgccccccacctggatcatcaaggtgaagaagccccagaacagcctgaaggccagcaacaggaagaagaagaggaccagcttcaagaggaaggccagcaagaggggcatggagcaggagaacaagggccggcccttcgtcatcaagcccatcagcagccccctgatgaagcccctgctggtgtttgtgaaccccaagagcggcggcaaccagggcaccaaggtgctgcagatgttcatgtggtacctgaacccccggcaggtgtttgacctgagccaggagggccccaaggatgccctggagctgtacaggaaggtgcccaacctgcgcatcctggcctgtggaggagatggcaccgtgggctggatcctgagcatcctggatgagctgcagctgagcccccagccccctgtgggcgtgctgcccctgggcactggaaatgacctggcccggaccctgaactggggcggcggctacacagatgagcctgtgtccaagatcctgtgccaggtggaggatggcaccgtggtgcagctggaccgctggaacctgcacgtggagaggaacccagacctgcccccagaggagctggaggatggagtgtgcaagctgcccctgaatgtgttcaacaactacttcagcctgggctttgatgcccacgtgaccctggagttccacgagagccgggaggccaaccctgagaagttcaacagccgcttcaggaacaagatgttttatgctggggccgccttcagtgacttcctgcagaggagcagccgggacctgagcaagcacgtgaaggtggtgtgtgatggaacagacctgacccccaagatccaggagctgaagttccagtgcatcgtgttcctgaacatcccccgctactgtgccggcaccatgccctggggcaaccctggggaccaccacgactttgagccccagagacatgatgatggctacattgaagtcatcggcttcaccatggccagcctggccgccctgcaggtgggcggccatggagagcggctgcaccagtgccgggaggtgatgctgctgacctacaagagcatccccatgcaggtggatggagagccctgccgcctggccccagccatgatccgcatcagcctgaggaaccaggccaacatggtgcagaagagcaagaggaggacctccatgcccctgctgaatgacccccagagcgtgcctgaccggctgcgcatccgggtgaacaagatcagcctgcaggactatgagggcttccactatgacaaggagaagctgcgggaggccagcatcagtgactggctgcggaccatcgccggggagctggtgcagagctttggagccatccccctgggcatcctggtggtgcggggggactgtgacctggagacctgcaggatgtacatcgaccggctgcaggaggacctgcagagcgtgagcagcggcagccagagggtgcactaccaggaccacgagaccagcttcccccgggccctgagcgcccagaggctgagcccccgctggtgcttcctggatgacaggagccaggagcacctgcactttgtgatggagatcagccaggatgagatcttcatcctggaccctgacatggtggtgtcccagcctgctggcaccccacctggcatgccagacctggtggtggagcaggccagcggcatcagtgactggtggaacccagccctgaggaagaggatgctgagtgacagcggcctgggcatgattgccccctactatgaggacagcgacctgaaggacctgagccacagccgggtgctgcagagccctgtgtcctctgaggaccacgccatcctgcaggccgtgattgctggggacctgatgaagctgattgagagctacaagaatggaggcagcctgctgatccagggccctgaccactgcagcctgctgcactacgccgccaagacaggaaatggagagatcgtgaagtacatcctggaccacggccccagcgagctgctggacatggctgacagcgagaccggggagacagccctgcacaaggccgcctgccagaggaacagagctgtgtgccagctgctggtggatgctggggccagcctgaggaagacagacagcaagggcaagaccccccaggagcgggcccagcaggccggggaccctgacctggccgcctacctggagagccggcagaactacaaggtgattggacatgaggacctggagacagctgtgtag

SEQ ID NO: 148993 - DNA, 3198 bp, Artificial Sequence
  derived and/or modified sequence
atggacgccgccggccggggctgccacctgctgcccctgcccgccgcaaggggccctgcccgtgctcctgcagccgccgcagccgccgctgcatccccgccgggtccttgttcaggcgctgcgtgtgctccctccgccgctgccggcgcgggggccatgaatccctctagtagcgctggggaagagaagggcgccaccggcgggagcagcagctcagggagcggcgcaggtagttgctgcttaggcgcagagggcggggcggaccctcggggtgcaggcagtgctgccgcagcaggtgcggccgctctcgatgaaccagccgccgcaggtcagaaagaaaaggatgaagcccttgaggagaagttaagaaatctgacatttcggaagcaggttagctacaggaaagccatttcccgagctggcctgcaacatttggcccctgcccaccctctaagtctccctgtcgccaacggacctgcaaaggaacccagggccaccctggactggtcggagaatgccgtaaatggagagcacctgtggttggaaacaaacgtgagtggggacctttgttacctgggggaggagaattgtcaggtgcgattcgccaagagcgccctgcgccgtaagtgcgctgtttgcaagatagtagtgcatacagcctgcatagaacagcttgagaagattaatttccgatgcaagcctacttttagggagggaggaagccgcagtcccagggagaattttgtcaggcaccactgggtacatcgccgacggcaagaaggtaagtgcaaacagtgtgggaaaggattccaacagaaattctcctttcacagtaaggagatcgttgccatatcctgtagctggtgtaagcaggcatttcataacaaagtgacctgttttatgctgcatcatatagaggaaccctgctccctgggcgcccacgctgcggtaatcgtccctccaacttggataatcaaggtaaaaaaaccccagaactcactgaaggcctcaaaccggaaaaagaagaggacctctttcaaaaggaaagcgagtaagaggggcatggagcaggaaaacaaagggcgcccatttgtgatcaagcccatctcttctcccctgatgaaacctctactggtgtttgtaaacccaaagtctggaggcaaccaggggaccaaagtactccagatgttcatgtggtatctcaaccctaggcaagtgttcgatttgtctcaggaaggcccaaaggacgccctggagctctatcggaaggtgcccaatctgcgcatccttgcatgtgggggcgacgggactgttggctggatactgtctatcctagacgagctccagttatcaccccaacctccggtgggcgtgcttccacttggcacaggaaacgacctggctaggaccttgaactggggcggagggtatactgatgagcccgtttccaagattctctgtcaagtcgaggacggtactgtggtgcagctggaccgctggaatctgcacgtggaacggaaccccgacttgccccccgaagaactggaagatggtgtgtgtaagctgcccctgaatgtgttcaacaattacttcagcctgggcttcgatgcccacgtgaccttagagttccacgagtctcgcgaggcaaacccggagaagttcaatagtcgctttaggaacaaaatgttctacgccggggcagcgttcagcgattttctgcagcggtcctccagggacttgtctaagcatgtcaaagtggtatgcgatggaacggacctcactccgaaaattcaggaattgaaattccagtgcattgttttcctgaacatccccaggtactgcgcgggtaccatgccgtggggcaatccaggagatcatcacgacttcgaacctcagcggcatgacgatggatacattgaagtgatcgggtttacaatggccagccttgccgctctgcaggtagggggtcacggcgagcgcttacaccagtgcagggaagtaatgttgcttacctataaaagcatacccatgcaggtggacggtgagccttgccgattggcacccgcgatgatccggatttcacttcgaaatcaggctaacatggtgcagaaatccaaacgcaggacatccatgcctctgctcaacgacccccaatccgtgccagatcgactgcggatcagagtgaataagatctctctgcaagactacgagggcttccactatgacaaggagaaactgagggaagcctccattagcgattggctgaggaccattgccggagaactcgtccagtctttcggtgctattcctcttggaatactggtcgtgaggggggattgtgacctggaaacttgccgtatgtacatcgaccgccttcaagaggatctgcagtccgtttcatccggctcacagcgagtccattatcaggatcacgaaaccagctttcctcgcgcactgtctgcccagcgcctatctccaaggtggtgcttcttggacgacaggagtcaggaacacctgcatttcgtgatggaaatctcacaagacgaaattttcatcttagaccccgatatggtggtctcacaaccagctggaacgccacctggcatgccagatctggtcgtggaacaggcatcgggcatcagtgattggtggaaccccgcattgcgaaaacgtatgttgagcgattcaggattgggcatgatcgctccttattacgaagattccgacttaaaggatctttcacatagccgtgtcctccaaagtcccgtgagttcggaggatcacgcaatccttcaagccgtaattgccggggacttgatgaagttgatagagtcgtataaaaatggcggtagtttgctgatacaggggccggaccactgctcactcctccattacgcggctaagacaggcaacggtgaaatcgtgaagtacatcttagaccacggcccaagcgagctgctagacatggccgactcagaaacaggtgaaacagcactgcacaaagctgcttgtcagcgaaaccgggccgtgtgtcaactgctggtggacgcaggtgcgtcactgcgcaagacagattctaaggggaaaaccccgcaagaacgagctcagcaggccggcgatccggacttagccgcctacctggaaagccgacagaactataaggtgatcggacacgaagacctggaaaccgccgtgtag

SEQ ID NO: 148994 - DNA, 3198 bp, Artificial Sequence
  derived and/or modified sequence
atggatgccgctggtcgcggttgccatctcctgccactgcccgctgccagaggccctgccagagctccagctgcagccgcagctgctgctgcttcccccccaggcccttgtagtggagcagcatgcgcgcctagtgccgcagccggagccggagccatgaacccctctagttccgcaggggaggagaaaggcgctacggggggatcctctagtagcggcagtggagccggatcctgttgtctgggcgctgaaggcggtgcagaccctaggggagcaggttccgctgctgcagccggagcagcagcactggatgaaccagctgcagccggacagaaggagaaagacgaagctctcgaagaaaagctacgcaacctcacgttcaggaagcaagtgagttaccggaaggccatcagtcgagcgggtctgcagcatctggcacctgcacaccccctatccctcccagttgctaacggccctgccaaggaaccaagagcaacacttgattggagtgaaaatgcagtaaatggagagcacctgtggttagaaaccaacgtctccggggacctatgttatttgggagaggagaactgccaagtccggttcgctaagagtgctctgaggcggaagtgtgccgtatgtaagatagtggtgcatacagcgtgtattgaacagctcgagaaaattaactttcgatgcaaacccacatttagggagggtgggagccggtcccctcgggagaacttcgtcaggcaccattgggtccacagacgcagacaggagggaaaatgtaaacagtgtgggaagggctttcagcagaagttctctttccactcaaaagaaatcgtggcaatcagctgtagctggtgcaaacaagcctttcacaacaaagtcacatgctttatgcttcaccatatcgaagaaccctgtagccttggagcccacgccgctgtgatcgttccacccacttggattattaaagtcaaaaagcctcagaattctctgaaggccagtaatcgtaagaagaagcgaacctcttttaagagaaaagccagcaagagggggatggaacaggaaaacaagggcaggcctttcgtgatcaagcccataagttctcccctcatgaagcccctgttagtgttcgtgaatccaaaatcaggagggaaccaggggacaaaggtgctgcaaatgttcatgtggtacttgaatcctcgccaggtatttgatctgtcacaggagggccctaaagatgcgctggagctttaccgtaaagtgcccaacttgcgcattctggcttgcggaggggacgggacagtcggctggatcctcagtattctggatgagctacagctgagcccccagccccctgttggcgtgttgccacttggaaccggcaacgatttggcaaggaccctgaactggggcggtgggtatactgatgagcctgtttctaaaattttatgccaggtcgaggatggcacagtggtccaactcgacagatggaatctgcacgtggagagaaaccccgaccttccacccgaagagctggaggacggagtctgtaaattgcctctgaacgtgttcaacaattatttcagcctcggcttcgacgctcacgtgacactggagtttcatgagtcccgcgaggcaaacccagagaaatttaacagccgcttcagaaacaaaatgttctacgccggtgctgcgttttcagatttcctccagcgatctagtagagacttgtccaagcacgttaaagttgtgtgtgacgggacagatctgacgccgaagattcaggagctgaagtttcaatgcatagtgtttttgaacatcccacgctattgtgccggtacaatgccttggggcaaccctggtgatcatcatgactttgaaccacagaggcatgatgatgggtatattgaagtgatcggctttactatggcatctctggccgctttgcaggtcgggggacacggggagaggctccatcaatgccgggaagtgatgctcctcacatacaagtcgattccaatgcaggtggacggcgagccatgccgactggcacccgcaatgatacggatcagcctccggaaccaggcgaacatggtgcagaagtctaaacggaggacatccatgcccctcctgaatgacccacagagtgtgcccgaccgacttcggatacgggtgaacaaaatttcactacaggactatgagggctttcactacgataaggagaaacttagagaagccagtatctctgactggctccgaaccatcgctggagaactagtgcagagttttggggcaatcccgttgggcattcttgtggtgcggggagattgcgacctggagacatgtagaatgtatattgacagattgcaggaagatcttcagtcagttagctctggaagccagcgcgtacactaccaggatcacgaaacaagcttcccacgggctttatcagcacagcgcttatcacccaggtggtgctttctggatgatcggtcacaggaacatctccattttgtgatggaaatctctcaggacgaaatttttatactggatccggacatggttgtgagtcaaccagctggtaccccaccgggtatgccagatctggtggtagaacaggcctcaggaatcagcgactggtggaacccagcactgaggaagagaatgctatccgactctggtctcggcatgatagcaccatattatgaagactccgacctgaaagacctgtcccactctagagtgctccagtcccctgtgtcctctgaggaccacgccatcctccaggcagtaatcgctggcgacctgatgaagctgatcgagtcctacaagaatggcggttcactgctcattcagggacctgaccactgctctctcctgcactacgctgccaagaccgggaatggtgaaattgtcaaatatatccttgatcacgggccttcagagctgctggacatggcagatagtgagacgggcgagacagctctacataaagctgcatgtcaaaggaacagggctgtctgccagctgttggttgacgccggtgcctctctcagaaagaccgatagcaagggaaagactccccaggaaagggctcaacaagctggtgatcctgacctggctgcatatctggaatcccggcaaaattataaagtcattggccacgaagacctggagacagccgtatag

SEQ ID NO: 148995 - DNA, 3198 bp, Artificial Sequence
  derived and/or modified sequence
atggacgccgccggcagaggctgccacctgctgcccctgcccgccgccagaggccccgccagagcccccgccgccgccgccgccgccgccgccagcccccccggcccctgcagcggcgccgcctgcgcccccagcgccgccgccggcgccggcgccatgaaccccagcagcagcgccggcgaggagaagggcgccaccggcggcagcagcagcagcggcagcggcgccggcagctgctgcctgggcgccgagggcggcgccgaccccagaggcgccggcagcgccgccgccgccggcgccgccgccctggacgagcccgccgccgccggccagaaggagaaggacgaggccctggaggagaagctgagaaacctgaccttcagaaagcaggtgagctacagaaaggccatcagcagagccggcctgcagcacctggcccccgcccaccccctgagcctgcccgtggccaacggccccgccaaggagcccagagccaccctggactggagcgagaacgccgtgaacggcgagcacctgtggctggagaccaacgtgagcggcgacctgtgctacctgggcgaggagaactgccaggtgagattcgccaagagcgccctgagaagaaagtgcgccgtgtgcaagatcgtggtgcacaccgcctgcatcgagcagctggagaagatcaacttcagatgcaagcccaccttcagagagggcggcagcagaagccccagagagaacttcgtgagacaccactgggtgcacagaagaagacaggagggcaagtgcaagcagtgcggcaagggcttccagcagaagttcagcttccacagcaaggagatcgtggccatcagctgcagctggtgcaagcaggccttccacaacaaggtgacctgcttcatgctgcaccacatcgaggagccctgcagcctgggcgcccacgccgccgtgatcgtgccccccacctggatcatcaaggtgaagaagccccagaacagcctgaaggccagcaacagaaagaagaagagaaccagcttcaagagaaaggccagcaagagaggcatggagcaggagaacaagggcagacccttcgtgatcaagcccatcagcagccccctgatgaagcccctgctggtgttcgtgaaccccaagagcggcggcaaccagggcaccaaggtgctgcagatgttcatgtggtacctgaaccccagacaggtgttcgacctgagccaggagggccccaaggacgccctggagctgtacagaaaggtgcccaacctgagaatcctggcctgcggcggcgacggcaccgtgggctggatcctgagcatcctggacgagctgcagctgagcccccagccccccgtgggcgtgctgcccctgggcaccggcaacgacctggccagaaccctgaactggggcggcggctacaccgacgagcccgtgagcaagatcctgtgccaggtggaggacggcaccgtggtgcagctggacagatggaacctgcacgtggagagaaaccccgacctgccccccgaggagctggaggacggcgtgtgcaagctgcccctgaacgtgttcaacaactacttcagcctgggcttcgacgcccacgtgaccctggagttccacgagagcagagaggccaaccccgagaagttcaacagcagattcagaaacaagatgttctacgccggcgccgccttcagcgacttcctgcagagaagcagcagagacctgagcaagcacgtgaaggtggtgtgcgacggcaccgacctgacccccaagatccaggagctgaagttccagtgcatcgtgttcctgaacatccccagatactgcgccggcaccatgccctggggcaaccccggcgaccaccacgacttcgagccccagagacacgacgacggctacatcgaggtgatcggcttcaccatggccagcctggccgccctgcaggtgggcggccacggcgagagactgcaccagtgcagagaggtgatgctgctgacctacaagagcatccccatgcaggtggacggcgagccctgcagactggcccccgccatgatcagaatcagcctgagaaaccaggccaacatggtgcagaagagcaagagaagaaccagcatgcccctgctgaacgacccccagagcgtgcccgacagactgagaatcagagtgaacaagatcagcctgcaggactacgagggcttccactacgacaaggagaagctgagagaggccagcatcagcgactggctgagaaccatcgccggcgagctggtgcagagcttcggcgccatccccctgggcatcctggtggtgagaggcgactgcgacctggagacctgcagaatgtacatcgacagactgcaggaggacctgcagagcgtgagcagcggcagccagagagtgcactaccaggaccacgagaccagcttccccagagccctgagcgcccagagactgagccccagatggtgcttcctggacgacagaagccaggagcacctgcacttcgtgatggagatcagccaggacgagatcttcatcctggaccccgacatggtggtgagccagcccgccggcaccccccccggcatgcccgacctggtggtggagcaggccagcggcatcagcgactggtggaaccccgccctgagaaagagaatgctgagcgacagcggcctgggcatgatcgccccctactacgaggacagcgacctgaaggacctgagccacagcagagtgctgcagagccccgtgagcagcgaggaccacgccatcctgcaggccgtgatcgccggcgacctgatgaagctgatcgagagctacaagaacggcggcagcctgctgatccagggccccgaccactgcagcctgctgcactacgccgccaagaccggcaacggcgagatcgtgaagtacatcctggaccacggccccagcgagctgctggacatggccgacagcgagaccggcgagaccgccctgcacaaggccgcctgccagagaaacagagccgtgtgccagctgctggtggacgccggcgccagcctgagaaagaccgacagcaagggcaagaccccccaggagagagcccagcaggccggcgaccccgacctggccgcctacctggagagcagacagaactacaaggtgatcggccacgaggacctggagaccgccgtgtag

SEQ ID NO: 148996 - DNA, 4124 bp, Artificial Sequence
  derived and/or modified sequence
gggtcgcagcctgtcctcctctctctccccctccgccgcagcccgtcgcctccgggcagagttcatgttcagcttgggctttcgctcgggatttaggaagaggccggcggggctggagggtgcgggccggcgcgggagggcgcgggaggcggggagcggcggcctctgattggccggggcgggggagtgagcggagtttcccacaatgccccggtgcggtgcagccgcggatggatgctgcgggaaggggctgccatttgctgcccctgccagcggcgcgcggacctgcccgcgctcctgcagccgccgccgccgccgccgccagcccgcccggcccctgcagcggcgccgcctgcgctccctccgcggccgccggagcgggcgccatgaaccccagctcctcggcgggagaggagaaaggggcgacgggcggcagcagcagcagcggaagcggcgccgggagctgctgcctgggcgccgagggcggcgcggacccgcggggcgcagggtcagccgcggcggcgggggccgctgccctggacgagcccgcggccgccggccagaaggagaaggacgaagcgctggaggagaagctgaggaacttaactttccggaagcaggtctcgtacaggaaagcaatctcccgggcaggcctccagcatctggctcctgcacatcccctcagccttcctgtggcaaatggtccagccaaggagcccagagcgactttggactggagtgagaatgccgtgaatggagaacacctgtggctggagaccaacgtctcgggagacctctgctaccttggagaggagaactgccaagtcagatttgcaaaatcagctctcaggaggaagtgtgcagtctgtaaaatcgtcgtccacaccgcctgcattgagcagctagaaaagattaatttcagatgtaaaccaacatttcgagaaggaggctcaaggtcaccaagagaaaattttgtacgtcatcactgggtgcacaggcgtcggcaggaggggaaatgtaagcagtgtggtaagggcttccagcaaaagttctccttccacagtaaagagattgtggctatcagctgttcctggtgcaagcaggcgtttcacaataaggtgacctgcttcatgctgcatcacattgaagaaccctgctccctgggggctcatgctgctgttattgtcccgcccacttggatcattaaggtgaagaaacctcagaactccctgaaggcttcaaatcggaagaagaagagaacaagctttaaaagaaaagccagtaaaagagggatggaacaggaaaacaaaggtcgtccttttgtgataaaacccatctcttctcctctcatgaaacccttgcttgtatttgtgaatcccaagagtggaggcaaccagggaaccaaagtcctgcagatgttcatgtggtacctgaatccacggcaagtctttgatctttctcaggaagggccaaaagatgcgcttgaattgtataggaaagtaccaaatctgcgaattctggcctgtggtggggatggaacggtgggctggatcctttccatcctggatgaactgcagctgagccctcagcctcctgtgggggtccttcctctggggactgggaatgacctggctcgaactctcaactggggagggggctacactgatgaacctgtttctaagatcctgtgtcaagtggaagatgggacagttgtacagctagatcgctggaacctccatgtggaaagaaaccccgacttgcctccagaagaacttgaagatggcgtatgtaagctccctctgaatgttttcaataactacttcagccttggatttgatgcccatgtcacactggagttccatgaatccagagaagcaaatccagagaaattcaacagtcgttttcgaaataaaatgttctatgcaggggcagctttttctgacttcctacagagaagttctagagatctatccaaacatgttaaagttgtttgtgatggaacagatctcaccccaaagattcaggaactgaagttccagtgtatagtatttttaaatatacccagatattgtgctggcacaatgccctggggaaacccaggtgatcaccatgatttcgaacctcagcgtcatgatgatggttatattgaagtcattggatttaccatggcctctttggcagccctgcaagttgggggccatggagagaggctacaccagtgtcgagaagtcatgcttctaacttacaaatccatccccatgcaagtggatggggagccctgtaggttggccccagctatgattcggatctccctgaggaatcaggccaacatggtacagaagagcaagaggagaacatccatgcctttactcaatgatccccagtctgtcccagatcgtctgaggatccgggtgaacaaaatcagtttacaagactatgaaggattccactatgacaaggagaaactccgagaagcttctatttcagactggttaagaaccattgctggggaactagtgcagtcatttggagcgatacctctgggtattctagttgtgcgtggagactgtgatttggagacttgccgtatgtacatagaccgcctacaggaggacctacagtcagtttcttctggctcccagagagttcattaccaggaccatgaaacctccttccccagggctctctcagcacagaggctctctcctcggtggtgcttcctagatgacagatctcaggaacatttgcactttgtgatggagatttcccaagatgagatttttattctggacccagatatggtggtgtcacagccggcggggacacctccgggcatgcctgacctggtggtggaacaagcctcggggatctcagactggtggaatcctgccctgcggaaacgcatgctgagtgacagtgggctggggatgatagctccctattatgaggactcagatctgaaagatctcagccactcccgcgtgctacagtcaccagtctcttcagaagatcatgcaattttgcaggcagtaatagctggtgatcttatgaagctaatagaaagctataaaaatggaggcagtctgctaattcagggaccagaccactgttcactccttcactacgcagctaaaaccggcaacggggagattgtgaaatatatccttgaccacggaccttccgagttattggatatggcagacagtgaaacgggtgagactgcactgcacaaggctgcctgccagcggaaccgggctgtgtgccagcttctggtggatgcaggagcatctctgagaaagacggactccaagggtaagacacctcaagaaagagcacagcaggctggggacccagacttggctgcttacctagaaagccgtcagaactataaggtcattggccatgaggacctggaaactgctgtttgaccctggtattcgggcaaagaggacatgagcaagcgtatcacatctgccctccctgcaattgggcagctcccctggaagaagctgatggaattcatatatctgtctctctcctgcaagaatctacctgagaccatgccactagcttttaagggctaccaagatgtacaacagaacatgatagcccattgagaaggaggcaggatacctggagatttgtggaatacagtacgagttccacaaaatttgatccttattgcttccagcaagtagcatgaacttctgtgttcacctgtataatttattttaaagattcaaaggatgttcgtataaatggcactgctccatcctccccctatgcattggtttttttccctgtaccatacaattctactgtaactacccatcaacttaaagaaaaatattatctcttctctttacattcagtcttggaagaccacaagattgtctgaaggccttctaaaaccttctgaatgtcctgcagaaatataactgtaaaaccacttccatttctaagactaaatatatcaagactatttagtgactctctctgcatgtccccctcacccgccaaccctccgtttcattatataggagctgggaagtgccacatggataatgtcaacttgtgtgctatatctctgaggaatggtgaggtggcatgggagatgtctgtgc

SEQ ID NO: 148997 - DNA, 4392 bp, Artificial Sequence
  derived and/or modified sequence
atgaagaagaagaccgtgtgcaccctgaacatgggcgacaagaagtacgaggacatggagggcgaggagaacggcgacaacaccatcagcaccggcctgctgtacagcgaggccgacagatgccccatctgcctgaactgcctgctggagaaggaggtgggcttccccgagagctgcaaccacgtgttctgcatgacctgcatcctgaagtgggccgagaccctggccagctgccccatcgacagaaagcccttccaggccgtgttcaagttcagcgccctggagggctacgtgaaggtgcaggtgaagaagcagctgagagagaccaaggacaagaagaacgagaacagcttcgagaagcaggtgagctgccacgagaacagcaagagctgcatcagaagaaaggccatcgtgagagaggacctgctgagcgccaaggtgtgcgacctgaagtggatccacagaaacagcctgtacagcgagaccggcggcaagaagaacgccgccatcaagatcaacaagccccagagaagcaactggagcaccaaccagtgcttcagaaacttcttcagcaacatgttcagcagcgtgagccacagcggcgagagcagcttcacctacagagcctactgcaccgagttcatcgaggccagcgagatcagcgccctgatcagacagaagagacacgagctggagctgagctggttccccgacaccctgcccggcatcggcagaatcggcttcatcccctggaacgtggagaccgaggtgctgcccctgatcagcagcgtgctgcccagaaccatcttccccaccagcaccatcagcttcgagcacttcggcaccagctgcaagggctacgccctggcccacacccaggagggcgaggagaagaagcagaccagcggcaccagcaacaccagaggcagcagaagaaagcccgccatgaccacccccaccagaagaagcaccagaaacaccagagccgagaccgccagccagagccagagaagccccatcagcgacaacagcggctgcgacgcccccggcaacagcaaccccagcctgagcgtgcccagcagcgccgagagcgagaagcagaccagacaggcccccaagagaaagagcgtgagaagaggcagaaagccccccctgctgaagaagaagctgagaagcagcgtggccgcccccgagaagagcagcagcaacgacagcgtggacgaggagaccgccgagagcgacaccagccccgtgctggagaaggagcaccagcccgacgtggacagcagcaacatctgcaccgtgcagacccacgtggagaaccagagcgccaactgcctgaagagctgcaacgagcagatcgaggagagcgagaagcacaccgccaactacgacaccgaggagagagtgggcagcagcagcagcgagagctgcgcccaggacctgcccgtgctggtgggcgaggagggcgaggtgaagaagctggagaacaccggcatcgaggccaacgtgctgtgcctggagagcgagatcagcgagaacatcctggagaagggcggcgaccccctggagaagcaggaccagatcagcggcctgagccagagcgaggtgaagaccgacgtgtgcaccgtgcacctgcccaacgacttccccacctgcctgaccagcgagagcaaggtgtaccagcccgtgagctgccccctgagcgacctgagcgagaacgtggagagcgtggtgaacgaggagaagatcaccgagagcagcctggtggagatcaccgagcacaaggacttcaccctgaagaccgaggagctgatcgagagccccaagctggagagcagcgagggcgagatcatccagaccgtggacagacagagcgtgaagagccccgaggtgcagctgctgggccacgtggagaccgaggacgtggagatcatcgccacctgcgacaccttcggcaacgaggacttcaacaacatccaggacagcgagaacaacctgctgaagaacaacctgctgaacaccaagctggagaagagcctggaggagaagaacgagagcctgaccgagcaccccagaagcaccgagctgcccaagacccacatcgagcagatccagaagcacttcagcgaggacaacaacgagatgatccccatggagtgcgacagcttctgcagcgaccagaacgagagcgaggtggagcccagcgtgaacgccgacctgaagcagatgaacgagaacagcgtgacccactgcagcgagaacaacatgcccagcagcgacctggccgacgagaaggtggagaccgtgagccagcccagcgagagccccaaggacaccatcgacaagaccaagaagcccagaaccagaagaagcagattccacagccccagcaccacctggagccccaacaaggacaccccccaggagaagaagagaccccagagccccagccccagaagagagaccggcaaggagagcagaaagagccagagccccagccccaagaacgagagcgccagaggcagaaagaagagcagaagccagagccccaagaaggacatcgccagagagagaagacagagccagagcagaagccccaagagagacaccaccagagagagcagaagaagcgagagcctgagccccagaagagagaccagcagagagaacaagagaagccagcccagagtgaaggacagcagccccggcgagaagagcagaagccagagcagagagagagagagcgacagagacggccagagaagagagagagagagaagaaccagaaagtggagcagaagcagaagccacagcagaagccccagcagatgcagaaccaagagcaagagcagcagcttcggcagaatcgacagagacagctacagccccagatggaagggcagatgggccaacgacggctggagatgccccagaggcaacgacagatacagaaagaacgaccccgagaagcagaacgagaacaccagaaaggagaagaacgacatccacctggacgccgacgaccccaacagcgccgacaagcacagaaacgactgccccaactggatcaccgagaagatcaacagcggccccgaccccagaaccagaaaccccgagaagctgaaggagagccactgggaggagaacagaaacgagaacagcggcaacagctggaacaagaacttcggcagcggctgggtgagcaacagaggcagaggcagaggcaacagaggcagaggcacctacagaagcagcttcgcctacaaggaccagaacgagaacagatggcagaacagaaagcccctgagcggcaacagcaacagcagcggcagcgagagcttcaagttcgtggagcagcagagctacaagagaaagagcgagcaggagttcagcttcgacacccccgccgacagaagcggctggaccagcgccagcagctgggccgtgagaaagaccctgcccgccgacgtgcagaactactacagcagaagaggcagaaacagcagcggcccccagagcggctggatgaagcaggaggaggagaccagcggccaggacagcagcctgaaggaccagaccaaccagcaggtggacggcagccagctgcccatcaacatgatgcagccccagatgaacgtgatgcagcagcagatgaacgcccagcaccagcccatgaacatcttcccctaccccgtgggcgtgcacgcccccctgatgaacatccagagaaaccccttcaacatccacccccagctgcccctgcacctgcacaccggcgtgcccctgatgcaggtggccacccccaccagcgtgagccagggcctgcccccccccccccccccccccccccccagccagcaggtgaactacatcgccagccagcccgacggcaagcagctgcagggcatccccagcagcagccacgtgagcaacaacatgagcacccccgtgctgcccgcccccaccgccgcccccggcaacaccggcatggtgcagggccccagcagcggcaacaccagcagcagcagccacagcaaggccagcaacgccgccgtgaagctggccgagagcaaggtgagcgtggccgtggaggccagcgccgacagcagcaagaccgacaagaagctgcagatccaggagaaggccgcccaggaggtgaagctggccatcaagcccttctaccagaacaaggacatcaccaaggaggagtacaaggagatcgtgagaaaggccgtggacaaggtgtgccacagcaagagcggcgaggtgaacagcaccaaggtggccaacctggtgaaggcctacgtggacaagtacaagtacagcagaaagggcagccagaagaagaccctggaggagcccgtgagcaccgagaagaacatcggctag

SEQ ID NO: 148998 - DNA, 3447 bp, Artificial Sequence
  derived and/or modified sequence
atgaccacccccaccagaagaagcaccagaaacaccagagccgagaccgccagccagagccagagaagccccatcagcgacaacagcggctgcgacgcccccggcaacagcaaccccagcctgagcgtgcccagcagcgccgagagcgagaagcagaccagacaggcccccaagagaaagagcgtgagaagaggcagaaagccccccctgctgaagaagaagctgagaagcagcgtggccgcccccgagaagagcagcagcaacgacagcgtggacgaggagaccgccgagagcgacaccagccccgtgctggagaaggagcaccagcccgacgtggacagcagcaacatctgcaccgtgcagacccacgtggagaaccagagcgccaactgcctgaagagctgcaacgagcagatcgaggagagcgagaagcacaccgccaactacgacaccgaggagagagtgggcagcagcagcagcgagagctgcgcccaggacctgcccgtgctggtgggcgaggagggcgaggtgaagaagctggagaacaccggcatcgaggccaacgtgctgtgcctggagagcgagatcagcgagaacatcctggagaagggcggcgaccccctggagaagcaggaccagatcagcggcctgagccagagcgaggtgaagaccgacgtgtgcaccgtgcacctgcccaacgacttccccacctgcctgaccagcgagagcaaggtgtaccagcccgtgagctgccccctgagcgacctgagcgagaacgtggagagcgtggtgaacgaggagaagatcaccgagagcagcctggtggagatcaccgagcacaaggacttcaccctgaagaccgaggagctgatcgagagccccaagctggagagcagcgagggcgagatcatccagaccgtggacagacagagcgtgaagagccccgaggtgcagctgctgggccacgtggagaccgaggacgtggagatcatcgccacctgcgacaccttcggcaacgaggacttcaacaacatccaggacagcgagaacaacctgctgaagaacaacctgctgaacaccaagctggagaagagcctggaggagaagaacgagagcctgaccgagcaccccagaagcaccgagctgcccaagacccacatcgagcagatccagaagcacttcagcgaggacaacaacgagatgatccccatggagtgcgacagcttctgcagcgaccagaacgagagcgaggtggagcccagcgtgaacgccgacctgaagcagatgaacgagaacagcgtgacccactgcagcgagaacaacatgcccagcagcgacctggccgacgagaaggtggagaccgtgagccagcccagcgagagccccaaggacaccatcgacaagaccaagaagcccagaaccagaagaagcagattccacagccccagcaccacctggagccccaacaaggacaccccccaggagaagaagagaccccagagccccagccccagaagagagaccggcaaggagagcagaaagagccagagccccagccccaagaacgagagcgccagaggcagaaagaagagcagaagccagagccccaagaaggacatcgccagagagagaagacagagccagagcagaagccccaagagagacaccaccagagagagcagaagaagcgagagcctgagccccagaagagagaccagcagagagaacaagagaagccagcccagagtgaaggacagcagccccggcgagaagagcagaagccagagcagagagagagagagcgacagagacggccagagaagagagagagagagaagaaccagaaagtggagcagaagcagaagccacagcagaagccccagcagatgcagaaccaagagcaagagcagcagcttcggcagaatcgacagagacagctacagccccagatggaagggcagatgggccaacgacggctggagatgccccagaggcaacgacagatacagaaagaacgaccccgagaagcagaacgagaacaccagaaaggagaagaacgacatccacctggacgccgacgaccccaacagcgccgacaagcacagaaacgactgccccaactggatcaccgagaagatcaacagcggccccgaccccagaaccagaaaccccgagaagctgaaggagagccactgggaggagaacagaaacgagaacagcggcaacagctggaacaagaacttcggcagcggctgggtgagcaacagaggcagaggcagaggcaacagaggcagaggcacctacagaagcagcttcgcctacaaggaccagaacgagaacagatggcagaacagaaagcccctgagcggcaacagcaacagcagcggcagcgagagcttcaagttcgtggagcagcagagctacaagagaaagagcgagcaggagttcagcttcgacacccccgccgacagaagcggctggaccagcgccagcagctgggccgtgagaaagaccctgcccgccgacgtgcagaactactacagcagaagaggcagaaacagcagcggcccccagagcggctggatgaagcaggaggaggagaccagcggccaggacagcagcctgaaggaccagaccaaccagcaggtggacggcagccagctgcccatcaacatgatgcagccccagatgaacgtgatgcagcagcagatgaacgcccagcaccagcccatgaacatcttcccctaccccgtgggcgtgcacgcccccctgatgaacatccagagaaaccccttcaacatccacccccagctgcccctgcacctgcacaccggcgtgcccctgatgcaggtggccacccccaccagcgtgagccagggcctgcccccccccccccccccccccccccccagccagcaggtgaactacatcgccagccagcccgacggcaagcagctgcagggcatccccagcagcagccacgtgagcaacaacatgagcacccccgtgctgcccgcccccaccgccgcccccggcaacaccggcatggtgcagggccccagcagcggcaacaccagcagcagcagccacagcaaggccagcaacgccgccgtgaagctggccgagagcaaggtgagcgtggccgtggaggccagcgccgacagcagcaagaccgacaagaagctgcagatccaggagaaggccgcccaggaggtgaagctggccatcaagcccttctaccagaacaaggacatcaccaaggaggagtacaaggagatcgtgagaaaggccgtggacaaggtgtgccacagcaagagcggcgaggtgaacagcaccaaggtggccaacctggtgaaggcctacgtggacaagtacaagtacagcagaaagggcagccagaagaagaccctggaggagcccgtgagcaccgagaagaacatcggctag

SEQ ID NO: 148999 - DNA, 4392 bp, Artificial Sequence
  derived and/or modified sequence
atgaagaagaaaacggtgtgcacattgaatatgggggacaagaaatatgaggacatggagggggaggagaacggagacaatacaatttccactggccttctctactctgaagctgacagatgccctatctgccttaattgccttctcgagaaagaagtcggctttcccgaaagttgtaaccacgtgttttgtatgacttgcatcctgaagtgggccgaaaccttggcctcatgccctattgatcgtaagccattccaggccgtttttaagttcagtgcactggagggttatgtgaaagtacaagtgaaaaagcagctgagagaaacgaaagacaaaaagaacgagaattccttcgagaaacaggtgagctgccacgagaattcaaagtcctgcattaggagaaaagcaatcgtccgagaagatctcttatctgccaaggtatgtgatttgaagtggatccatagaaactccctgtatagcgagacgggagggaagaaaaacgctgccataaagataaacaagccacagcgtagcaactggtccactaaccagtgtttccggaatttcttcagcaacatgttctcctccgtaagccacagtggtgaatccagttttacctatcgagcctactgcactgagttcattgaagcctcagagattagtgccttaatccgacagaaacggcatgaactggaactgtcttggttccctgacaccttgcctggaattggccgaattggattcattccttggaacgtggaaaccgaggtgctccccttgataagtagcgtgttgccaaggactatctttcccacatccacaatctcttttgaacatttcggcacatcgtgcaaaggctatgcactcgctcatactcaggaaggtgaagaaaagaaacaaacatctggcacgagcaataccagaggcagccgacggaagcccgcaatgactacccctacccgtcgctcaacgaggaacacaagagcagaaaccgcctcacagtcccagagatcccctatttcagataacagcggttgtgatgcacccggcaattctaacccgtctttaagtgttccttcctccgctgagtcagagaagcaaacacgccaagcccctaagcgaaaatccgttcgcagaggcaggaagccccccctgctgaagaaaaagctcaggtcatcagtagccgctcccgagaagtcttcctcaaatgactcagtcgatgaagagactgccgagtctgacacctcccctgtactagaaaaagaacatcaaccagatgtggattccagcaatatttgcaccgtgcagacccacgtggagaaccagtcagcaaattgcctgaagtcttgcaatgagcagattgaggaatctgaaaagcatactgccaattacgacacggaggagcgggttggaagctctagctctgaatcttgtgcacaggacctgccagtgttagtgggggaggaaggggaggtgaagaaactggagaatacgggcattgaggccaacgtcctatgtctggagtcagagattagcgaaaatattctggagaagggaggcgatcccctggagaagcaggaccagatctccggtctgagccagagcgaagtcaaaaccgacgtgtgcacagttcatctacctaatgatttcccgacatgtcttactagtgaaagtaaagtttaccagcctgtgtcctgccccttgtctgacttatctgagaacgttgagtcagtggtgaatgaggaaaaaattaccgagagcagtctggtggaaattactgagcacaaagactttaccctgaaaactgaggagctgattgagtcccccaagctcgaaagctcagagggtgagattattcagactgtggaccggcagagcgtaaagagccccgaggtgcagctgctggggcacgtggagaccgaagacgtagagattatagctacctgcgacacgtttggaaacgaagatttcaacaatatacaggactctgagaataatctgttaaaaaacaacttactcaatacgaaactagagaagtctttggaagagaagaatgagagtttaaccgaacatcccaggtcaaccgagctcccgaagacccacatcgagcagatccaaaaacacttttccgaggacaacaacgagatgatccccatggaatgtgattctttctgctccgaccagaatgaaagtgaagtcgaacccagtgtgaatgccgatctgaaacagatgaatgaaaatagcgttacccactgttccgagaataacatgccgtcctctgacctggccgacgaaaaggtcgagacagtgagccagccgtccgaaagcccaaaggacactatagataagaccaagaagccccggacacgacgtagtcgtttccacagtccttcaaccacctggtcacccaataaggatacccctcaagagaagaagcgccctcaatctcctagtcctcgtcgtgagactggcaaggaaagcaggaaaagccaatcgcctagccccaaaaacgaaagcgcaaggggcagaaagaagtctcggagtcagtcccccaaaaaggatatagccagggagcggcggcaatcccagagccggtctccaaagagagacacaaccagggagagcagacggagtgaatcactgtcccctcgacgcgaaacttcccgggagaacaaaagatcccagccacgggtcaaggacagtagtcctggggaaaaatcacgctctcagtctcgggaacgcgagagcgatcgcgacgggcagcgacgcgaacgggagcggcgcacccgcaagtggagccgctcccggagccattcaagatctccgagtagatgcaggactaaatcaaagtcttcatcatttggaaggattgatagagatagctattccccacgctggaaaggtagatgggcaaacgacggctggcgctgcccaagaggaaatgatcggtaccggaagaacgacccagagaagcaaaatgaaaacacccgcaaggagaagaatgacattcatctcgacgcagacgatcctaacagcgcagataagcatagaaacgactgtcctaattggattacagagaagatcaacagcggtccagatccacgcacgcgcaaccccgaaaagctgaaagagtcgcactgggaggaaaaccgtaatgagaacagcgggaattcgtggaataaaaacttcggatcaggttgggtgagcaaccgcggtaggggccgaggcaaccgcgggagagggacctaccgatcctcttttgcctacaaggaccagaatgaaaatcgctggcagaatagaaagcctctgagcggaaacagtaacagcagcgggtccgaaagctttaagtttgttgagcaacagagctacaagagaaagtcagaacaggagttttcttttgatacacccgccgatcgttctggctggacgagcgccagttcatgggcagtgagaaagactcttcctgccgatgtgcagaattactattcacggaggggcagaaattcaagcgggccccagtccggctggatgaagcaggaagaagaaacttcgggccaggattcaagcctgaaagaccagaccaaccaacaggttgatgggtctcagcttcctatcaacatgatgcagccacagatgaatgtcatgcaacaacaaatgaatgctcaacaccaacccatgaacatcttcccctatccagtgggtgttcatgctcctctgatgaatatacaaagaaatccgttcaatatacacccacagctgccattgcaccttcacaccggcgtgcctctcatgcaagtggccacaccaacatcggtgtcgcagggcctgcccccccccccaccaccccctccccctagccagcaggtaaattacattgcgtcccaacctgacggtaagcaacttcagggcattccttccagctctcacgtttcgaataacatgtcgacgcccgttctgccggcaccaaccgctgccccagggaacaccgggatggtgcagggcccctcctctgggaacacatcaagtagctcacatagcaaagccagtaatgctgctgtcaaactggccgaaagcaaggtgtccgtcgcagtcgaagctagtgccgactcaagtaagaccgacaaaaaacttcagatccaggaaaaggccgcccaggaggtcaagctcgctattaagcccttctaccagaacaaagacattacaaaggaggaatacaaagaaatagtaagaaaggcagtcgataaggtctgtcacagcaagagcggcgaggtgaacagtacgaaagtcgcaaacctggtgaaagcgtatgttgataagtataagtattccagaaagggatcccaaaagaagacactggaggagccggtgagtaccgagaagaatattggctag

SEQ ID NO: 149000 - DNA, 4392 bp, Artificial Sequence
  derived and/or modified sequence
atgaagaagaagacagtgtgcacgctaaacatgggcgacaaaaaatacgaagatatggaaggggaggaaaacggggacaatacaatttcaactgggttactgtactcagaggcagacagatgccccatttgcctcaattgccttctggaaaaagaggtgggattcccagaatcttgtaatcacgttttctgcatgacctgcattctaaaatgggctgagacgctcgcatcttgtcctattgatagaaagcctttccaggcagtgtttaagttttcagcactggaagggtacgtcaaggtgcaggtgaagaaacagctgcgggaaacaaaggataagaagaacgagaattcctttgagaaacaggtttcatgccacgaaaattctaagtcatgcattagaagaaaggctattgtgagagaagacctcctgagcgccaaagtgtgcgatctcaaatggattcacaggaatagcctgtacagcgagacagggggtaagaaaaacgctgctataaaaattaataagccacaacggtcaaactggtccaccaatcagtgctttcgcaactttttttccaacatgttctcctcggtaagtcatagtggggaatcctcttttacatacagggcatactgcacagagttcatagaagccagcgagatcagtgccttaattcgccagaaaagacatgaactggagctgtcttggttccctgatacactgcccggtattggcaggattggttttatcccttggaatgtggagacagaggttcttcctctgatctcttctgtgctgccccgcacgatttttccaacatccacgataagttttgaacactttgggacgtcatgtaagggctacgctctggctcatacacaggagggcgaggagaaaaagcagacctctggcacaagcaacactaggggctcgcggcgcaagcccgcaatgaccacgcccacccgacggtccacccggaacactcgcgccgaaacagcttcacagagtcagcggtcacctatctcagataactctggatgcgacgcccccggcaactcaaatccatccttatcagtgcccagctcagcggaatctgagaagcagactagacaggcaccaaagcgcaaatctgtgcgtcgcgggaggaagccaccactgctgaaaaaaaagctgaggagttcagtggctgcgcccgagaagagttctagtaacgactccgttgacgaagaaaccgccgagagcgacacgtctccagtgttagagaaggaacaccagccagatgtggatagtagcaatatctgtaccgtgcagacacacgttgagaatcagtcagcaaattgcctgaaatcctgcaacgagcaaattgaagagtccgagaaacacacggccaactacgacaccgaagagcgagtgggttcttcatctagtgaaagctgtgcccaggacctgcctgtgcttgtgggggaagagggagaggtgaagaagttggaaaataccggaatcgaagccaacgtcctctgcctggagagcgagatctccgaaaacatccttgaaaagggaggggacccgctagagaaacaggaccaaatttctgggctctcccaatcagaggttaaaactgatgtttgtacagttcatctgccgaatgattttccaacttgcctaacttcagagagcaaagtctatcagcctgtctcatgccctttaagtgaccttagcgaaaacgtagagagtgtggtcaacgaggagaaaatcacagaaagctcactggttgagattacagaacataaagattttacactcaagacggaggagttgatcgagagcccgaagctggaaagctccgagggcgagataattcagacagtggaccgtcaaagcgtgaaatcacctgaagtgcaattgcttggtcacgtggaaacagaagatgttgagattattgctacgtgtgatacattcggaaacgaggattttaataatatccaggatagcgagaacaatcttctgaagaataatttgttaaacaccaaactggaaaagtcactcgaggagaagaacgagtccttaaccgagcacccccgatctactgaactgcccaagacccacattgagcagattcagaaacatttcagcgaagataacaatgaaatgatccccatggaatgtgactcattctgcagtgatcaaaatgaatcagaagtcgaaccttccgtaaacgccgatcttaaacagatgaatgagaacagcgtgacccattgttccgagaataatatgccctcctcagatctggcagatgaaaaagttgagacagtttctcagccgtccgagtctcccaaggatacaatagataagactaagaagcctaggacccgtcggtccagattccatagtccaagcactacatggtcccccaacaaggacacaccccaggaaaaaaaacgtccacagtctccatcacctcggagagagaccggcaaagaatcaaggaaatcccagtccccctctccgaaaaacgagtccgccaggggtagaaaaaagtctcggagtcaatctccaaagaaggacatcgcgagggaaaggaggcagtcacagtcacgctccccgaaacgcgacaccactcgggagtcccgcagatccgaaagtctgagccctagacgggagacatccagagaaaacaaaagatcccagccaagagtaaaggatagctctcccggagagaaaagcagatcccaatcaagagaacgagagtcagaccgcgatggccaaagacgcgagcgcgagcggaggacaagaaagtggagtaggtccagatcgcattcaaggagtccatcaaggtgccgcacaaagtccaagtcaagctccttcgggaggattgaccgagattcctattccccccgttggaagggtagatgggcgaatgatggctggcgctgtccccgcgggaatgacaggtaccgcaagaacgacccggagaagcagaacgaaaatacaagaaaagaaaaaaacgatattcatctcgacgccgacgatcctaacagcgccgacaagcatcgtaatgattgtcccaactggattacggaaaaaataaattcaggtcctgaccctcgaaccaggaatcccgaaaagctcaaggaatcacattgggaggagaatcggaacgaaaacagcggcaatagttggaacaagaactttgggagcgggtgggtgtccaaccgcggacgagggcgtgggaacagggggagaggcacttatcggagttctttcgcctacaaggaccagaacgaaaatagatggcagaaccgaaagcccctgagtggcaattccaattctagcggctctgagtcattcaagtttgttgagcaacagtcctacaaaagaaagtccgagcaggaattctccttcgacactcccgccgataggagcggttggacctcggcaagctcctgggcggttcggaaaacgttgcccgccgatgtgcagaactattattccagacggggacgtaactcctccggccctcagtccgggtggatgaaacaggaggaagaaaccagcgggcaagactcgagccttaaagaccaaactaatcagcaggtcgacggatcacagctccctattaacatgatgcagcctcagatgaatgtaatgcagcagcagatgaacgcacagcaccagcccatgaacatctttccatatcccgtgggcgtgcatgctccactcatgaacatccagaggaacccgttcaatatccatccacagcttccccttcatctgcacacgggagtgccactgatgcaagttgccacccctacttctgtgtcccagggtctccccccacccccccccccacctccgccctctcagcaggtcaattacatcgcttcacagcccgacggcaaacagttacagggcattccaagtagctcacacgtctccaacaacatgtccacaccggttcttccggcccctaccgctgcccccggaaatactgggatggtgcaggggccctcatccggtaatacatcttcctcctcccactctaaggccagtaatgccgctgtcaaactggccgagagcaaagtgtcagtggccgtggaggcctctgccgacagtagcaagactgacaagaagctccagatccaggaaaaagccgctcaggaggtgaagctagccattaagcccttctatcaaaataaagatattactaaggaagaatataaggagattgttagaaaggcagtggataaagtgtgtcacagcaaaagcggagaagtcaacagcaccaaagtcgctaacctagttaaggcttacgtcgataagtacaaatactctcgtaagggatcccagaagaagactctggaggagcccgtttccaccgaaaaaaacattgggtag

SEQ ID NO: 149001 - DNA, 3447 bp, Artificial Sequence
  derived and/or modified sequence
atgaccacaccaaccaggaggtccacaaggaataccagagcagaaacagcgtcacaaagccagcggagcccgatatccgacaactcaggctgcgacgccccaggcaactctaatccaagcttgtctgtgccgtcaagcgcggagagtgaaaagcagacaagacaagctccaaaaaggaagagcgtgaggaggggccggaaaccaccactgcttaaaaagaagctgaggtccagcgttgcagcaccggagaaatcatcctcaaacgactccgttgacgaggaaacggccgaaagcgacactagccctgtgctagagaaggagcaccagccagatgtcgactcatccaatatttgtaccgtgcagacccacgtggaaaaccagtcggctaactgtctgaagagctgcaatgagcagatagaggagagcgaaaaacacaccgcgaactacgacactgaagagcgggtagggagtagctcgtcagaatcctgcgcccaagaccttccagttctagttggggaggagggagaagttaaaaaactagagaacacaggaattgaagccaacgttctgtgtctagagagcgaaatatctgaaaacatcctggagaaaggcggggaccccttggagaagcaggatcagatcagcggtctctcacagtcggaggtgaaaaccgatgtatgtacagtgcacttacctaatgatttcccaacgtgtttgactagcgagtccaaagtgtatcagcctgtgtcgtgcccccttagcgatttgagcgagaatgtggagagcgtagtgaacgaggaaaaaattactgaaagcagtctcgtggagatcactgaacataaagacttcaccttgaaaactgaggagctgatcgaatcaccaaaacttgagtctagcgaaggtgaaattatccagacagtggaccggcagtccgtgaagtcacccgaggtacagctactcggtcacgttgagactgaggatgtcgaaataatcgccacttgcgatacatttggtaatgaggattttaataatattcaggactccgagaacaacctgcttaagaacaaccttctgaatactaaactagagaaatccctggaagagaaaaacgaaagtctcacggagcacccacggagtacagagctccctaaaacccacatcgaacagatccagaagcatttcagcgaggataacaacgagatgatacccatggagtgcgattcattctgctctgaccaaaacgaatccgaggtagagccttcagtcaatgcagatcttaagcagatgaatgagaattcagtaacccattgtagcgaaaacaacatgccttcaagcgatttggccgatgagaaagtggaaaccgtctcacagccgagtgaatcgccaaaggacaccatcgacaagaccaaaaaaccaagaaccagacggtctaggttccactcccctagcactacatggagccccaacaaagacacaccacaggaaaaaaaaaggccacaaagcccgagtcctagaagagagaccggtaaagagtcgcgtaaaagccaaagcccttcaccaaaaaacgagagtgccagggggcgtaagaagagtcgcagtcagtcgccaaagaaagacattgcccgggaaaggcggcagtcgcagtccaggagcccaaaaagggatacgactagggaaagtcgccgctctgaatccctgagcccaaggcgcgagacaagccgggagaacaagcggagccagccaagagtgaaagacagcagccccggggaaaagtccaggagccaatcgagagagcgtgaatccgacagggacggccagagacgcgaaagggagcgccgcacacgcaagtggagcaggagtcggagtcactctcgtagtccatcccgatgtcgtacaaagagcaaaagcagtagcttcggccgtatagaccgggactcatacagtcctcgctggaagggccggtgggctaacgacgggtggcgttgtcccagagggaacgacagatatagaaaaaacgatcccgaaaagcaaaatgagaacacaagaaaggaaaagaacgacattcacctcgatgccgatgaccccaactccgccgataaacaccgcaatgactgccctaactggatcactgagaaaataaactccggccctgaccctagaacaagaaaccctgaaaagttgaaagagtcacactgggaggagaatagaaacgagaattcaggcaattcctggaataagaactttgggtctggatgggtaagcaaccggggacgtgggagagggaaccgtggcagagggacatatcgctcgtcctttgcgtataaggatcagaacgaaaataggtggcagaatcggaagcccctaagtggcaactcaaatagttccggcagtgaaagcttcaaatttgtggagcagcaatcctataagcgcaaaagtgagcaggaattctcattcgacacgcccgctgataggagcggctggacctctgcaagctcttgggcagttcggaaaacgttgcccgccgatgtgcagaattattactccagacgtggaaggaatagtagcggtcctcagtcaggatggatgaagcaggaagaggaaacatccgggcaagacagttcacttaaagaccagactaatcagcaggtggacgggtcccagctgccaatcaacatgatgcagccccagatgaacgtcatgcagcagcagatgaatgcacaacatcagcctatgaacatattcccgtatccagtgggcgtgcacgcccccctcatgaacatccaaaggaatccttttaacatacaccctcagctccccctgcacctgcataccggagtgccactgatgcaggtggcaacccccacgtcagtgagccagggcctgcccccgccaccgccaccccccccgccatcccagcaggtgaattacattgcctctcaaccagacggtaagcaattgcagggcattccttcttccagccacgtcagtaataacatgagtactcccgtattgccggcccccaccgcagcgcctggcaacaccggcatggttcaggggccaagcagcggtaacacatcatccagttcacactctaaagcgtcaaacgccgcagtcaagctggccgaatccaaggttagcgttgccgtcgaagcctcggcagacagctccaaaaccgacaaaaaattacaaatccaggagaaagccgctcaagaggtgaagctggcaatcaaaccattctatcagaataaggacataactaaagaggaatacaaggagatcgtgaggaaggcagtggacaaggtctgccacagcaagtcaggcgaggttaattccacgaaagttgccaatttggtcaaggcttatgtggataaatataagtacagtcgaaagggctctcagaagaagacgttagaagaacctgtgtcaacagaaaagaacatcgggtag

SEQ ID NO: 149002 - DNA, 4392 bp, Artificial Sequence
  derived and/or modified sequence
atgaagaagaagacagtgtgcaccctgaacatgggagacaagaagtatgaggacatggagggggaggagaatggagacaacaccatcagcacaggcctgctgtacagcgaggccgaccgctgccccatctgcctgaactgcctgctggagaaggaggtgggcttccctgagagctgcaaccacgtgttctgcatgacctgcatcctgaagtgggccgagaccctggccagctgccccatcgacaggaagcccttccaggccgtgttcaagttcagcgccctggagggctacgtgaaggtgcaggtgaagaagcagctgcgggagaccaaggacaagaagaatgaaaattcctttgagaagcaggtgtcctgccacgagaacagcaagagctgcatccggaggaaggccatcgtgcgggaggacctgctgagcgccaaggtgtgtgacctgaagtggatccacaggaacagcctgtacagcgagaccggcggcaagaagaatgctgccatcaagatcaacaagccccagaggagcaactggagcaccaaccagtgcttcaggaacttcttcagcaacatgttcagctctgtgagccacagcggggagagcagcttcacctaccgggcctactgcacagagttcatcgaggccagcgagatcagcgccctgatccggcagaagagacatgagctggagctgtcctggttcccagacaccctgcccggcatcggccgcatcggcttcatcccctggaatgtggagacagaggtgctgcccctcatcagctctgtgctgcccaggaccatcttccccaccagcaccatcagctttgagcacttcggcaccagctgcaagggctacgccctggcccacacccaggagggggaggagaagaagcagaccagcggcaccagcaacacccggggcagcaggaggaagccagccatgaccacccccaccaggaggagcaccaggaacaccagggctgagacagccagccagagccagaggagccccatcagtgacaacagcggctgtgatgcccctggcaacagcaaccccagcctgtctgtgcccagcagcgctgagagcgagaagcagacccggcaggcccccaagaggaagtctgtgcggcggggcaggaagccacccctgctgaagaagaagctgcggagctctgtggccgcccctgagaagagcagcagcaatgattctgtggatgaggagacagctgagagtgacaccagccctgtgctggagaaggagcaccagccagatgtggacagcagcaacatctgcaccgtgcagacccacgtggagaaccagagcgccaactgcctgaagagctgcaatgagcagatcgaggagagcgagaagcacacagccaactatgacacagaggagcgggtgggcagcagcagcagcgagagctgtgcccaggacctgcctgtgctggtgggggaggagggggaggtgaagaagctggagaacacaggcatcgaggccaacgtgctgtgcctggagagcgagatcagcgagaacatcctggagaagggcggggaccccctggagaagcaggaccagatcagcggcctgagccagagcgaggtgaagacagatgtgtgcaccgtgcacctgcccaatgacttccccacctgcctgaccagcgagagcaaggtgtaccagcctgtgtcctgccccctgagtgacctgtctgaaaatgtggagagcgtggtgaatgaggagaagatcacagagagcagcctggtggagatcacagagcacaaggacttcaccctgaagacagaggagctgattgagagccccaagctggagagcagcgagggggagatcatccagacagtggaccggcagagcgtgaagagccctgaggtgcagctgctgggccacgtggagacagaagatgtggagatcatcgccacctgtgacacctttggaaatgaagacttcaacaacatccaggacagcgagaacaacctgctgaagaacaacctgctgaacaccaagctggagaagagcctggaggagaagaatgaaagcctgacagagcaccccaggagcacagagctgcccaagacccacatcgagcagatccagaagcacttcagcgaggacaacaatgagatgatccccatggagtgtgacagcttctgcagcgaccagaatgaaagtgaggtggagcccagcgtgaatgctgacctgaagcagatgaatgaaaacagcgtgacccactgcagcgagaacaacatgcccagcagtgacctggctgatgagaaggtggagaccgtgtcccagcccagcgagagccccaaggacaccatcgacaagaccaagaagcccaggacccggcgcagccgcttccacagccccagcaccacctggagccccaacaaggacaccccccaggagaagaagaggccccagagccccagcccccggcgggagaccgggaaggagagcaggaagagccagagccccagccccaagaatgaaagtgcccggggcaggaagaagagccgcagccagagccccaagaaggacatcgcccgggagcggcggcagagccagagccgcagccccaagagggacaccacccgggagagccgccgctctgagagcctgagcccccggcgggagaccagccgggagaacaagaggagccagccccgggtgaaggacagcagccctggagagaagagccgcagccagagccgggagcgggagagtgacagagatggccagaggcgggagcgggagaggaggaccaggaagtggagccgcagccgcagccacagccgcagccccagccgctgcaggaccaagagcaagagcagcagctttggaagaattgaccgggacagctacagcccccgctggaagggccgctgggccaatgatggctggcgctgccccagaggaaatgaccgctacaggaagaatgaccctgagaagcagaatgaaaacaccaggaaggagaagaatgacatccacctggatgctgatgaccccaacagcgctgacaagcacagaaatgactgccccaactggatcacagagaagatcaacagcggccctgaccccaggaccagaaatcctgagaagctgaaggagagccactgggaggagaacagaaatgaaaattctggcaacagctggaacaagaactttggaagtggctgggtgagcaacagaggccggggccggggcaacagaggccggggcacctaccgcagcagctttgcctacaaggaccagaatgaaaatcgctggcagaacaggaagcccctgagcggcaacagcaacagcagcggcagcgagagcttcaagtttgtggagcagcagagctacaagaggaagtctgagcaggagttctcctttgacaccccagctgacaggagcggctggaccagcgccagctcctgggccgtgaggaagaccctgcctgcagatgtgcagaactactacagccggcggggcaggaacagcagcggcccccagagcggctggatgaagcaggaggaggagaccagcggccaggacagcagcctgaaggaccagaccaaccagcaggtggatggcagccagctgcccatcaacatgatgcagccccagatgaatgtgatgcagcagcagatgaatgcccagcaccagcccatgaacatcttcccctaccctgtgggcgtgcacgcccccctgatgaacatccagaggaaccccttcaacatccacccccagctgcccctgcacctgcacactggagtgcccctgatgcaggtggccacccccacctctgtgtcccagggcctgcccccacctcctcctcctcctccacccagccagcaggtgaactacatcgccagccagccagatggcaagcagctgcagggcatccccagcagcagccacgtgagcaacaacatgagcacccctgtgctgcctgcccccacagctgcccctggcaacacaggcatggtgcagggccccagcagcggcaacaccagcagcagcagccacagcaaggccagcaatgctgctgtgaagctggccgagagcaaggtgtctgtggccgtggaggccagcgctgacagcagcaagacagacaagaagctgcagatccaggagaaggccgcccaggaggtgaagctggccatcaagcccttctaccagaacaaggacatcaccaaggaggagtacaaggagatcgtgaggaaggctgtggacaaggtgtgccacagcaagtctggagaggtgaacagcaccaaggtggccaacctggtgaaggcctacgtggacaagtacaagtacagcaggaagggcagccagaagaagaccctggaggagcctgtgtccacagagaagaacatcggctag

SEQ ID NO: 149003 - DNA, 3447 bp, Artificial Sequence
  derived and/or modified sequence
atgaccacccccacccggcgcagcaccaggaacaccagggctgagacagccagccagagccagaggagccccatcagtgacaacagcggctgtgatgcccctggcaacagcaaccccagcctgtctgtgcccagcagcgctgagagcgagaagcagacccggcaggcccccaagaggaagtctgtgagaagaggaaggaagccacccctgctgaagaagaagctgcggagctctgtggccgcccctgagaagagcagcagcaatgacagcgtggatgaggagacagctgagagtgacaccagccctgtgctggagaaggagcaccagccagatgtggacagcagcaacatctgcaccgtgcagacccacgtggagaaccagagcgccaactgcctgaagagctgcaatgagcagatcgaggagagcgagaagcacacagccaactatgacacagaggagcgggtgggcagcagcagcagcgagagctgtgcccaggacctgcctgtgctggtgggggaggagggggaggtgaagaagctggagaacacaggaattgaggccaacgtgctgtgcctggagagcgagatcagcgagaacatcctggagaagggcggggaccccctggagaagcaggaccagatcagcggcctgagccagagcgaggtgaagacagatgtgtgcaccgtgcacctgcccaatgacttccccacctgcctgaccagcgagagcaaggtgtaccagcctgtgtcctgccccctgagtgacctgtctgaaaatgtggagagcgtggtgaatgaggagaagatcacagagagcagcctggtggagatcacagagcacaaggacttcaccctgaagacagaggagctgattgagagccccaagctggagagcagcgagggggagatcatccagacagtggaccggcagagcgtgaagagccctgaggtgcagctgctgggccacgtggagacagaagatgtggagatcatcgccacctgtgacacctttggaaatgaagacttcaacaacatccaggacagcgagaacaacctgctgaagaacaacctgctgaacaccaagctggagaagagcctggaggagaagaatgaaagcctgacagagcaccccaggagcacagagctgcccaagacccacatcgagcagatccagaagcacttcagcgaggacaacaatgagatgatccccatggagtgtgacagcttctgcagcgaccagaatgaaagtgaggtggagcccagcgtgaatgctgacctgaagcagatgaatgaaaattctgtgacccactgcagcgagaacaacatgcccagcagtgacctggctgatgagaaggtggagaccgtgtcccagcccagcgagagccccaaggacaccatcgacaagaccaagaagcccaggaccaggaggagccgcttccacagccccagcaccacctggagccccaacaaggacaccccccaggagaagaagaggccccagagccccagcccccggcgggagaccgggaaggagagcaggaagagccagagccccagccccaagaatgaaagtgcccggggcaggaagaagagccgcagccagagccccaagaaggacatcgcccgggagcggcggcagagccagagccgcagccccaagagggacaccacccgggagagcagaagaagtgagagcctgagcccccggcgggagaccagccgggagaacaagaggagccagccccgggtgaaggacagcagccctggagagaagagccgcagccagagccgggagcgggagagtgacagagatggccagaggcgggagcgggagaggaggaccaggaagtggagccgcagccgcagccacagccgcagccccagccgctgcaggaccaagagcaagagcagcagctttggaagaattgaccgggacagctacagcccccgctggaagggccgctgggccaatgatggctggcgctgccccagaggaaatgaccgctacaggaagaatgaccctgagaagcagaatgaaaacaccaggaaggagaagaatgacatccacctggatgctgatgaccccaacagcgctgacaagcacagaaatgactgccccaactggatcacagagaagatcaacagcggccctgaccccaggaccaggaaccctgagaagctgaaggagagccactgggaggagaacagaaatgaaaacagcggcaacagctggaacaagaactttggcagcggctgggtgagcaacagaggccggggccggggcaacagaggccggggcacctaccgcagcagctttgcctacaaggaccagaatgaaaatcgctggcagaacaggaagcccctgagcggcaacagcaacagcagcggcagcgagagcttcaagtttgtggagcagcagagctacaagaggaagtctgagcaggagttctcctttgacaccccagctgacagaagtggctggaccagcgccagctcctgggccgtgaggaagaccctgcctgcagatgtgcagaactactacagcagaagaggaagaaacagcagcggcccccagagcggctggatgaagcaggaggaggagaccagcggccaggacagcagcctgaaggaccagaccaaccagcaggtggatggcagccagctgcccatcaacatgatgcagccccagatgaatgtgatgcagcagcagatgaatgcccagcaccagcccatgaacatcttcccctaccctgtgggcgtgcacgcccccctgatgaacatccagaggaaccccttcaacatccacccccagctgcccctgcacctgcacactggagtgcccctgatgcaggtggccacccccacctctgtgtcccagggcctgcccccacctcctcctcctcctccacccagccagcaggtgaactacatcgccagccagccagatggcaagcagctgcagggcatccccagcagcagccacgtgagcaacaacatgagcacccctgtgctgcctgcccccacagctgcccctggcaacacaggcatggtgcagggccccagcagcggcaacaccagcagcagcagccacagcaaggccagcaatgctgctgtgaagctggccgagagcaaggtgtctgtggccgtggaggccagcgctgacagcagcaagacagacaagaagctgcagatccaggagaaggccgcccaggaggtgaagctggccatcaagcccttctaccagaacaaggacatcaccaaggaggagtacaaggagatcgtgaggaaggctgtggacaaggtgtgccacagcaagagcggggaggtgaacagcaccaaggtggccaacctggtgaaggcctacgtggacaagtacaagtacagcaggaagggcagccagaagaagaccctggaggagcctgtgtccacagagaagaacattggatag

SEQ ID NO: 149004 - DNA, 4392 bp, Artificial Sequence
  derived and/or modified sequence
atgaagaagaagaccgtgtgcaccctgaacatgggcgacaagaagtatgaagacatggagggtgaagagaatggggacaacaccatctccactggcctactctactcagaggctgataggtgtcccatctgtttgaactgtctgcttgagaaggaagtgggtttccccgaatcttgcaaccacgttttctgcatgacctgcattctgaagtgggcggaaaccttggcttcatgccctattgacaggaaaccgttccaggccgtttttaagttctcagccctggaggggtatgtcaaggtgcaggtgaaaaaacagctgagggaaaccaaagataagaaaaacgagaactcattcgagaagcaggtgtcttgccacgaaaactcgaagagctgcatcaggcgtaaggccattgtgagagaagacctgctgtcagcaaaggtgtgtgacctaaaatggatccaccgcaatagtctatatagcgaaacaggcggcaaaaaaaacgccgcaatcaagattaataagccacagaggagtaactggagtaccaaccaatgctttcgcaattttttcagcaatatgttcagtagcgtctcccattcgggggagagttcgttcacctatcgcgcttactgtaccgagtttatcgaagcctctgaaatctctgctttgatcagacaaaagagacacgagcttgaactgagctggttccctgacaccttgccgggtattggacgcatcggctttataccttggaacgtcgaaacagaggtcttgcccttgatttcctcggtcttaccccgaactatctttccgacctccacgatcagttttgagcactttgggacaagctgtaaaggttacgccctggcccatacccaggagggcgaggaaaagaaacagacttcaggcacaagtaacactcgcgggtctcgtagaaagcccgctatgacaactcctacacgaaggtctacgagaaataccagggcagaaaccgctagccagtctcagcggtcccctatttcggacaactccggttgcgacgcgccaggcaattctaatcctagcctgagcgtgccctccagcgccgagtctgagaagcagacacggcaggctcccaagaggaagagcgtgcgacgagggcggaagccccctctgttgaaaaagaaactaaggtccagcgtggccgccccagaaaaaagctcctcaaatgattccgtagacgaggagactgctgagtcggacacgtcgcccgtcctcgagaaggagcatcagccagacgtggacagtagtaatatttgcacagtacaaacccatgttgagaaccagagcgctaattgcctgaagtcttgcaacgaacaaatagaggagtccgagaaacacactgcaaactacgacaccgaagagcgcgtaggcagcagctcctcagagagttgcgcacaggatttacccgtgctggtgggcgaagaaggagaagttaagaagctggagaacactggaatcgaagctaacgtcctttgcctggagagcgaaatcagcgagaatatactggagaagggaggcgatccactggagaaacaggatcaaatcagcggactgagccagtctgaagtgaaaactgatgtgtgcacagttcaccttcctaatgattttcccacttgtctgaccagtgaatcaaaagtgtaccagccagtgtcctgtccgttaagcgacctctccgaaaacgtcgagtcagtggtgaacgaagaaaagatcacggaatctagtttagtggaaattaccgaacacaaggacttcactctgaaaacagaagagcttatcgagtcccctaagctggaaagtagcgagggagagatcatccaaaccgtcgacagacagtcagtaaagtccccagaggtacagctactgggtcatgtagaaactgaggacgttgagattattgcgacatgcgacactttcggcaatgaggactttaacaatatacaagattccgagaataacctccttaaaaataatcttttgaatacaaaactggagaagtctttggaggagaagaatgagagccttaccgagcaccctagaagtactgagttaccgaagacccatattgaacagatccagaaacatttctcggaagacaataacgagatgatcccgatggagtgtgatagcttttgctcagatcagaacgaatctgaggtcgaaccctcagtgaatgctgacctcaaacagatgaacgaaaatagcgtgacccactgtagtgaaaataatatgccctccagcgacctggccgacgagaaagtggagaccgtctcccagccttctgagagtcccaaagacaccatcgataagacaaaaaagccccgcaccagaaggagtcggttccatagccctagtacgacctggtcacccaacaaagacacaccacaagagaagaaaaggccacagtcacccagccctcgccgcgagactggcaaagaatcaaggaagagccagagtccatccccaaagaacgaatctgctagaggcaggaaaaagtccagatcgcagtcccccaaaaaggacatagccagagaacggcgccagtcccagagtcggagccccaagagggacactaccagggaaagcagaagatctgaaagccttagcccccggagagagacttcacgggagaataagaggtctcaaccaagagtgaaggatagctctcctggagagaagtctagaagccaaagcagagaaagagagtcagaccgggatggacagagacgtgagcgcgagcggcggacaaggaaatggagtcgaagtcgaagccactcccgcagtccatcaaggtgtagaactaagagcaaatcgagttcattcgggagaatagatcgcgattcctattccccaaggtggaaggggagatgggctaatgacggctggcggtgcccgaggggcaacgataggtaccggaagaatgaccccgaaaaacaaaacgaaaacacacggaaggagaaaaacgatatacatctggacgctgatgaccccaattcagcggataagcaccggaacgactgtcctaactggatcacagaaaaaatcaactcaggccctgatccaagaaccagaaaccccgagaagttgaaggaatcacactgggaagaaaacagaaatgaaaattctggaaattcttggaataagaactttgggagcggatgggtgtccaatcggggacgagggcgaggaaatagggggcgtggaacgtatcggagcagctttgcttacaaggatcaaaatgagaatcgctggcagaatcgcaagcccctttctgggaactccaattcgagtggttctgagagcttcaaattcgtagaacagcagagttataagcgtaagagcgagcaggaattttcttttgatactccggccgaccgcagcggctggacctcagcgtcatcatgggcagttagaaagacccttcctgccgacgtccagaactattattcccggcgggggcgcaacagctctggcccacagagcggatggatgaaacaggaagaagagacctcagggcaggattcatccctgaaagaccaaactaaccaacaggtagatggatcacagctgcctattaatatgatgcagcctcagatgaacgtgatgcaacagcagatgaacgcccagcaccagcctatgaacatctttccatatccagtaggcgtgcacgctccactgatgaatattcagagaaatcccttcaatatacatccccagctgccgctccatctgcatacgggagtgcccctcatgcaggtcgctacccctacgtcggtgtcccagggcctccctcccccacctccacctcctcccccatcccagcaggtgaattacatcgcctcacagcctgacggaaaacagctgcaaggtatccccagctcaagccacgtgagtaataacatgtctactccggtgctgccagccccaacagccgcccctggaaatacaggtatggttcaagggcctagcagcgggaatacatcaagcagctctcatagtaaagcaagtaatgccgccgtgaagctggcagagagcaaagtgtcggtagctgtggaagcctcagctgactcatctaaaactgacaagaagttacaaatccaagaaaaggccgcacaggaggtgaaacttgcaataaaaccgttttaccagaacaaagatattacaaaggaagagtataaggaaattgtccggaaagcagtggacaaagtatgtcacagtaagtcgggagaggtcaactccaccaaggtcgccaatctggtgaaagcttacgtggacaagtacaagtattcccggaagggtagccagaagaagactcttgaagaacctgtatccaccgaaaaaaatataggatag

SEQ ID NO: 149005 - DNA, 4392 bp, Artificial Sequence
  derived and/or modified sequence
atgaagaagaagaccgtgtgcaccctgaacatgggcgacaagaagtacgaagatatggaaggtgaagaaaatggggacaataccatttctacgggactgctatacagtgaagccgaccgttgccccatttgtttaaactgcctgctcgaaaaggaggtcggctttccagagtcttgtaaccatgtgttttgcatgacttgcatcctgaaatgggctgaaactctggcatcctgtccaatcgatcgtaaaccttttcaggcagtattcaaattctccgctcttgaaggatacgttaaggtacaggttaagaagcaactgcgcgaaaccaaagataaaaagaatgagaactctttcgagaagcaagtgtcctgccacgagaattccaaatcttgcattcgccgcaaggccatcgtgcgcgaggatcttttaagtgctaaagtgtgtgacctgaagtggattcaccgaaactcactgtactcagaaaccggaggcaagaaaaacgcagctatcaaaattaataagcctcagagatctaactggtccaccaaccagtgttttcgcaattttttttctaatatgttctcctctgtgtcgcactcaggcgaatccagcttcacctaccgggcttattgtactgagttcatcgaggcatcagaaatctcggccttgattaggcagaagcgccacgagctcgagctcagttggttccccgacaccttgccagggattggaagaatcggatttatcccatggaacgtggaaacagaggtgttgcccctgatttcctcggtgctcccccggactatatttccgacttctactattagctttgagcactttgggacaagttgtaaaggttacgcactggctcacacccaggagggggaagaaaagaagcagacatcgggtactagcaatacaaggggtagccggcgtaaaccggccatgacgacacctactcgcaggtccactcggaacacccgcgcggagacggcatcccaatcacaacggtcacccatttccgacaatagtgggtgcgacgctccagggaattcgaatccatcactcagcgtaccgagctcggcagagagcgaaaaacaaacgcgacaagctcccaagaggaagtcagtcaggcggggcagaaagcccccactcctcaaaaaaaaattgcgatcatctgttgcggctcctgaaaagtcaagctcaaatgacagcgtagatgaagagacagcggaatccgatacctccccggtcctcgaaaaggaacaccagccggacgtggactccagcaacatctgcacagtccagactcatgtcgagaaccaaagtgccaactgcctcaagtcatgcaatgagcagatagaagagagcgaaaaacacacggccaattatgataccgaggagcgagtgggttctagttcttctgaaagttgcgcccaggacctacctgtactggtcggggaagagggcgaagtaaaaaagttagaaaacactggcatagaagctaatgtgctgtgtctggagtccgagattagtgaaaacatactggagaagggaggagacccccttgaaaagcaggaccaaatctccggcctgagccaatcagaggtgaaaactgacgtgtgtactgtccatctaccaaatgactttcccacctgccttacgagtgagagtaaagtatatcagcctgtgtcctgcccactgtcagacctgtcagagaacgtggaaagcgttgtaaatgaagagaagatcacagaatctagcctggttgaaatcactgaacacaaagattttacgctgaagacagaagaactgatagaatctcctaaactagaatcctccgagggcgagataatccagacagtcgatcgccagtcagtgaagtctccggaagtccaactgttgggtcacgttgagactgaggacgtcgaaattatcgccacgtgcgatactttcgggaacgaagactttaacaacatccaagacagtgagaataacctcctcaagaacaatctcctgaataccaaattggaaaagtcactcgaggagaagaatgaaagcctgaccgagcacccccgtagcaccgagctaccgaagacgcacatcgaacagatccaaaagcatttctccgaggacaataacgagatgatacccatggaatgtgatagcttctgtagcgatcagaacgagagcgaggtcgaaccctctgtgaacgctgaccttaagcagatgaatgaaaattctgtcacgcattgtagcgaaaacaatatgccatcctccgatctcgcagatgaaaaagtggagaccgtgtcccagccctcagaaagccccaaagatactattgacaaaacaaaaaaaccccgtaccagacgatcgagatttcacagcccatcgacaacatggtctccaaacaaagacactccccaggaaaagaagagacctcaatcacccagtccacggagagagacagggaaggaaagccgcaagtctcagagcccctcccctaagaacgaaagcgcccggggacggaagaagagcagaagtcagtcacccaagaaggatatagcaagggagcgccgccagagccagtctcggagccccaaaagagatactacgagggaatcgagaaggtccgaaagcctgagtccacggagagagacatctcgcgagaacaagaggagtcagccccgagtgaaggacagttctccgggcgagaagtctcgctcccagtccagagagcgcgaaagcgatagggatggacaaaggcgtgaacgcgagcggcggaccagaaagtggtctcgctccagatctcattcaaggtcaccttcccgatgcaggaccaagtcaaaatcaagctctttcggtagaatcgaccgcgatagctattcaccccgctggaagggtaggtgggccaatgatgggtggcgatgccccaggggtaatgacaggtaccgaaagaatgatccagaaaagcagaacgagaatacgagaaaggagaagaatgacatccatctcgatgccgacgatccgaattctgcggacaagcaccgaaacgactgcccgaactggatcaccgaaaaaattaactccggtccagaccccagaacaagaaatcccgagaaactcaaggagtctcattgggaggagaatcgaaacgagaatagcggcaactcctggaataagaattttgggtccgggtgggtctccaataggggtcgcggccgggggaacaggggaagagggacatatagatctagtttcgcttataaagatcagaacgagaatcgatggcagaaccgcaagccactctccggaaactccaattcgagcggttccgaatcatttaagtttgtggaacagcaatcctacaagcgaaagtccgagcaggagttcagcttcgacacccctgccgatcgctctggatggacttcagcatccagctgggccgtcagaaaaacacttccagccgatgtgcagaattattactcccgacgaggcagaaatagttcaggccctcagagtggatggatgaaacaggaagaggagacctctggacaggactctagcctgaaggatcagaccaaccagcaggtagacggaagccagctgcctataaatatgatgcaacctcaaatgaacgtgatgcagcagcaaatgaacgcacagcaccagcccatgaacatctttccttatccagtcggggttcacgctcctctgatgaacatccaaagaaaccccttcaatatacacccccagctgccactgcaccttcatactggcgtgcccctgatgcaagtcgctactcctacctccgtgtcacagggattgcccccccctcctcctccaccccccccgtcacagcaagtgaactacattgccagtcagcccgacggcaagcagttgcaaggcattccatcctcatcccacgtctctaataatatgagcactcccgtgcttcctgctcctaccgctgctcctggcaacactggtatggtgcaggggccttcctctggaaacacgtcctcaagttctcacagcaaagcaagcaatgccgcagtcaagttagctgagagcaaggtatccgtggccgtggaggcttccgcagacagctctaagacagataaaaagctccagatccaggagaaggcagctcaagaagtgaagttagcaattaaaccattctaccagaacaaggacatcactaaggaagaatacaaagaaatcgttaggaaggctgtcgacaaggtctgccacagtaaatccggcgaggtgaatagcaccaaggttgccaaccttgtcaaggcatacgttgacaaatataaatacagcagaaaaggctctcagaaaaagactcttgaggagccagtttctacagagaaaaacatagggtag

SEQ ID NO: 149006 - DNA, 3447 bp, Artificial Sequence
  derived and/or modified sequence
atgaccacccccacccggcggagcacccggaacacccgggccgagactgcatcacaatcccagaggagcccaatatccgacaactcaggctgtgatgccccaggtaatagcaacccttccctgtccgtcccctccagtgctgagagcgaaaaacaaacccgtcaagcacctaagagaaagagcgttagaagaggcagaaagccacccctgctaaagaaaaaactgcgctccagcgtggcagcccctgagaagtcctctagcaatgattccgtcgatgaagaaactgcagaaagtgacacatcacccgtgctcgaaaaggaacaccagcccgacgtggattcctcaaatatctgcactgttcagacacacgtagaaaatcaatctgctaactgtttgaaaagttgcaacgagcagattgaggaatctgaaaaacataccgcaaattatgacacagaggaaagggtgggatctagttctagcgagtcttgcgctcaagacctccccgtcctcgttggcgaggagggtgaggtcaagaaactggagaatactggaatcgaagccaacgtgttgtgtctggagagtgaaatcagcgagaatatactggaaaaagggggggacccattagagaagcaagaccaaatcagcgggctgagccagtctgaggttaaaaccgatgtgtgtaccgtccacctgccaaacgactttcccacctgccttactagcgagagcaaggtataccagcccgtctcatgccccttgtccgatttatctgagaacgtggagtccgtcgtgaatgaggagaaaattactgagtcaagcttggttgaaattacagagcacaaggacttcacgctcaagaccgaggaactgatcgagagtcccaaacttgagtcttccgagggagagatcatacagaccgtcgatcgacagagcgtgaagtcccccgaagtgcagctactcggccatgttgagaccgaagacgtggaaatcatcgccacctgtgacacgtttggcaacgaggactttaataacattcaagactcagaaaacaacctgctgaagaacaaccttcttaataccaagttggagaaatccctcgaggaaaagaacgagtctctgacagagcaccctagaagcactgagctgccaaaaacccatatcgagcagattcaaaagcacttcagcgaggataacaatgaaatgattcccatggagtgcgactccttttgctccgaccaaaacgaaagcgaggtcgagccaagcgtcaatgcagatctcaagcagatgaacgagaatagcgtcacccactgcagcgaaaataatatgcctagctccgacctggctgacgaaaaggttgaaaccgtgtcccagccatcagagtcacccaaagatacaatcgacaaaaccaaaaagcccagaacacgccggagccgctttcacagtcctagcaccacctggtcccctaataaggacacaccacaggagaagaagcgtccccaatccccatccccgaggagagaaacggggaaggagagcagaaagtctcaatcaccgagtcccaaaaatgagtccgctcggggaagaaaaaagagccggtcccagagcccaaaaaaggatattgctcgggagcgcagacaatcccagtcccggtccccaaagcgagacactactagggagtcaaggagatctgaatccctctctcctagacgggagacctctcgggagaataaacgaagtcaaccacgtgtgaaagattccagccccggggagaaatccagatcccagagccgggaaagagagagtgatagggacgggcagcggagagagagagagcggcgcacgagaaagtggagccgatccagaagtcatagccgctctccttcgaggtgcaggaccaagtcaaaatcatcaagttttggtaggattgaccgcgattcctattctccaaggtggaaaggccgttgggcaaatgacggatggcgttgtccccggggcaacgaccgatatcgcaagaatgacccagagaagcagaatgagaatacacggaaagagaagaacgatatccacctcgacgccgatgaccctaatagcgcagacaagcatcgaaatgattgtcctaactggattaccgaaaagatcaacagcggacccgacccgaggactcgcaatcccgagaagcttaaggagagccactgggaagaaaaccggaatgaaaattcaggtaactcttggaacaagaacttcgggtctggatgggtgtccaacaggggccgcgggcgcggtaacagaggtagaggaacttacaggtctagcttcgcctacaaagatcagaacgagaacagatggcaaaacaggaagcccctgtccggtaattctaactcctccgggtccgaaagttttaaatttgtggagcagcagtcctacaagcgtaaatcagagcaggaattctcatttgacactcccgcagaccgctccggttggacctcggcctcttcctgggccgtccggaagaccttgccagcagatgtgcagaattattattctcgcagaggacggaattcctcagggccacagtctgggtggatgaagcaggaggaggagaccagcggccaggacagcagcctcaaggaccagacaaaccaacaggtggatgggtcccaactgcccataaatatgatgcaaccacagatgaacgtgatgcagcagcagatgaacgctcaacaccagccaatgaacatattcccttatcctgtcggcgttcacgccccgttgatgaatattcaaaggaaccccttcaatatacatccccaactgcccctacacctccacaccggtgtccccttgatgcaggtggctacacctaccagcgtttcacaaggcctgcctcccccccctcctccaccccccccctctcaacaggtgaactatatcgcctctcagcccgatggcaagcaactccagggaatccccagctcgagtcatgtgtctaacaatatgagcaccccggttctgcctgctccgacagctgccccaggaaacacaggaatggtgcaagggccctcttcaggaaatacaagttcatccagccactccaaagcatcaaatgccgccgtgaagttggctgaatctaaagtttctgtagcggtggaggctagcgccgatagctcaaagaccgataagaagctgcagatccaagagaaagccgcacaagaggtgaagctggcgataaaacccttctaccaaaataaggatattacgaaagaagagtacaaagagattgttaggaaagccgtggacaaagtttgtcattctaagagtggggaggtgaactctacaaaagtggcaaacctggtcaaagcatacgtggacaagtacaaatattcaagaaaaggatcacagaagaagacattggaggaaccagtttctaccgagaagaatatcgggtag

SEQ ID NO: 149007 - DNA, 4392 bp, Artificial Sequence
  derived and/or modified sequence
atgaaaaagaagacagtctgtacattaaacatgggagataaaaagtatgaagatatggagggagaggagaatggcgataacaccatctctactgggctgctgtactcagaggccgatcggtgtccaatttgtctgaattgtttgttagaaaaagaagtcggcttcccagaatcttgcaatcacgtgttttgtatgacttgcattctaaagtgggccgagaccctagctagctgtccgattgataggaagcccttccaggccgtctttaagttctctgctctggaagggtacgtgaaagtgcaggtcaagaagcaacttagagagacaaaggataagaaaaatgaaaactcattcgaaaaacaggtgtcctgtcacgagaattctaaaagctgcattcgccgtaaagctatcgtgcgtgaagatctgctttccgccaaagtctgcgatctgaagtggatacatcgcaactctctgtattcagagacaggtggcaagaagaatgccgctatcaaaataaataagcctcaacgcagtaactggtccaccaatcaatgcttcagaaacttcttcagcaacatgttttcctctgtgtcgcattctggagagtcaagcttcacttacagggcctactgtacagaatttatcgaggccagcgagatctcggctttaatcagacaaaagagacatgagctcgagctcagttggtttccggataccctgcctgggattggacgcattggcttcataccttggaacgtggagactgaggtcctgcccctaattagctcagtgctaccgagaacaatcttccctacgagcactatttcattcgaacactttgggacttcatgcaaggggtacgcactcgctcacactcaggaaggagaggagaagaaacagaccagcggtaccagtaacacacgcggaagcagaaggaagccagcaatgacaactccgacccggcgatctacaagaaatacccgggcagagactgcctcacagtcccagcgtagcccgataagtgataattccgggtgtgacgctccagggaacagcaatccatctctttcggttcctagcagcgcagagtccgagaagcagactcggcaggccccaaaacggaagagcgtacgcaggggacgcaagccaccattgctgaagaagaagttgcgcagctcagtcgccgctcctgaaaaatcctctagcaatgacagcgtggacgaggagactgctgagagcgacacatctcccgtccttgaaaaagagcaccagccagacgtggatagcagcaacatatgcactgtccagacacacgtcgaaaatcagtcagcgaactgcctgaagtcttgcaatgaacagatcgaggagtccgagaaacacaccgccaactacgatactgaagaaagagtgggcagtagctcttctgagtcatgtgcacaggacctccccgttctcgtcggtgaggagggtgaagtgaagaaattagagaataccgggatagaagcaaacgtcttatgcctcgaaagcgagatatctgaaaatatcctcgaaaaaggcggagatcccctggagaaacaggaccaaatctctggcctgagtcagagtgaagtgaagactgacgtttgcaccgtgcaccttccaaacgattttcccacttgcttaacatctgaaagtaaggtgtatcaaccagtgtcatgccccctctctgatctttccgagaacgtggaatccgtggtaaatgaagaaaaaataaccgaatcttcccttgtcgagattacagagcataaggattttactctgaagacagaggagctgattgagagccccaaactggaaagctcagaaggcgaaattattcagacagtggaccggcaatccgtaaaatcacccgaggtacagctcttagggcacgtggagacagaagacgttgagatcatcgctacatgtgacaccttcggtaacgaggacttcaataacattcaggattctgagaacaacttgttaaagaataaccttctgaataccaaattggagaagagcttggaggagaagaacgagagtctgacagagcacccccgaagtactgaattgccaaaaactcacatcgaacagattcagaaacatttctccgaggacaacaacgagatgatacccatggagtgcgattcattctgctccgaccaaaatgagtccgaagtagaaccctccgttaatgcggacctgaagcagatgaacgaaaacagtgttacccactgctcagagaacaacatgccgagctcagatctggccgatgaaaaggtggagactgtctcacagcctagcgagtcaccaaaagacactatcgacaaaactaaaaagccgaggaccagaaggtctcggtttcacagcccttcgaccacctggtcccccaataaggacacaccacaggagaagaaaagaccacagtcccctagcccgagacgcgagactgggaaggagtccagaaagagccaatcaccctcacccaagaatgagtcagctcgcggtcgaaagaaatccagatcccaatccccaaagaaggacatcgccagagagagacgccagtctcagtctagatctcctaaacgtgacacaacccgggagtcccgacggtccgagagcctaagccctcggagagagacatcccgggaaaataaacgtagccagcctcgcgtgaaggattcttcacccggagagaagtcgaggtcacagagtcgggagcgggaaagcgatcgtgatgggcagcggagggagcgcgagagaagaacaagaaaatggagtcgctcccgctctcactcaaggtcaccgtcaagatgtaggaccaaaagcaagtcatcgtcttttgggaggattgatagggactcatattcccccaggtggaaagggaggtgggctaacgatgggtggagatgtccaaggggaaacgacaggtatcggaagaacgaccccgagaagcaaaacgaaaacacccgtaaggagaagaacgatattcacctcgatgctgatgatccaaacagtgctgacaaacaccggaatgattgtcctaactggatcactgaaaaaattaacagtggcccagacccacgaactcgcaatcccgaaaagctcaaagaaagtcactgggaggaaaatcgcaatgaaaatagcgggaactcctggaacaagaacttcgggtcaggatgggtgtctaaccgaggacgtggtagaggaaacagaggacgtggaacttatagaagcagtttcgcctataaagaccagaatgaaaacaggtggcagaaccgaaagccactaagcggaaacagcaacagctctggaagcgagtctttcaaatttgtcgaacagcagagctacaagcgtaagagcgagcaggagttttcattcgacacccccgctgatcgctccggatggacgtcagcctcatcatgggccgtccgaaaaaccctgcctgcagatgttcagaactactatagtcggagagggaggaattcaagcggaccacaatccggctggatgaagcaggaggaagagacaagtggacaagacagcagtctgaaggatcagaccaaccagcaggtggatggctcacaactgcctatcaatatgatgcagccacagatgaacgtcatgcagcagcagatgaacgcacagcatcagccaatgaacatcttcccgtatcccgtcggcgtgcatgctccattaatgaacatacagcgcaacccgtttaacatccacccacagctccccttgcaccttcacacaggagtcccactcatgcaagtggcgactccaacctcggtcagtcagggtctgccgccaccgccaccccctcctccaccaagccagcaggtaaactatattgcttcacaacccgatggaaaacagctgcaggggattccatcgtcaagccatgttagcaacaatatgtccacccctgtgctgcctgctcctaccgccgctcctggcaataccggaatggttcaggggccttccagcggaaacacatcaagctccagtcactccaaggcctctaatgcagcagtaaagctggccgagtcaaaagtgagtgtcgcagtggaggcgtcagctgacagtagtaagaccgataagaaactgcagatccaagagaaggccgcacaagaagtgaagctcgccattaagcctttctaccagaacaaggatatcaccaaggaggagtataaagagattgtgcgaaaggcagtcgacaaggtctgccactctaagagtggagaggtgaactccactaaggtcgcaaacttggttaaagcatacgtcgataagtataagtattcaaggaagggcagccagaagaaaaccctcgaggagcccgtctctaccgagaagaacattggttag

SEQ ID NO: 149008 - DNA, 4392 bp, Artificial Sequence
  derived and/or modified sequence
atgaagaagaaaacagtgtgtacgctgaacatgggcgataaaaagtatgaagatatggagggagaagaaaacggtgataataccatctctaccggtcttctctattccgaggccgatagatgtcccatctgtctcaattgcttactagagaaagaggttggatttccagaatcctgtaaccacgtcttctgtatgacttgcattttaaagtgggcagagaccttggcatcttgtccgatagacagaaaaccctttcaagccgtgttcaagtttagtgccctggagggctatgtgaaggtacaggtaaagaagcaacttcgggaaacaaaagacaagaagaatgagaactcattcgagaagcaggtcagttgccatgaaaacagtaagagctgcatccgcaggaaggcaatcgtgcgcgaagacctgttatccgccaaggtctgtgaccttaagtggatccatcgcaactccttgtatagtgagacgggcggtaagaagaatgcagctatcaagattaataaaccccagcgcagcaattggtcaactaaccagtgcttcagaaatttcttctcgaatatgttctcttccgtatcccattcaggcgaatcaagttttacatacagagcttactgtaccgagtttattgaggcttccgagatctccgctctgattcgccagaaaaggcacgagctcgaactgagctggtttcccgacacactgcccggaataggccgtatcggtttcatcccctggaatgtggaaacggaggtgcttccccttatcagctccgtcctgcccaggacgattttccccactagtacaatcagctttgagcattttgggaccagttgcaagggctacgctctcgctcacacccaggaaggtgaggagaagaaacaaacgagcgggactagcaacactcgtggttcacggcgaaagcccgctatgactactcccacgcggcgatcaacccggaacacgcgagcagagaccgctagtcagagccagcggagcccaatttctgacaatagcggatgtgatgcaccaggcaattccaaccctagcttgagcgtccctagtagcgccgaatccgaaaaacagaccagacaggcccctaaacgaaagtcggtacgcagaggaagaaaaccacccctccttaagaagaaactgcgttcctctgtggctgctcctgagaaatcgtcttctaatgatagtgtggacgaggaaacagccgaaagcgacacctccccggtgctcgaaaaggagcaccagcccgacgtggacagctcgaatatctgtacagtgcagacccacgtggagaaccagtccgcaaactgcctcaaatcctgtaacgaacagattgaagagtctgaaaaacacactgctaattacgacaccgaagaacgcgtcggaagctcttcttccgagtcctgtgcccaggatctcccagtactggtaggcgaagagggcgaggttaaaaagctcgaaaacaccgggattgaagcgaatgtgctatgtttggaaagcgagatctccgagaatatcctggaaaagggcggagatcccctggagaaacaagaccaaatatccgggctgtctcagagcgaggtaaaaacggacgtgtgcacagtccatctgccaaatgactttcctacctgcctgacctcagagagcaaagtataccagccggtttcctgtccactgtctgatcttagcgagaacgtggaatctgttgtgaacgaggagaaaatcaccgaatcaagcttggttgaaatcaccgagcataaggattttacgctgaagacggaggaacttatagaatcgcccaagctggaaagcagcgaaggagagatcatccagaccgtcgatcggcaatccgtcaaatctccagaagtccagctcttgggccatgtcgaaacagaagatgtggagattatcgctacctgtgatacatttggcaacgaagacttcaataatatccaggactccgagaataaccttctgaaaaataaccttctgaatacaaaattggaaaaatctctggaagagaagaacgagtccttgacagaacaccctagaagtacggagctgccaaagacgcatattgaacagatacaaaagcatttctcggaggacaacaacgagatgatccctatggagtgcgactccttttgtagcgaccagaacgaatccgaggttgaaccaagcgtgaacgctgacctaaaacagatgaatgaaaacagcgtgacccactgctccgagaacaatatgccgagttcagatctggccgatgaaaaggtggagacagtgagtcaaccatcagagtcccccaaagacaccattgataaaaccaaaaagcccagaacaagacggtcaagatttcacagcccctccacaacttggagtcccaacaaggacacgccccaggagaagaaaaggccccaatcacctagcccaagaagggagacaggcaaggagtcgagaaaaagccagtcaccttctccaaagaatgaatcggctaggggcaggaagaagtcccgcagccagtcacctaagaaggatattgccagggagcgacgacagtcccagtcccgatctcccaagagagacacaacaagagagtctcgccgttccgaaagcctgtccccgagacgcgagacgagtagagaaaacaagcggagtcaacctcgggtgaaggattcctcgcctggtgagaagtccaggtcccagagccgcgagcgagagtctgatagggatggccaacgcagggaaagagaaaggcgcacccgcaaatggtctagaagcaggtcacactcaagatcccccagtcggtgtagaacaaaaagtaaaagctcatccttcggtcggattgacagagactcctattctccgagatggaagggccgatgggccaacgatgggtggcgctgccccaggggcaatgatcggtacaggaaaaatgaccccgagaaacagaacgaaaacacgcggaaggaaaaaaatgatatccacctcgacgctgatgatccaaactctgcggacaagcataggaatgattgccctaattggattacggagaaaataaatagcgggcctgatccccgaactcgaaaccccgaaaaacttaaggagtcccattgggaagagaatcgtaatgaaaacagcggaaactcatggaataaaaacttcggctctggctgggtgagcaaccgcggaaggggtcgcggtaatcgaggcagaggcacttataggagcagtttcgcctataaggatcagaacgaaaaccgttggcaaaacaggaagccactgtccggaaattctaactctagcgggagcgaaagtttcaagtttgtggagcagcagtcctacaagcgcaaatccgagcaggagttttcttttgatactccggctgaccggtctggatggacatcagcgagctcatgggcagtgaggaagactcttcctgccgatgtgcaaaactactattccagaagaggaaggaactcaagcggccctcagagtggatggatgaagcaggaagaagaaacatcaggacaggattcctccctgaaggatcagacaaaccagcaggtggacggatctcaattgcctatcaatatgatgcagccccagatgaacgtgatgcaacagcagatgaatgctcagcaccagcctatgaacatctttccttaccctgtaggtgttcacgcccctcttatgaacatccaacggaaccctttcaatatccaccctcagctgcccttacatttgcatacaggtgtcccgctgatgcaggtagccacccccacttctgtgtctcagggactaccaccccctcccccaccccctcctccctcccagcaggttaattatatagcatctcagccagatggaaagcagcttcagggaattccatcctcctctcatgtctcaaacaacatgagcacaccagtgttgccagcaccaaccgccgctcctggaaacactggcatggtacagggcccaagtagtggtaataccagctcctcctcgcactcaaaagcttcaaatgccgcagtgaagctggccgagtcaaaggtatcagtggcagtcgaggcatctgccgatagctccaagacagacaagaagctgcagatacaggagaaggctgcgcaggaggtgaaactcgcaattaagcccttctaccaaaataaggacattacaaaggaggagtacaaggagatcgtacgaaaggcagtcgacaaagtttgccattccaaatccggcgaggtgaatagcactaaggtcgctaacctggttaaagcctacgtggataaatacaagtactcccgcaagggaagccaaaagaagacattggaagaaccagtcagtaccgagaaaaacattggatag

SEQ ID NO: 149009 - DNA, 3447 bp, Artificial Sequence
  derived and/or modified sequence
atgaccaccccaactaggaggagcaccaggaacacccgggcagaaaccgcctctcaatctcagagaagcccgatttcggacaactctggctgtgatgcacctggcaactcgaacccgtcgctgtcggtgccctctagtgccgaatcagaaaagcagacccgccaagccccaaagcgaaagtcggttcggagaggcaggaagcctccactcttgaaaaagaaattgagatcatccgttgcagcgcctgaaaagagttcctcaaatgacagcgtggatgaggagaccgcggaaagcgacacaagcccggtactagaaaaggaacatcagcctgacgttgatagtagcaatatttgcaccgtgcagacacatgtagagaatcagtccgcgaactgtctgaaaagctgtaacgagcagatcgaggaaagtgagaagcacactgccaattacgacactgaagaaagggtgggctcgtcttctagcgaatcgtgtgcccaagacttacctgtactagtgggcgaggaaggcgaggtaaagaagctggagaacactggcattgaggctaacgtgctatgcctcgaatccgaaatcagtgagaatattctagagaaagggggagacccattagagaagcaggatcagatttcagggctgagccagagcgaggtgaagacagacgtttgcacggtgcatctccccaacgatttccctacatgcctcacttccgaaagtaaagtctatcaacctgtgtcatgcccgctatctgacttgtctgaaaatgtcgaatctgtggtaaacgaagagaagatcacggaatcgagcttggtagagatcacggaacataaagacttcaccctgaagacagaggagctgatagaaagtcccaagcttgagtcctccgagggagagatcatccaaactgttgaccgtcagagtgttaagtcacccgaagttcagctcctgggacatgtggagacagaggatgtggagattattgccacttgcgacaccttcgggaacgaagatttcaataacatccaagattctgagaacaatttactcaagaacaatctcctcaatactaagttagaaaagagcctggaggaaaagaacgagagcctcaccgaacatcctcgctctactgagctacctaaaacgcacatcgagcagatccaaaagcactttagcgaggacaacaacgagatgattcctatggaatgcgatagtttctgttcggatcagaacgagagcgaggtagagccatctgtgaacgcggacctgaaacaaatgaacgagaactccgtcactcattgttccgaaaacaacatgccgagttctgatctggctgacgagaaagtcgagaccgtctctcagcccagcgagagtcccaaagacaccattgataaaacaaagaaaccacgcacgcggcgttcaaggttccattcaccatccacgacatggagtccaaacaaggacaccccacaggaaaaaaagaggccccagtccccatcaccaagacgcgagacaggcaaagagagtcggaagagccaatcaccctctccaaaaaacgaatcagccagaggtagaaagaaaagtagatcccagtctccgaaaaaagatatcgctcgcgagaggagacaaagccagtctcgatcccccaagagagacaccacccgggaaagtaggagaagtgaatcactatcacctcgtagagaaacctccagggaaaacaaacgttcacagccccgagtaaaggactcctcacccggagaaaaatccagatcccagtcgcgggagcgggagagcgaccgagacggccagaggagagagcgagaaaggcgtactcgtaaatggagtaggagccgcagccattctagatcccctagccgttgcagaactaaaagcaaaagctcgtctttcggaagaattgatagggactcatattctcctagatggaagggaaggtgggcaaatgatgggtggcgatgtcctcgcggaaatgatagataccggaagaacgacccagagaagcagaatgagaacacacgcaaagaaaagaatgatatccatctagatgcagatgaccctaactccgcagacaaacaccggaatgattgtcccaactggattacagaaaaaatcaatagcggaccagatccgagaacacggaacccagaaaaattaaaggaatcccactgggaggaaaatagaaatgagaatagtggaaattcatggaacaaaaattttggctcgggatgggtgtctaatcgcggaaggggacgagggaacagggggcgtgggacgtatagatcctcgtttgcttataaagaccagaacgaaaatcgatggcagaatcgcaagcccctctcgggaaactccaattctagcggttcggagtcgttcaaattcgtggagcaacagagctacaaacgtaaaagcgagcaggaattctcctttgatacgccagccgaccggagtggctggacctctgcttcatcatgggctgtccgcaaaaccctgcccgcagatgtgcagaactactacagcagacgtgggcgtaattctagtggaccacagtccggctggatgaagcaggaagaggagactagcggccaggactcctcgctcaaagatcagaccaaccagcaggttgatggctctcagctgcctatcaatatgatgcagccgcaaatgaatgtcatgcagcaacagatgaacgctcaacatcagccaatgaatatattcccatatccagtaggagtacatgcacccctaatgaatatccagcgaaatcccttcaatatccatcctcagctgcctctccatttgcatactggcgtgccactgatgcaggtggctacaccgacgagtgtcagccaaggactccctcctcccccaccaccaccccctccctcacagcaggttaattacatagcctcccaacctgatggcaaacagctgcagggtatccccagtagctcacatgtgtccaataacatgtctaccccagtcctgcccgctcccacagccgctcccggaaataccgggatggtgcaaggcccaagtagtgggaacacgagtagctcctcacacagcaaggcctcgaacgcagcagtcaagctcgccgaatcaaaagtaagcgtagcagtggaagcctctgccgactccagtaaaactgacaaaaagcttcaaatccaggagaaggcagctcaagaagtgaagcttgctataaagccattttaccaaaacaaagacatcacaaaggaagaatacaaggaaatcgtgaggaaagcagtggacaaagtatgtcatagcaaatctggtgaagtcaacagcaccaaggtggcaaacttagtgaaagcctatgtcgataagtacaagtacagtagaaaagggtcccagaagaaaaccctggaagagcccgtgtccacagaaaagaatatcggatag

SEQ ID NO: 149010 - DNA, 5296 bp, Artificial Sequence
  derived and/or modified sequence
gaataacagttaagttttggggagtaaaaactgtttcaatttttgactgtgttgggggttggtgctcctaatccctgtgttgttaaagggtcgactatattgtatttttgaaaattgctagagagtggacgtaaagtgttctcactaaacaaattataactatgtgaggtagtgcatatattaagtagctagatttggtcattccacaatgtatatgtacttcaaaacatcatgttgtacatgagaaacacagttttatctgttagtcagttttaaaaataaaaaatattccaactagaaactctgttgtagtttttgaaattacaacttggaggctttgaggaactgattagaagtctcctttctgtttcaggctttcatatccaaaccatagatctttagaagtaacatctgttaattaattattaataaatagtttgagtctttattaattcatggataacttgaccattttctctctccttttgcttagataatcccagatcatggccgggcacagtagctcacgcctgtattcccagcagtttgggaggccgaggcaggcagatcacttgaactcaggagtttgagaccagcttgggcaacatggcaaaaccctgtctctattaaaaatacaaaaattagctgggcatggtagtgcatgcctgtagtcccagctacctgggaggctgaggtgggaggatcgcttgagcctgggaggttgaggcttctgtgcgcgatgattgctccagtgatcacgccattgcactccagcctgggtgacagagtgagaccctgtctccaaaaaaaaaaaaaattaagcaagtagcagttacaagaccaaaagttattttcctttttttttttctctataaaattgcccatttggaccaaatctagttataacttatttcagtgtcattaagaaagttgatgaataagtcatattactcagatgttagtagctatgcatttattaatagttttatttataagtatttagtttcactctgttgcagactattttatgctaaaattagctaaagccaaattactatttcttaaaacatattttttactttttttttttttttaaatattattaggtacttcttgcaagggatatgcattagcacatactcaagaaggggaagaaaagaagcaaacttctggtacatcaaataccagaggatcaagacgaaaacctgcaatgacaactcctacaaggaggtctacacgtaacacaagagctgaaacagccagtcagtctcagagatccccaatatcagacaattctgggtgtgatgccccaggtaacagtaatccatctttaagtgttccctcttcagctgagtcagaaaagcaaacaagacaggctccaaaacggaagtctgtaagaagaggaagaaaaccacctttactgaaaaagaaacttcggagctctgtagctgcccctgaaaaatcatcttccaatgattcagtagatgaagaaacagcagaatctgacacatcacctgtgttagaaaaagagcaccaaccagatgtagacagtagtaacatttgtactgtgcagactcatgtagaaaaccagtctgctaattgcttgaaaagttgcaatgagcaaatagaagaaagtgagaagcatactgcaaattatgatacagaggaaagagtaggatcttcatcttctgagtcttgtgctcaagatcttcctgtgctagttggtgaggaaggggaagttaaaaaactcgagaatacaggtatagaggctaatgttttgtgtttggaaagtgagatttctgaaaatattcttgaaaaaggaggtgatccattggaaaagcaagaccagatatctggactttcacaatcagaggtaaagacagatgtatgtacagttcatcttccaaatgattttcctacatgtttaacatctgaaagcaaagtgtaccaacctgtatcttgtcccctaagtgacttatctgagaatgtagagtcagtggttaatgaagaaaaaataacagagagttccctagtagaaattactgaacataaagattttacactaaaaacagaggagcttatagagagccccaagttagaatcttctgagggtgaaattatacagacagtggacagacaatctgttaagagcccagaggttcaattgcttgggcatgttgaaactgaagatgtagaaataattgcaacatgtgatacttttgggaatgaagatttcaataatattcaagactctgaaaataacttactaaaaaataatcttctgaacaccaaattggaaaaatctttagaagaaaagaatgaatcgctgaccgaacatcctagatctacagagttgcctaaaacacacattgaacagattcagaagcattttagtgaggacaacaatgaaatgatacctatggagtgtgattcattttgcagtgaccaaaatgaatctgaagttgaaccatctgtaaatgctgatcttaaacaaatgaatgaaaattctgtgacacactgttctgaaaataatatgccgtcttctgatcttgcggatgaaaaggttgaaactgtttctcaaccatctgaaagcccaaaagataccatagataaaaccaaaaagcctcgtactcgaagatctagatttcattctccatctacaacttggtcacccaacaaagacactccacaagaaaagaagcggccccagtctccatctcccagaagagaaactgggaaagaaagcaggaagtctcaatcaccatctcctaagaatgagtcagccagaggccggaaaaaatcccgttctcagtccccaaaaaaggatattgcaagagaaaggaggcaatctcagtctcggtctccaaaaagggatactactagggaaagcagaagatctgaatcactgtccccaagaagagaaacttctagagagaacaaaagatctcagccaagagtgaaagattcttccccaggagaaaaatccaggtcccagagcagagaacgagaaagtgatagagatgggcagaggagagagagagaaaggagaaccagaaagtggtctaggtccagatctcattctaggtccccctcaagatgtagaacaaaaagtaagagttcatcatttggtagaattgacagagatagttactctccccggtggaagggaagatgggcaaatgatggttggagatgtccacgaggaaatgatcggtacagaaagaatgacccagagaaacagaatgaaaatacaagaaaagaaaaaaatgacatccatctagatgctgatgatccaaattctgctgacaaacatagaaatgactgtcccaattggataacagaaaaaataaactctgggcctgatccaagaaccagaaatccagaaaagttgaaagagtctcattgggaagaaaatagaaatgaaaattcaggaaattcttggaataaaaactttggttctggttgggtatctaaccgtggtagaggcagaggcaaccgtggcagaggcacttacagaagtagttttgcctataaagatcagaatgaaaatcggtggcaaaatcgaaaacccctctcagggaattcaaacagttcagggagtgaatctttcaagtttgtggaacagcaatcctataagcgaaaaagtgaacaggagttctcatttgatacaccagcagatagatctggatggacatctgcatccagctgggccgtgagaaagactttgccagcagatgtacaaaactactactcacgacgaggcagaaattcttcaggtccacagtctggatggatgaaacaagaggaggaaacatctggacaggattctagcctaaaagaccaaacaaaccagcaagttgatggttctcagctacctataaatatgatgcaaccgcaaatgaatgtaatgcagcaacaaatgaatgcacaacaccagcctatgaatatcttcccatatccagtgggtgttcatgctcctttgatgaacatccaacgcaatccatttaacattcatcctcagctacccttgcatctccacacaggagtgcccctcatgcaggtagccactcctaccagtgtatctcagggactaccaccaccaccaccccctcccccaccatcccaacaagtcaactacattgcttcacaaccagatggaaagcaattgcagggtattcctagttcttctcatgtaagtaataacatgagtacaccagttttgcctgctccgacagcagccccaggaaatacgggaatggttcagggaccaagttctggtaatacttcgtcatcaagtcacagcaaagcctctaatgctgctgtaaaattggcagaaagcaaagtaagtgttgcagtggaagccagcgcagatagctcgaagacagacaagaaattgcaaattcaagaaaaagcagcacaagaggtaaaattggccatcaagccattttaccaaaataaagatatcaccaaggaagaatataaagaaattgtacggaaagcagtagataaagtttgtcatagtaagagtggagaagtaaattctactaaagtggcaaatctggttaaagcctatgtagacaaatacaaatattcacggaaggggagccaaaagaaaactctggaagaacctgtgtctactgaaaaaaacataggctgaaatggggaacgctgtcaaggacattatcaggatatctgcaaagtgcaatttcaacatgtaccattaactgaaaatcatacataactgtgattgaaatttggttttgataaaattatttttttaacataggatatgatgttttgttctaaataaatataggtctgcactgcaacttctgtatccttccttcccctccaccctcccccacaaaattcaagggaaagtaaagggtttaaaggaatgtgcatctttactaggactgtgttatagtgtggatactggaaaatgtatagctttttgattagggcaatggagtgcataaattagaaacttctaagtgcactggttttcaaagagatatatataatgcatttattctgtcaggttaaaatgtaaagtatgatctttatgattttttccctctaattatagaaagttaaataatgtattaccatgaaaaatgtttctaatattaaatagaacatatcagttgcaaagttcctaatgtgtatttttaaagcacatatctgaataaattgcctagatagaaaaaaaattatcacgagtaaaatttagtgttcaaaacattgagacactcttcacctattgtatgaccaaataaaggttatgctgcttgtt

SEQ ID NO: 149011 - protein, 453 aa, Artificial Sequence
  derived and/or modified sequence
MISQFFILSSKGDPLIYKDFRGDSGGRDVAELFYRKLTGLPGDESPVVMHHHGRHFIHIRHSGLYLVVTTSENVSPFSLLELLSRLATLLGDYCGSLGEGTISRNVALVYELLDEVLDYGYVQTTSTEMLRNFIQTEAVVSKPFSLFDLSSVGLFGAETQQSKVAPSSAASRPVLSSRSDQSQKNEVFLDVVERLSVLIASNGSLLKVDVQGEIRLKSFLPSGSEMRIGLTEEFCVGKSELRGYGPGIRVDEVSFHSSVNLDEFESHRILRLQPPQGELTVMRYQLSDDLPSPLPFRLFPSVQWDRGSGRLQVYLKLRCDLLSKSQALNVRLHLPLPRGVVSLSQELSSPEQKAELAEGALRWDLPRVQGGSQLSGLFQMDVPGPPGPPSHGLSTSASPLGLGPASLSFELPRHTCSGLQVRFLRLAFRPCGNANPHKWVRHLSHSDAYVIRI

SEQ ID NO: 149012 - DNA, 1362 bp, Artificial Sequence
  derived and/or modified sequence
atgatcagccaattctttatattaagctcaaagggcgatcctctgatctacaaggacttcaggggagactctggcggtagagatgtcgccgaactgttttacagaaaactgacgggtctaccaggggacgagagccctgtggttatgcatcatcatgggcgacactttatccatatacgccactctggcctatacttagtggtcacaacgtcagagaatgtctctccgtttagcctgcttgagctgctgagccgcctggctacccttctgggtgactactgtggctcacttggagaggggacaatctctagaaacgtcgccctggtctatgagcttttagatgaagtgctggactatggttatgtgcagacgaccagcacagagatgctgcgcaactttatccagacggaggcggtggtaagcaaacctttttccctgttcgacctgtcctctgttggattattcggagctgaaactcagcagtccaaagtcgcccccagcagtgccgcttctcgccctgtcctgtcctccagatccgatcaatctcagaagaatgaagtattcctggacgtggtggagcgcctttctgttttgatcgctagtaatggcagtctgctcaaggtggacgtgcagggggagataaggctaaagagcttcctgccctcggggtctgaaatgcgcatcgggctcactgaagaattttgcgttggcaagtcagaattgcggggttatggtcctgggataagagtcgacgaagtgtcattccattctagcgtgaatcttgatgaattcgagtcccaccggattctccggctgcagccccctcagggagaacttacggtgatgagataccaactgtccgacgatctcccttctcctctcccattcagactgttcccatccgtacaatgggacagaggaagcgggagactgcaggtgtatctgaagcttcggtgcgatttgttatctaaaagccaggctcttaacgtgaggctgcatctgcctttaccccgcggcgtcgtgagcctctcacaagagctgtcctcccctgaacagaaagctgagttggccgaaggtgcattacggtgggacctgccccgcgtccaaggcggtagccaattgagtggcctttttcagatggacgtgcccggccctcccggtccaccctctcatggactgtcgactagtgcctctccgctggggctgggtcctgcctccctgtcctttgagctgccacgccacacgtgttctgggttgcaggtgaggtttctgaggcttgctttcaggccatgtggcaacgcgaatccccataaatgggtgcggcatctgtctcatagtgatgcatacgttatccgcatctag

SEQ ID NO: 149013 - DNA, 1362 bp, Artificial Sequence
  derived and/or modified sequence
atgatcagccagttctttatcttgtcctccaagggagatcctttgatttacaaggactttcggggtgattctggaggcagggatgtggccgaactgttttataggaagcttacaggtctgccaggagatgagtcacccgtggtgatgcatcatcacggacgacacttcatccacatccgccacagcggcttatacctggtagtcacaactagcgaaaatgttagcccttttagtctgctggagctgctaagccgcttggcaacacttctgggagactactgtgggtcactaggcgagggcacgatttccagaaatgtggctctggtctacgagctgctagatgaggtattagactatggctatgtgcagacaacatcaaccgaaatgctcagaaacttcatccagaccgaggctgtcgtaagtaagccattcagcttgttcgacctttcctctgtcgggctcttcggggctgagactcaacaatccaaagtggcaccatctagtgccgctagcaggcccgtcctttcatctaggtccgaccagtcacagaagaacgaagttttccttgatgtggtggagaggctatctgtattaatcgcctctaacggatccttacttaaagttgatgtccaaggagagatccggttaaagtctttcctgccctccggtagtgaaatgcgtatcggactcacagaagaattttgcgtgggaaaaagcgagttgcgggggtacggtcccggaattagggtggacgaagtatcctttcattcttcagtcaatctggacgagttcgagtcccatagaattctcaggctgcagcctccacagggagagctgacggtcatgcgttatcagctgagcgatgatctcccatcaccccttccgttccgactctttccgagcgtgcaatgggataggggctctgggagactccaggtctacctgaaactacgttgtgacctgttgtctaaaagccaagctttaaatgtgaggctgcacctgcccctgcctagaggtgtggtgtccttgtctcaagaactgtcctcgcctgaacagaaggccgaactcgcagagggcgcactcaggtgggatcttcctagagtccagggtggttcccagttatccggcctattccagatggacgtacccgggccacccggccctcctagccacggtttgagcacttccgccagcccactgggcctagggcccgctagtctgtcctttgaattgcctagacatacgtgcagtggcttacaagtgagattcctgaggttggcctttcggccttgtggcaatgcaaacccccacaaatgggttcgtcatttgagccactcagatgcctacgtgatccggatatag

SEQ ID NO: 149014 - DNA, 1817 bp, Artificial Sequence
  derived and/or modified sequence
ggggtagtgcaggcgccgggtttcccgcggtccgagctggcgcgggcggaggagaatcgctcttaaagggccagcgcacacgcgttcttttgttccggggccgcagggcggggcaggcccgactttcgccgtcttcttgtctactctccagaacggccatgatttcccaattcttcattctgtcctccaagggggacccgctcatctacaaagacttccgcggggacagtggcggccgggatgtggccgagctcttctaccggaagctgacgggactgccaggagacgagtccccggttgtcatgcatcaccatggccgtcatttcattcacatcagacacagcggcctctatttggtggtcacaacttcagaaaacgtttctcccttcagcctcctagaactgctctccaggttggccacccttctgggcgattactgtggctccctgggcgaggggaccatctcccgcaatgtggctctggtatacgaactcctggatgaagtgctggactatggctatgtacagaccacatccacggagatgctgaggaatttcatccagacggaagctgtggtcagcaagcccttcagcctctttgacctcagcagcgttggcttgtttggggctgagacacaacagagcaaagtggcccccagcagtgcagccagccgccccgtcctgtccagtcgctctgaccagagccaaaagaatgaagtttttttggatgtggtcgagagattgtctgtactgatagcatctaatggatccctgctgaaggtggatgtgcagggagagattcggctcaagagcttccttcctagcggctctgagatgcgcattggcttgacggaagagttttgtgtggggaagtcagagctgagaggttatgggccaggaatccgggtcgatgaagtctcgtttcacagctctgtgaatctggacgaatttgagtctcatcgaatcctccgcttgcaaccacctcagggcgagctgactgtgatgcggtaccaactctccgatgacctcccctcaccgctccccttccggctcttcccctctgtgcagtgggaccgaggctcaggccggctccaggtttatctaaagttgcgatgtgacctgctctcaaagagccaagccctcaatgtcaggctgcacctccccctgcctcgaggggtggtcagcctgtctcaggagctgagcagcccagagcagaaggctgagctggcagagggagcccttcgctgggacctgcctcgggtgcaaggaggctctcaactctcaggccttttccagatggacgtcccagggcccccaggacctcccagccatgggctctccacctcggcctctcctctggggctgggccctgccagtctctccttcgagcttccccggcacacgtgctctggcctccaggtccgattcctcaggctggccttcaggccatgcggcaatgccaacccccacaagtgggtgcgacacctaagccacagcgacgcctatgtcattcggatctgaggctccccaaacgaggacacgacggccaaggtggcagtttgtcccacgggaggacagtcgtttcttttccagcctcctggccttcggactctgaatctgggcaggaagagtcctcagtcccaagaccaggagggggcaatgggcccagcctttctgtggtatctgatgcaggaaggactgcagtggatcagaacttacaaaccaaacttttattctgagaaactggctgtacaatatctaaaaagaaagtgacatgaaggaagcaatctacaacttccttccgcttagcgagcatgc

SEQ ID NO: 149015 - DNA, 1572 bp, Artificial Sequence
  derived and/or modified sequence
gcggggcaggcccgactttcgccgtcttcttgtctactctccagaacggccatgatttcccaattcttcattctgtcctccaagggggacccgctcatctacaaagacttccgcggggacagtggcggccgggatgtggccgagctcttctaccggaagctgacgggactgccaggagacgagtccccggttgtcatgcatcaccatggccgtcatttcattcacatcagacacagcggcctctatttggtggtcacaacttcagaaaacgtttctcccttcagcctcctagaactgctctccaggttggccacccttctgggcgattactgtggctccctgggcgaggggaccatctcccgcaatgtggctctggtatacgaactcctggatgaagtgctggactatggctatgtacagaccacatccacggagatgctgaggaatttcatccagacggaagctgtggtcagcaagcccttcagcctctttgacctcagcagcgttggcttgtttggggctgagacacaacagagcaaagtggcccccagcagtgcagccagccgccccgtcctgtccagtcgctctgaccagagccaaaagaatgaagtttttttggatgtggtcgagagattgtctgtactgatagcatctaatggatccctgctgaaggtggatgtgcagggagagattcggctcaagagcttccttcctagcggctctgagatgcgcattggcttgacggaagagttttgtgtggggaagtcagagctgagaggttatgggccaggaatccgggtcgatgaagtctcgtttcacagctctgtgaatctggacgaatttgagtctcatcgaatcctccgcttgcaaccacctcagggcgagctgactgtgatgcggtaccaactctccgatgacctcccctcaccgctccccttccggctcttcccctctgtgcagtgggaccgaggctcaggccggctccaggtttatctaaagttgcgatgtgacctgctctcaaagagccaagccctcaatgtcaggctgcacctccccctgcctcgaggggtggtcagcctgtctcaggagctgagcagcccagagcagaaggctgagctggcagagggagcccttcgctgggacctgcctcgggtgcaaggaggctctcaactctcaggccttttccagatggacgtcccagggcccccaggacctcccagccatgggctctccacctcggcctctcctctggggctgggccctgccagtctctccttcgagcttccccggcacacgtgctctggcctccaggtccgattcctcaggctggccttcaggccatgcggcaatgccaacccccacaagtgggtgcgacacctaagccacagcgacgcctatgtcattcggatctgaggctccccaaacgaggacacgacggccaagaggcctaacatcgtgtcccagctcagccaagcctgcgatggagccataacgagtcgtccagggcgtcttctcgtccacccagctctgtaaggggaaggaaataaactaagatgaaggggtctgaaagga

SEQ ID NO: 149016 - DNA, 1362 bp, Artificial Sequence
  derived and/or modified sequence
atgatcagccagttcttcatcctgagcagcaaaggagaccccctcatctacaaggacttccggggggacagcggcggcagagatgtggccgagctgttctacaggaagctgaccggcctgcctggagatgagagccctgtggtgatgcaccaccacggccgccacttcatccacatccgccacagcggcctgtacctggtggtgaccaccagtgaaaatgtgagccccttcagcctgctggagctgctgagccggctggccaccctgctgggggactactgcggcagcctgggggagggcaccatcagcagaaatgtggccctggtgtatgagctgctggatgaggtgctggactatggctacgtgcagaccaccagcacagagatgctgaggaacttcatccagacagaggccgtggtgtccaagcccttcagcctgtttgacctgagctctgtgggcctgtttggagctgagacccagcagagcaaggtggcccccagcagcgctgccagcaggcctgtgctgagcagcagaagtgaccagagccagaagaatgaggtgttcctggatgtggtggagcggctgtctgtgctgattgccagcaatggcagcctgctgaaggtggatgtgcagggcgagatccggctgaagagcttcctgcccagcggcagcgagatgagaattggcctgacagaggagttctgtgtgggcaagtctgagctgcggggctacggccctggcatccgggtggatgaggtgtccttccacagctctgtgaacctggatgaatttgagagccaccgcatcctgcggctgcagcccccccagggcgagctgactgtgatgagataccagctgagtgatgacctgcccagccccctgcccttccgcctcttccccagcgtgcagtgggaccggggcagcggccgcctgcaggtgtacctgaagctgcgctgtgacctgctgagcaagagccaggccctgaatgtgcggctgcacctgcccctgccccggggcgtggtgtccctgagccaggagctgagcagccctgagcagaaggccgagctggccgagggcgccctgcgctgggacctgccccgggtgcagggcggcagccagctgagcggcctcttccagatggatgtgcccggccccccaggcccccccagccacggcctgagcaccagcgccagccccctgggcctgggccctgccagcctgagctttgagctgcccaggcacacctgcagcggcctgcaggtgcgcttcctgcggctggccttccggccctgtggaaatgccaacccccacaagtgggtgcgccacctgagccacagtgatgcctacgtgatccgcatctag

SEQ ID NO: 149017 - DNA, 1362 bp, Artificial Sequence
  derived and/or modified sequence
atgatcagccagttcttcatcctgagcagcaagggcgaccccctgatttacaaagactttcgaggagattccgggggcagagatgtggccgaactattctaccggaaactcactggcttgcctggagacgaaagccccgtcgttatgcatcaccacgggagacatttcatccacatcaggcactcgggtctgtacctcgtggtgactacgagtgaaaatgtcagcccctttagcttgctggaactgctgagtagactcgcaaccctcctgggggactactgcgggtccctcggggaaggcaccatcagtcgtaatgtggcacttgtatatgagcttctggacgaggttcttgattacggctacgtgcagacaacctcaacagagatgctgagaaattttatccagaccgaggccgtggtgtctaagccattcagcttgtttgacctgtcttcagtgggcctttttggagctgagacccagcagagcaaggttgccccctccagtgccgctagtcgccctgtcctctcatctagatctgatcagtctcagaaaaacgaggtcttcctggacgtggtcgagcggttgtccgtgttgatagccagtaacggctcactgttgaaggtggacgttcagggggaaataaggctgaaaagtttcttgcccagcggtagcgagatgagaattggattgaccgaggagttttgtgtcggcaagagcgaactaagggggtatggtcccgggattcgcgtagatgaagtttcctttcactcctcagttaatttagatgaatttgaaagccacaggatcctcagacttcagccaccacagggagagctgaccgtgatgaggtatcagttgtcagacgacctaccatcccctctaccctttcgattattcccatctgtacagtgggaccgtggctccggccgattgcaagtttacctgaaacttcggtgcgacttactgtcaaagagccaggcacttaacgttcgtctccacctccctctgcccaggggagtggtgagtctcagccaggaactgtcctcccctgaacaaaaggctgaactcgcggaaggtgctctcagatgggacctgccccgcgtacagggaggcagccagctttccgggttattccagatggatgtaccggggccacccggacctccttcccacggattatctactagtgcatccccactaggcctcggccctgcctccttatccttcgaactcccgaggcacacttgctcaggtctgcaggtccggtttctccgacttgctttccggccttgcggtaacgccaacccccacaagtgggtgagacatttatcacattcagatgcttatgtgatcagaatttag

SEQ ID NO: 149018 - DNA, 1362 bp, Artificial Sequence
  derived and/or modified sequence
atgatcagccagttcttcatcctgagcagcaagggcgaccccctgatttacaaggattttagaggggacagcgggggccgagatgtcgctgaactcttctaccggaaactgacggggctgcccggcgacgaaagccctgtcgtgatgcatcaccatgggaggcactttatccacatccgacacagtggactctacttggttgtcaccaccagcgagaacgtgagtccgttctcccttctggaattgctttctcgcctcgccaccttgctgggagattactgtggatccctgggcgaggggacgatcagccggaatgtggcacttgtgtacgagctgcttgacgaggtgttagactatggctacgtgcagacaacatccaccgagatgttgcggaactttattcagaccgaagcagtagtgtccaaaccgttctccctgttcgatctgtcttccgtaggattattcggcgcagaaacacagcaatccaaggtggccccttctagcgccgcatcacgtccagttctctctagccgctcggaccagagccagaaaaacgaagtgttccttgatgtggtggaaaggctatccgttttaatagccagtaacggatccttactaaaggtcgatgtccagggcgaaatacggctgaagtctttcctgccctcaggtagtgaaatgcgcattggcctgacagaagaattttgtgtgggcaagtccgaactgcgcggctacggtcccgggattcgggttgatgaagtatccttccatagcagcgtgaacctggacgagtttgagtcccatcgcattctcaggctgcagccccctcagggcgagcttacagtgatgcggtaccagctgagtgatgatctccctagccccctgcccttccgcttgttcccctccgtgcagtgggatagaggtagcggcaggctgcaggtttatttgaagctgagatgtgacctgttgtcgaaatcgcaggcgctaaatgtgagactgcatctgccattgcccaggggtgtggtctccctctctcaggagctcagttccccggagcagaaagcagaactggcagagggagccctgcggtgggatttgcctcgggtgcagggtggaagtcagcttagcggcctcttccaaatggacgtgccagggcctcctggtcctccctcccacggcctgtcaacttctgcctctcctctcggcttaggacctgcctctctatccttcgaactccccagacacacctgcagcggcctgcaagttaggtttcttaggttggctttcagaccatgtggaaatgctaatccgcacaaatgggtgaggcacctcagtcatagtgacgcttacgtcatccgtatatag

SEQ ID NO: 149019 - DNA, 1362 bp, Artificial Sequence
  derived and/or modified sequence
atgatttcacagttcttcatcctttcatccaagggagatcccctgatctacaaggacttccgaggcgacagtgggggaagagacgtagctgagctgttctaccgaaagctgaccggtttgcccggtgacgaatcaccggttgtgatgcatcaccatggcaggcactttatacatatacgccacagcggactgtacctggtcgtcacaactagcgagaatgtgtcgcccttctcacttctggaattactcagtcggctggctactctgttgggagactactgcgggagcttaggcgaaggtaccatctcaaggaatgtggccctggtatatgagcttctcgatgaagtcctggactacggatacgttcaaactacttccaccgagatgcttagaaactttattcaaaccgaagccgtggtctccaagcctttcagtctatttgacctgagcagcgtgggtttatttggagctgagactcagcaatctaaagtggcgccatcttcggccgcatcacggcctgtgctgtctagccggagcgaccagagccagaaaaacgaggtcttcctcgacgtggtcgagcgattgtccgtcctgattgcgtccaacggctcgctcctgaaagtggacgtgcaaggggaaattcggctgaagagtttcctgccatccgggagcgagatgcggatcggcctgaccgaggagttttgcgttggaaagtccgagctcagaggatatggacctggaatacgagttgatgaagtgagtttccatagttccgtgaatctagacgaattcgagtcccacagaatcctccggcttcagcctccccagggggagctgacagtgatgcgatatcagctctcagacgatcttccgtcccccttaccttttagactttttccttctgtgcagtgggaccggggttctgggaggctccaggtatacctcaaactgagatgcgaccttctttctaaatcacaggcgctcaacgtcaggttacacctcccccttccaaggggcgtcgtatccctttcacaggagttgtcctcccccgagcaaaaggccgaactagctgaaggggcactgcgatgggacctcccacgcgtgcaagggggaagccagctgagcgggctgtttcagatggatgtccccggaccacccggacccccttctcatgggctgagcacaagcgcttctccactgggtctgggaccagcatcactgtcgttcgagctgccacgccacacatgctccggtctacaggtgcgattcctgcggctggcattccgcccttgtggcaacgccaatccacacaaatgggttcgccacctgtctcattccgacgcatacgtcatacgcatctag

SEQ ID NO: 149020 - DNA, 1362 bp, Artificial Sequence
  derived and/or modified sequence
atgatcagccagtttttcattctgagttctaagggagatcccttaatttacaaggactttcgcggagactctgggggaagagatgtggccgagttgttctaccgcaaattgacagggttgccgggtgacgaaagcccagttgttatgcatcatcatgggaggcatttcattcacatcagacactctggactttacctggtggtcaccacaagcgagaacgtgtcaccattttcattgctggagctgttaagtagactcgcgacgctgcttggggactattgtggttctttgggggaaggaacgataagtcgaaatgtcgcacttgtctatgagctgctagatgaggtcctagattatgggtacgttcagacaactagcacggagatgcttagaaactttattcagaccgaggcggttgtctccaaacccttttctctgtttgatctctcaagtgtcggcttatttggagctgaaacccagcaatctaaggttgccccatcaagcgccgcaagcagacctgtgttatccagtaggtccgatcagagccaaaagaacgaagtcttcctggacgtcgtggaacggctttcagtgctgatcgcatctaatggcagcctgctcaaggtggatgtgcagggtgaaattagactgaaatcattcttgcccagcggctcagaaatgagaatcggtctcactgaagaattttgcgtgggcaagagcgaattaaggggttatggccctgggatccgggtggatgaggtgtctttccatagttccgtgaacctcgacgagttcgaatctcatcgaatcttgaggctccagccccctcagggggagctgaccgtcatgcgctatcaactgtccgatgacctgccatctcccctgcccttcagattgtttcccagtgtgcaatgggacaggggatcaggaaggctgcaggtgtacctgaaattgagatgtgacctgctgagtaagagtcaggccctgaacgtgcgtctgcacctacctctgcctcgaggcgtggtgagcctgtcccaggagctgtcctcacctgagcagaaggccgagttagctgagggggctttgagatgggatttacctcgtgtgcaaggcggtagtcagctcagcggtctgtttcaaatggatgtcccaggacctcctggcccaccatcgcacggtctgtctaccagtgcttctcccctgggactgggtcccgcatctttgagcttcgagctccccagacacacatgttccggtttgcaggtaaggttccttaggctcgcctttcggccttgcggtaatgccaatcctcataagtgggtgaggcacttgagccattccgacgcctatgtcatccgcatctag

SEQ ID NO: 149021 - DNA, 1362 bp, Artificial Sequence
  derived and/or modified sequence
atgatcagccagttcttcatcctgagcagcaagggcgaccccctgatctacaaggacttcagaggcgacagcggcggcagagacgtggccgagctgttctacagaaagctgaccggcctgcccggcgacgagagccccgtggtgatgcaccaccacggcagacacttcatccacatcagacacagcggcctgtacctggtggtgaccaccagcgagaacgtgagccccttcagcctgctggagctgctgagcagactggccaccctgctgggcgactactgcggcagcctgggcgagggcaccatcagcagaaacgtggccctggtgtacgagctgctggacgaggtgctggactacggctacgtgcagaccaccagcaccgagatgctgagaaacttcatccagaccgaggccgtggtgagcaagcccttcagcctgttcgacctgagcagcgtgggcctgttcggcgccgagacccagcagagcaaggtggcccccagcagcgccgccagcagacccgtgctgagcagcagaagcgaccagagccagaagaacgaggtgttcctggacgtggtggagagactgagcgtgctgatcgccagcaacggcagcctgctgaaggtggacgtgcagggcgagatcagactgaagagcttcctgcccagcggcagcgagatgagaatcggcctgaccgaggagttctgcgtgggcaagagcgagctgagaggctacggccccggcatcagagtggacgaggtgagcttccacagcagcgtgaacctggacgagttcgagagccacagaatcctgagactgcagcccccccagggcgagctgaccgtgatgagataccagctgagcgacgacctgcccagccccctgcccttcagactgttccccagcgtgcagtgggacagaggcagcggcagactgcaggtgtacctgaagctgagatgcgacctgctgagcaagagccaggccctgaacgtgagactgcacctgcccctgcccagaggcgtggtgagcctgagccaggagctgagcagccccgagcagaaggccgagctggccgagggcgccctgagatgggacctgcccagagtgcagggcggcagccagctgagcggcctgttccagatggacgtgcccggcccccccggcccccccagccacggcctgagcaccagcgccagccccctgggcctgggccccgccagcctgagcttcgagctgcccagacacacctgcagcggcctgcaggtgagattcctgagactggccttcagaccctgcggcaacgccaacccccacaagtgggtgagacacctgagccacagcgacgcctacgtgatcagaatctag

SEQ ID NO: 149022 - protein, 779 aa, Artificial Sequence
  derived and/or modified sequence
MASFVTEVLAHSGRLEKEDLGTRISRLTRRVEEIKGEVCNMISKKYSEFLPSMQSAQGLITQVDKLSEDIDLLKSRIESEVRRDLHVSTGEFTDLKQQLERDSVVLSLLKQLQEFSTAIEEYNCALTEKKYVTGAQRLEEAQKCLKLLKSRKCFDLKILKSLSMELTIQKQNILYHLGEEWQKLIVWKFPPSKDTSSLESYLQTELHLYTEQSHKEEKTPMPPISSVLLAFSVLGELHSKLKSFGQMLLKYILRPLASCPSLHAVIESQPNIVIIRFESIMTNLEYPSPSEVFTKIRLVLEVLQKQLLDLPLDTDLENEKTSTVPLAEMLGDMIWEDLSECLIKNCLVYSIPTNSSKLQQYEEIIQSTEEFENALKEMRFLKGDTTDLLKYARNINSHFANKKCQDVIVAARNLMTSEIHNTVKIIPDSKINVPELPTPDEDNKLEVQKVSNTQYHEVMNLEPENTLDQHSFSLPTCRISESVKKLMELAYQTLLEATTSSDQCAVQLFYSVRNIFHLFHDVVPTYHKENLQKLPQLAAIHHNNCMYIAHHLLTLGHQFRLRLAPILCDGTATFVDLVPGFRRLGTECFLAQMRAQKGELLERLSSARNFSNMDDEENYSAASKAVRQVLHQLKRLGIVWQDVLPVNIYCKAMGTLLNTAISEVIGKITALEDISTEDGDRLYSLCKTVMDEGPQVFAPLSEESKNKKYQEEVPVYVPKWMPFKELMMMLQASLQEIGDRWADGKGPLAAAFSSSEVKALIRALFQNTERRAAALAKIK

SEQ ID NO: 149023 - protein, 672 aa, Artificial Sequence
  derived and/or modified sequence
MASFVTEVLAHSGRLEKEDLGTRISRLTRRVEEIKGEVCNMISKKYSEFLPSMQSAQGLITQVDKLSEDIDLLKSRIESEVRRDLHVSTGEFTDLKQQLERDSVVLSLLKQLQEFSTAIEEYNCALTEKKYVTGAQRLEEAQKCLKLLKSRKCFDLKILKSLSMELTIQKQNILYHLGEEWQKLIVWKFPPSKDTSSLESYLQTELHLYTEQSHKEEKTPMPPISSVLLAFSVLGELHSKLKSFGQMLLKYILRPLASCPSLHAVIESQPNIVIIRFESIMTNLEYPSPSEVFTKIRLVLEVLQKQLLDLPLDTDLENEKTSTVPLAEMLGDMIWEDLSECLIKNCLVYSIPTNSSKLQQYEEIIQSTEEFENALKEMRFLKGDTTDLLKYARNINSHFANKKCQDVIVAARNLMTSEIHNTVKIIPDSKINVPELPTPDEDNKLEVQKVSNTQYHEVMNLEPENTLDQHSFSLPTCRISESVKKLMELAYQTLLEATTSSDQCAVQLFYSVRNIFHLFHDVVPTYHKENLQKLPQLAAIHHNNCMYIAHHLLTLGHQFRLRLAPILCDGTATFVDLVPGFRRLGTECFLAQMRAQKGELLERLSSARNFSNMDDEENYSAASKAVRQVLHQLKRLGIVWQDVLPVNIYCKAMGTLLNTAISEVIGKITALE

SEQ ID NO: 149024 - DNA, 2340 bp, Artificial Sequence
  derived and/or modified sequence
atggccagcttcgtgaccgaggtgctggcccacagcggcagactggagaaggaggacctgggcaccagaatcagcagactgaccagaagagtggaggagatcaagggcgaggtgtgcaacatgatcagcaagaagtacagcgagttcctgcccagcatgcagagcgcccagggcctgatcacccaggtggacaagctgagcgaggacatcgacctgctgaagagcagaatcgagagcgaggtgagaagagacctgcacgtgagcaccggcgagttcaccgacctgaagcagcagctggagagagacagcgtggtgctgagcctgctgaagcagctgcaggagttcagcaccgccatcgaggagtacaactgcgccctgaccgagaagaagtacgtgaccggcgcccagagactggaggaggcccagaagtgcctgaagctgctgaagagcagaaagtgcttcgacctgaagatcctgaagagcctgagcatggagctgaccatccagaagcagaacatcctgtaccacctgggcgaggagtggcagaagctgatcgtgtggaagttcccccccagcaaggacaccagcagcctggagagctacctgcagaccgagctgcacctgtacaccgagcagagccacaaggaggagaagacccccatgccccccatcagcagcgtgctgctggccttcagcgtgctgggcgagctgcacagcaagctgaagagcttcggccagatgctgctgaagtacatcctgagacccctggccagctgccccagcctgcacgccgtgatcgagagccagcccaacatcgtgatcatcagattcgagagcatcatgaccaacctggagtaccccagccccagcgaggtgttcaccaagatcagactggtgctggaggtgctgcagaagcagctgctggacctgcccctggacaccgacctggagaacgagaagaccagcaccgtgcccctggccgagatgctgggcgacatgatctgggaggacctgagcgagtgcctgatcaagaactgcctggtgtacagcatccccaccaacagcagcaagctgcagcagtacgaggagatcatccagagcaccgaggagttcgagaacgccctgaaggagatgagattcctgaagggcgacaccaccgacctgctgaagtacgccagaaacatcaacagccacttcgccaacaagaagtgccaggacgtgatcgtggccgccagaaacctgatgaccagcgagatccacaacaccgtgaagatcatccccgacagcaagatcaacgtgcccgagctgcccacccccgacgaggacaacaagctggaggtgcagaaggtgagcaacacccagtaccacgaggtgatgaacctggagcccgagaacaccctggaccagcacagcttcagcctgcccacctgcagaatcagcgagagcgtgaagaagctgatggagctggcctaccagaccctgctggaggccaccaccagcagcgaccagtgcgccgtgcagctgttctacagcgtgagaaacatcttccacctgttccacgacgtggtgcccacctaccacaaggagaacctgcagaagctgccccagctggccgccatccaccacaacaactgcatgtacatcgcccaccacctgctgaccctgggccaccagttcagactgagactggcccccatcctgtgcgacggcaccgccaccttcgtggacctggtgcccggcttcagaagactgggcaccgagtgcttcctggcccagatgagagcccagaagggcgagctgctggagagactgagcagcgccagaaacttcagcaacatggacgacgaggagaactacagcgccgccagcaaggccgtgagacaggtgctgcaccagctgaagagactgggcatcgtgtggcaggacgtgctgcccgtgaacatctactgcaaggccatgggcaccctgctgaacaccgccatcagcgaggtgatcggcaagatcaccgccctggaggacatcagcaccgaggacggcgacagactgtacagcctgtgcaagaccgtgatggacgagggcccccaggtgttcgcccccctgagcgaggagagcaagaacaagaagtaccaggaggaggtgcccgtgtacgtgcccaagtggatgcccttcaaggagctgatgatgatgctgcaggccagcctgcaggagatcggcgacagatgggccgacggcaagggccccctggccgccgccttcagcagcagcgaggtgaaggccctgatcagagccctgttccagaacaccgagagaagagccgccgccctggccaagatcaagtag

SEQ ID NO: 149025 - DNA, 2019 bp, Artificial Sequence
  derived and/or modified sequence
atggccagcttcgtgaccgaggtgctggcccacagcggcagactggagaaggaggacctgggcaccagaatcagcagactgaccagaagagtggaggagatcaagggcgaggtgtgcaacatgatcagcaagaagtacagcgagttcctgcccagcatgcagagcgcccagggcctgatcacccaggtggacaagctgagcgaggacatcgacctgctgaagagcagaatcgagagcgaggtgagaagagacctgcacgtgagcaccggcgagttcaccgacctgaagcagcagctggagagagacagcgtggtgctgagcctgctgaagcagctgcaggagttcagcaccgccatcgaggagtacaactgcgccctgaccgagaagaagtacgtgaccggcgcccagagactggaggaggcccagaagtgcctgaagctgctgaagagcagaaagtgcttcgacctgaagatcctgaagagcctgagcatggagctgaccatccagaagcagaacatcctgtaccacctgggcgaggagtggcagaagctgatcgtgtggaagttcccccccagcaaggacaccagcagcctggagagctacctgcagaccgagctgcacctgtacaccgagcagagccacaaggaggagaagacccccatgccccccatcagcagcgtgctgctggccttcagcgtgctgggcgagctgcacagcaagctgaagagcttcggccagatgctgctgaagtacatcctgagacccctggccagctgccccagcctgcacgccgtgatcgagagccagcccaacatcgtgatcatcagattcgagagcatcatgaccaacctggagtaccccagccccagcgaggtgttcaccaagatcagactggtgctggaggtgctgcagaagcagctgctggacctgcccctggacaccgacctggagaacgagaagaccagcaccgtgcccctggccgagatgctgggcgacatgatctgggaggacctgagcgagtgcctgatcaagaactgcctggtgtacagcatccccaccaacagcagcaagctgcagcagtacgaggagatcatccagagcaccgaggagttcgagaacgccctgaaggagatgagattcctgaagggcgacaccaccgacctgctgaagtacgccagaaacatcaacagccacttcgccaacaagaagtgccaggacgtgatcgtggccgccagaaacctgatgaccagcgagatccacaacaccgtgaagatcatccccgacagcaagatcaacgtgcccgagctgcccacccccgacgaggacaacaagctggaggtgcagaaggtgagcaacacccagtaccacgaggtgatgaacctggagcccgagaacaccctggaccagcacagcttcagcctgcccacctgcagaatcagcgagagcgtgaagaagctgatggagctggcctaccagaccctgctggaggccaccaccagcagcgaccagtgcgccgtgcagctgttctacagcgtgagaaacatcttccacctgttccacgacgtggtgcccacctaccacaaggagaacctgcagaagctgccccagctggccgccatccaccacaacaactgcatgtacatcgcccaccacctgctgaccctgggccaccagttcagactgagactggcccccatcctgtgcgacggcaccgccaccttcgtggacctggtgcccggcttcagaagactgggcaccgagtgcttcctggcccagatgagagcccagaagggcgagctgctggagagactgagcagcgccagaaacttcagcaacatggacgacgaggagaactacagcgccgccagcaaggccgtgagacaggtgctgcaccagctgaagagactgggcatcgtgtggcaggacgtgctgcccgtgaacatctactgcaaggccatgggcaccctgctgaacaccgccatcagcgaggtgatcggcaagatcaccgccctggagtag

SEQ ID NO: 149026 - DNA, 2340 bp, Artificial Sequence
  derived and/or modified sequence
atggcctccttcgttaccgaagtgctggcccattccggtcggcttgagaaagaagatctgggcacccgtatctcccgcctcacgaggcgtgtggaagagataaagggcgaagtgtgtaatatgatctctaaaaaatatagtgagttcttgccatcaatgcagtctgcacaaggattaatcactcaggttgacaaattgtctgaagacatcgacctgcttaagtctagaattgagtcagaagtaaggagagacctccatgttagcaccggagaattcactgatctcaaacaacaacttgagcgcgattctgtcgttctgagtcttctgaagcagctgcaagagttcagcacagctatcgaagagtacaactgcgctctgacagaaaaaaagtacgtgacaggggcccagcgcctggaagaggcccagaagtgtctaaagcttttgaaatccaggaaatgcttcgatctgaaaattctgaagagtctatcaatggagctgactatacaaaagcagaacattctataccatttgggggaggagtggcaaaagctcatcgtttggaagttcccccccagtaaggacacatctagcctcgagtcttatctgcaaacagaactgcatctgtacacagaacagagtcacaaagaagagaagacccctatgcctcccatcagcagtgtattgttagcttttagcgtgctgggagagctccacagcaagctgaagtcttttgggcagatgctgctgaaatacatactcagacctctggcctcttgtccgtctctccacgcggtgatcgaaagccagcccaacatcgttattattcgattcgagtccatcatgaccaatttagagtacccaagtcctagtgaagtgttcacgaaaattaggctagtccttgaagtccttcagaagcaactgctagatctgcctctggacactgacctcgagaatgagaaaacctcaaccgtgcccctcgcagaaatgttaggcgacatgatctgggaggatctgtcagaatgcctgatcaagaactgtctggtttactcaattcctacaaactcctcgaagctgcagcaatatgaggagatcatccagagcaccgaggagtttgaaaacgccctgaaggaaatgagattcctgaagggagatactactgacctgctgaagtacgccagaaatatcaactcccactttgctaacaagaagtgccaagatgttatcgtggcggctagaaatctcatgaccagcgaaatccataacactgtaaagattatccctgattccaagatcaacgttccagagcttcccacacccgacgaagacaataaacttgaggtccagaaggtgagtaacacacagtatcacgaggtgatgaatttggagcccgaaaataccctcgatcagcacagcttttcactcccaacctgtcggatcagtgaatccgtgaagaagctcatggaactcgcctaccagacactgttggaggcaacaacctcctccgaccagtgcgccgtgcagttgttctactcggttcgcaatattttccatctgttccatgatgtggtcccaacttaccataaagaaaatctccagaagctgccacagctggccgctatccatcataacaactgtatgtacatagcccaccatctgctcacactgggccaccagttccggttgagactcgcaccaatcctatgtgatggaactgccacattcgtggacctggtgccaggattcagacgtttagggacggaatgctttttggctcagatgagagcccagaaaggggagttactcgagcggctgagctctgcacgaaacttctccaatatggacgatgaggaaaattattcagctgcctctaaagccgtgagacaggtcttacatcaattgaagagactggggatcgtgtggcaagatgtcctgcctgtgaatatctactgcaaggccatgggaacacttctgaacactgctatcagtgaagttataggaaagattaccgcattggaagatatcagtaccgaggacggcgaccggctgtactctttgtgtaagaccgtcatggacgaggggcctcaagtctttgcccctctatcggaggaatcgaagaataagaaataccaagaggaggttccggtttatgtgcctaagtggatgccattcaaagagctgatgatgatgttacaggcttcgctccaagaaatcggagatagatgggcggatggaaaggggcctcttgctgccgcattctcctccagcgaagtgaaggccctgattcgggcccttttccagaatacagaacgacgggcagccgccctcgctaagatcaaatag

SEQ ID NO: 149027 - DNA, 2019 bp, Artificial Sequence
  derived and/or modified sequence
atggccagcttcgtaacggaggtgctggcccactccggacgactagaaaaggaagatttgggtaccagaatttcacggctgacccgcagggttgaagaaatcaagggggaggtgtgtaatatgatctcaaaaaagtactcagaattccttccgagtatgcagtctgctcaaggcctgattacccaggtggataagctgagtgaagatatagatctgctcaagagccgaattgagtccgaggtccgcagggacctgcatgtgagcacaggcgagtttacagaccttaaacagcagttagaacgggatagtgttgtgctttccttgctcaaacagcttcaggagttcagcacagctatagaggaatacaactgtgcacttacagaaaagaagtatgtgactggcgcccaaagactagaagaggctcagaaatgtctcaaattgctgaaatcacgaaagtgtttcgatctgaagattctgaaatcactgagcatggagcttaccatccagaagcaaaatatcttgtatcacctgggagaagaatggcagaagctcatcgtatggaagttccccccttccaaggatacttcttcattggagagctacttacaaactgaacttcatctctacacagagcagtctcataaggaggagaaaacccctatgccacctataagcagtgtgctgcttgcctttagcgtgcttggcgagctgcacagcaagctcaagagtttcggccaaatgcttctgaaatatatcttacggcccttagctagctgtccgagcctgcacgcagttatcgaaagtcaaccaaatatcgtcatcataagattcgagagtattatgacaaatcttgagtacccttcacccagtgaagtgtttacaaagatccgtcttgtcctcgaagtgcttcaaaaacagcttctcgacctgccactagatactgatctggagaatgagaaaactagtaccgtgccactcgccgagatgctgggcgatatgatttgggaggatttaagcgagtgcctgattaaaaactgcctagtgtacagcatccctacaaacagcagcaagttacagcagtatgaagagattattcagagcacagaggagtttgaaaatgcgctgaaggaaatgcgcttcctcaaaggtgatacaacagacttattaaaatacgctcggaacataaactcccactttgctaataaaaaatgtcaagacgtcatcgtagcagcgcgaaacctaatgacaagcgagatccataacacagtcaaaattatcccggacagcaagattaacgttcctgagctcccaacaccagatgaggacaacaagctcgaggtccagaaggtcagcaacacccagtatcacgaggtgatgaacctggagcccgagaacactctcgatcagcactcctttagcctcccgacttgccgaatctcggagtctgttaagaagctgatggaattagcttaccagaccctcctcgaggccacaaccagctctgaccagtgcgcagttcagctgttttattcggtgaggaatatatttcatctgtttcatgatgtggttcccacataccacaaagagaacctgcagaaacttccccagctcgcggccatccaccataataattgtatgtatatcgcgcaccatttacttaccctgggtcatcagttccggctgcgtctggcaccaattttgtgtgatgggacagccacctttgtggatctggtgcccggttttcggcgcttaggaaccgagtgctttttggcgcagatgagagcccaaaaaggggagctgctggagcgacttagtagcgctcggaacttctcaaacatggacgatgaagagaattactccgcggccagcaaagccgtcaggcaagtcctgcatcagctcaagcgcctcggaatcgtgtggcaggacgtgcttccagttaatatctactgcaaagctatgggcacactcctgaacacggccatcagcgaagtcattggtaagatcacagccctagagtag

SEQ ID NO: 149028 - DNA, 2340 bp, Artificial Sequence
  derived and/or modified sequence
atggccagctttgtgacagaggtgctggcccacagcggccgcctggagaaggaggacctgggcacccgcatcagccggctgaccaggagagtggaggagatcaagggggaggtgtgcaacatgatcagcaagaagtacagcgagttcctgcccagcatgcagagcgcccagggcctcatcacccaggtggacaagctgtctgaggacatcgacctgctgaagagcagaattgaaagtgaggtgcggcgggacctgcacgtgtccactggagagttcacagacctgaagcagcagctggagcgggacagcgtggtgctgagcctgctgaagcagctgcaggagttcagcacagccatcgaggagtacaactgtgccctgacagagaagaagtatgtgactggagcccagaggctggaggaggcccagaagtgcctgaagctgctgaagagcaggaagtgctttgacctgaagatcctgaagagcctgtccatggagctgaccatccagaagcagaacatcctgtaccacctgggggaggagtggcagaagctgattgtgtggaagttcccccccagcaaggacaccagcagcctggagagctacctgcagacagagctgcacctgtacacagagcagagccacaaggaggagaagacccccatgccacccatcagctctgtgctgctggccttctctgtgctgggggagctgcacagcaagctgaagagctttggccagatgctgctgaagtacatcctgcggcccctggccagctgccccagcctgcacgccgtcatcgagagccagcccaacatcgtcatcatccgctttgagagcatcatgaccaacctggagtaccccagccccagcgaggtgttcaccaagatccggctggtgctggaggtgctgcagaagcagctgctggacctgcccctggacacagacctggagaatgagaagaccagcacagtgcccctggccgagatgctgggggacatgatctgggaggacctgtctgagtgcctgatcaagaactgcctggtgtacagcatccccaccaacagcagcaagctgcagcagtatgaggagatcatccagagcacagaggagtttgaaaatgccctgaaggagatgaggttcctgaagggggacaccacagacctgctgaagtatgccaggaacatcaacagccactttgccaacaagaagtgccaggacgtcatcgtggccgccaggaacctgatgaccagcgagatccacaacacagtgaagatcatcccagacagcaagatcaacgtgcctgagctgcccaccccagatgaggacaacaagctggaggtgcagaaggtgagcaacacccagtaccacgaggtgatgaacctggagcctgagaacaccctggaccagcacagcttcagcctgcccacctgccgcatcagcgagagcgtgaagaagctgatggagctggcctaccagaccctgctggaggccaccaccagcagtgaccagtgtgctgtgcagctgttctacagcgtgaggaacatcttccacctgttccatgatgtggtgcccacctaccacaaggagaacctgcagaagctgccccagctggccgccatccaccacaacaactgcatgtacatcgcccaccacctgctgaccctgggccaccagttccggctgcggctggcccccatcctgtgtgatggaacagccacctttgtggacctggtgcccggcttccggcggctgggcacagagtgcttcctggcccagatgagggcccagaagggggagctgctggagcggctgagcagcgccaggaacttcagcaacatggatgatgaggagaactacagcgctgccagcaaggctgtgcggcaggtgctgcaccagctgaagaggctgggcatcgtgtggcaggatgtgctgcctgtgaacatctactgcaaggccatgggcaccctgctgaacacagccatcagcgaggtgattggcaagatcacagccctggaggacatcagcacagaagatggagaccggctgtacagcctgtgcaagacagtgatggatgagggcccccaggtgtttgcccccctgtctgaggagagcaagaacaagaagtaccaggaggaggtgcctgtgtatgtgcccaagtggatgcccttcaaggagctgatgatgatgctgcaggccagcctgcaggagattggagaccgctgggcagatggcaagggccccctggccgccgccttcagcagcagcgaggtgaaggccctgatccgggccctcttccagaacacagagcggcgggctgctgccctggccaagatcaagtag

SEQ ID NO: 149029 - DNA, 2019 bp, Artificial Sequence
  derived and/or modified sequence
atggccagctttgtgacagaggtgctggcccacagcggccgcctggagaaggaggacctgggcacccgcatcagccggctgaccaggagagtggaggagatcaagggggaggtgtgcaacatgatcagcaagaagtacagcgagttcctgcccagcatgcagagcgcccagggcctcatcacccaggtggacaagctgtctgaggacatcgacctgctgaagagcagaattgaaagtgaggtgcggcgggacctgcacgtgtccactggagagttcacagacctgaagcagcagctggagcgggacagcgtggtgctgagcctgctgaagcagctgcaggagttcagcacagccatcgaggagtacaactgtgccctgacagagaagaagtatgtgactggagcccagaggctggaggaggcccagaagtgcctgaagctgctgaagagcaggaagtgctttgacctgaagatcctgaagagcctgtccatggagctgaccatccagaagcagaacatcctgtaccacctgggggaggagtggcagaagctgattgtgtggaagttcccccccagcaaggacaccagcagcctggagagctacctgcagacagagctgcacctgtacacagagcagagccacaaggaggagaagacccccatgccacccatcagctctgtgctgctggccttctctgtgctgggggagctgcacagcaagctgaagagctttggccagatgctgctgaagtacatcctgcggcccctggccagctgccccagcctgcacgccgtcatcgagagccagcccaacatcgtcatcatccgctttgagagcatcatgaccaacctggagtaccccagccccagcgaggtgttcaccaagatccggctggtgctggaggtgctgcagaagcagctgctggacctgcccctggacacagacctggagaatgagaagaccagcacagtgcccctggccgagatgctgggggacatgatctgggaggacctgtctgagtgcctgatcaagaactgcctggtgtacagcatccccaccaacagcagcaagctgcagcagtatgaggagatcatccagagcacagaggagtttgaaaatgccctgaaggagatgaggttcctgaagggggacaccacagacctgctgaagtatgccaggaacatcaacagccactttgccaacaagaagtgccaggacgtcatcgtggccgccaggaacctgatgaccagcgagatccacaacacagtgaagatcatcccagacagcaagatcaacgtgcctgagctgcccaccccagatgaggacaacaagctggaggtgcagaaggtgagcaacacccagtaccacgaggtgatgaacctggagcctgagaacaccctggaccagcacagcttcagcctgcccacctgccgcatcagcgagagcgtgaagaagctgatggagctggcctaccagaccctgctggaggccaccaccagcagtgaccagtgtgctgtgcagctgttctacagcgtgaggaacatcttccacctgttccatgatgtggtgcccacctaccacaaggagaacctgcagaagctgccccagctggccgccatccaccacaacaactgcatgtacatcgcccaccacctgctgaccctgggccaccagttccggctgcggctggcccccatcctgtgtgatggaacagccacctttgtggacctggtgcccggcttccggcggctgggcacagagtgcttcctggcccagatgagggcccagaagggggagctgctggagcggctgagcagcgccaggaacttcagcaacatggatgatgaggagaactacagcgctgccagcaaggctgtgcggcaggtgctgcaccagctgaagaggctgggcatcgtgtggcaggatgtgctgcctgtgaacatctactgcaaggccatgggcaccctgctgaacacagccatcagcgaggtgattggcaagatcacagccctggagtag

SEQ ID NO: 149030 - DNA, 2340 bp, Artificial Sequence
  derived and/or modified sequence
atggccagcttcgtgaccgaggtgctggcccacagcggccggctggagaaggaggacttgggtacaagaatcagcaggctgaccaggagggtggaggaaatcaagggggaggtctgtaacatgatctccaagaaatactccgagtttttacccagtatgcaatcggcccagggactgattactcaagtagacaagctgagcgaggatattgacctgctgaagtcaaggatcgaatcagaggtgcgaagagatctccacgttagcaccggggagtttaccgatttaaagcagcagctggaacgcgactcggtcgtcctaagcctgctcaagcagttacaggagtttagcactgcaatcgaggaatacaattgtgcactgaccgaaaagaaatacgtgactggggctcaaagattagaggaggcccagaaatgtttgaagctgttgaaatctcgaaagtgttttgacctcaaaatcctgaaaagtttatcaatggagcttaccatacagaagcagaacatcctttaccatctcggtgaagagtggcagaaattgattgtttggaaatttcctccatcgaaggacacgagttcactggagtcctacctgcagacagagctccatctgtacactgaacagtcacacaaggaggaaaaaaccccaatgcctccgattagttctgttttactggcctttagcgtgctcggagagctgcactcaaaactgaagagcttcggccagatgcttctaaagtacatactgcggcccctggccagttgtcccagtctgcacgctgtcattgagtcacagcctaatatcgtgatcattcgtttcgaaagtatcatgaccaatctggaatatccatccccgagcgaggtgtttactaagatccggctggtcctggaggtgttacagaaacaattgctggatctgccattagatactgacttagagaatgagaaaacttcaaccgtgcctctggctgaaatgctgggcgacatgatctgggaggatctgtcggaatgcctgattaaaaactgcctcgtctacagcattccaaccaatagcagcaaactgcagcagtacgaagagatcattcagtccacagaggagttcgagaatgcgctgaaggaaatgaggttcctgaaaggggatactaccgatctgctgaaatacgctcgcaatattaacagccatttcgccaacaaaaagtgtcaggatgtgatcgtcgctgctaggaacctgatgactagtgaaatccacaacactgtgaagatcattcccgatagtaagatcaatgtgccagagctgcctactcccgatgaggataataagcttgaagtccagaaagtgagcaacactcagtaccatgaagtaatgaacctggagccagagaatactttggaccaacattctttttcccttcccacatgcaggatctccgagtctgttaagaaacttatggagctggcttaccaaaccctactcgaagcaaccacttcttccgaccagtgcgcggttcagctgttttacagcgtgcgaaatatcttccatctgtttcacgacgtggttccaacttatcacaaagagaatctgcaaaaactacctcagctcgctgccatccatcataataactgtatgtatattgcccaccatctccttacgttgggccaccagtttcgactgcggctagcacctatcttgtgcgacggaaccgccacgttcgttgatctggttcctgggttcagacgcctggggactgaatgtttcctggcccagatgagagctcagaaaggcgaactgctagagcgcctgtcaagcgcgcggaatttctcaaacatggacgatgaggagaattactcagctgctagcaaagcggttcgacaagtgctgcaccagctcaagcgtctgggcattgtgtggcaggatgtgttgcctgtaaatatatactgtaaagccatgggcactctccttaacacagccatttccgaagttatcggcaaaatcacggcactcgaggacatatcgaccgaggacggcgatcgactgtattctctgtgcaaaaccgttatggacgaaggacctcaagtatttgctcccctgagcgaggagtcaaaaaacaagaagtatcaggaggaggttcccgtatatgtacccaaatggatgccctttaaggagcttatgatgatgctgcaagcctctctgcaggagattggtgataggtgggccgacggcaagggacccctcgccgccgcattcagctcctccgaagtaaaggctctgatccgggcactcttccagaatacagagcgcagggctgcagcactggcaaagattaaatag

SEQ ID NO: 149031 - DNA, 2019 bp, Artificial Sequence
  derived and/or modified sequence
atggccagcttcgtgaccgaggtgctggcccacagcggccggctggaaaaggaggatctcggcaccagaattagccgattgacacgcagggtggaggagattaaaggcgaagtctgtaacatgatctctaagaaatactctgaattcctgccctccatgcagtccgcccagggattaatcacacaggtagacaagctgtcagaggacattgatctcttaaaatcccgcatcgaatctgaagtgcggagagatttgcacgtgtccacgggagagttcaccgatttgaaacagcagctcgagcgcgatagtgtggtgcttagcttactgaagcagctgcaggagtttagtacagccatcgaggagtataattgcgccctgactgagaaaaagtatgtgactggggctcaacggttagaggaagcccagaaatgcctcaaattgctgaagtctcgaaagtgttttgatcttaaaatcctgaagtctcttagcatggaactcactatccagaaacagaatatcctatatcatttaggcgaggagtggcagaagctgatcgtgtggaagtttccccctagcaaagatactagtagcctcgagtcttatctgcagaccgaactccacctctataccgaacaatctcataaggaggaaaaaaccccgatgccccctatttcgtcagtgttgctggcattcagcgttttgggcgaactgcactccaaactgaagagcttcggtcagatgctcctaaaatacatccttcggcctttggccagctgcccatcactgcacgccgtcatcgaatcgcaaccaaacatcgtgattattaggtttgaatcaatcatgacaaacttagaatatccgtctccttccgaagtctttacgaaaattcggctggtcctggaagtactgcaaaagcagctgctcgacttacctctggatactgatttagagaatgagaagacaagtactgtgcctctggcggaaatgctcggtgacatgatctgggaggacctaagtgagtgtctcattaagaattgcctcgtctactctattcccactaattcctccaagttgcaacagtacgaggaaatcattcagtctactgaggagttcgaaaatgccttgaaggaaatgagattccttaaaggagacacaaccgacctgctcaaatacgcgcgaaatattaattcgcactttgctaataagaaatgtcaggacgtcattgtggctgcacggaacctgatgaccagtgaaatccacaatactgtgaagataattcccgattccaagattaatgtgcctgagttgcccaccccggatgaggacaacaaactggaggtacaaaaggtgtcgaacactcaatatcatgaggtgatgaaccttgaaccggaaaacaccctcgaccaacatagctttagtctgcccacctgcagaatctcagagtcagtaaagaagttaatggagctagcctaccagactctgctggaggcaaccacatcatccgaccaatgcgccgtccagctgttctattctgtgaggaatattttccatctctttcatgacgtggtgccgacataccacaaagaaaatctccagaaattgccccaactcgccgccatccatcacaacaattgcatgtatattgcccatcatctgctgaccctgggccaccaattcaggctacggttggcgcctattctttgtgatggcaccgccaccttcgtggacctcgtgcctggatttagaagactgggcaccgaatgcttcctcgcccagatgcgggcacaaaagggcgagctgctggaaagactttcatctgctagaaacttttcaaacatggacgatgaggaaaactactcggcagccagtaaggccgtgcggcaggtactccatcaacttaaaagattaggcatagtctggcaggacgttctgccagtgaatatctactgtaaggctatgggcacactcctgaacaccgcaatctctgaggtgattggcaagataaccgcactggaatag

SEQ ID NO: 149032 - DNA, 2340 bp, Artificial Sequence
  derived and/or modified sequence
atggcgtcatttgtgaccgaagtgttagcacatagtggccgtctggaaaaagaggacttggggaccaggatttccagacttacaagaagggtcgaagaaatcaagggcgaggtgtgtaatatgatttcaaaaaaatactccgagtttctcccttctatgcaaagtgcccagggtctgattacacaggttgataaactgagtgaagacattgatcttctaaagtctcggatcgaatccgaggtgcgaagagatctccatgtgagcactggggaattcaccgatctgaagcagcagcttgaacgggattctgtcgtgctcagcttgctcaaacaactacaagagttttctaccgccattgaggagtataactgtgccttgactgaaaaaaagtacgtgactggggctcagcgtctcgaagaggcgcaaaaatgtttaaagcttttaaagtcacgcaaatgctttgatttgaagattttgaagtctctttctatggagcttacaattcagaaacagaacatattgtatcatttaggggaggagtggcaaaaactcatcgtatggaagtttcctcctagtaaggatacatcttccttggaaagctaccttcaaacagagctccacttgtataccgaacagtcacacaaggaggagaaaacccccatgccgccaatttcatctgtgctgttagccttcagcgtcttgggtgaactgcatagtaaattgaagagctttggacagatgctgctgaaatacattttgaggccgcttgcctcttgtccgtcattgcatgccgtgatcgaatcgcagcctaatattgtcataatcagatttgagtcgattatgaccaacttggagtatccatctcccagcgaggtgttcacgaagataagattagtcctggaggttctgcagaagcaactgctagatctaccgctggatactgacttagaaaatgaaaagacttcaaccgttccgctggctgaaatgctaggcgacatgatctgggaggatttatccgaatgtctaatcaaaaattgtctcgtgtatagcatccccactaacagcagtaagcttcagcagtatgaggagatcatacagagcaccgaagaattcgagaatgcccttaaggagatgagattcctcaagggagataccaccgatctacttaaatacgccagaaacattaactcacactttgcaaacaagaagtgtcaggatgttatcgtcgctgcccgtaatctgatgactagcgagattcacaatacagtgaaaattattcccgacagcaaaatcaacgtacccgagctgcctaccccagacgaagataataaactggaagtccaaaaagtgtcaaacacacagtatcacgaggttatgaacctcgagcctgaaaacaccctggaccagcattcatttagcttgcccacttgtaggatcagcgagtccgtgaagaaattgatggaacttgcgtatcaaacgctgctggaagccaccacatcctctgaccagtgtgccgtgcagctcttctattccgtccgcaacatcttccatctgttccatgacgtcgtgccgacctatcacaaagaaaatttgcaaaaactcccccagcttgcagctattcaccacaataactgcatgtacatcgctcatcacttactgaccctcggtcatcagttccgactcaggctagccccaattctgtgtgatggcactgcaaccttcgtcgacttggtgcccggatttcgccgactgggaaccgaatgcttcctcgcccagatgagggcgcaaaagggcgagctgctggaacgcctgtcatcagccagaaatttcagtaatatggatgatgaggagaattactctgccgcttctaaagccgtgagacaagttctgcatcaactgaagcggcttggcatcgtgtggcaggacgtcttgccagtgaatatctactgcaaagcaatgggcactctgctgaacaccgccatttccgaggtaatcgggaagattaccgcacttgaagatataagtacagaggacggcgatagactttattctctttgcaagactgtcatggacgagggaccacaggtcttcgcacccctgtctgaggagtcaaagaataagaaataccaggaggaagttcccgtttatgtcccaaagtggatgccatttaaagagctgatgatgatgctccaagcctctctgcaggaaatcggtgatcgatgggcagatgggaagggtccactggctgctgctttcagcagttccgaagtaaaggcccttattagagccttgttccagaatacagagcggcgtgctgccgctctcgctaaaatcaagtag

SEQ ID NO: 149033 - DNA, 2019 bp, Artificial Sequence
  derived and/or modified sequence
atggcgtcttttgttaccgaggtgctagcacactctgggaggctggagaaagaggacttggggacccgaatcagtcgactaacgcgtcgcgtcgaagagatcaaaggagaggtttgtaacatgatctccaagaagtactcagagttcctgccttctatgcagagcgcgcaaggactgatcacacaggtagataaactatctgaggatatcgacttgttaaagtcccgaatcgagtctgaagtacggcgtgacttacacgtgtcaaccggtgaatttaccgacttaaagcaacagttagagcgggattcagtagtgctatccctgttaaaacagctccaagaattctcaaccgctatcgaggagtacaactgtgccctgaccgaaaaaaaatatgttactggggctcagcggctggaagaagcccagaagtgtctaaagttgctaaagtccagaaaatgtttcgatctcaaaatcctgaagtccttatctatggagttgaccatacagaaacaaaatatattgtaccacctcggcgaggaatggcagaagctgatcgtatggaagttcccacctagcaaggacaccagtagcctcgagtcctacttacagactgaactccacctttacaccgagcagtcccataaggaggagaaaacaccgatgccccctataagctctgtcctgctggcattctcagtactgggcgaattgcacagcaagctgaaaagcttcggacaaatgttactgaagtacatcctgcgtccattagcatcctgtccgtcgctacatgctgtcatcgaatctcaacctaacatcgtgataattcgatttgagagcataatgaccaacctggagtatccatcacccagcgaggttttcactaagatcaggctggttcttgaggtgttgcagaaacagcttttagatctacctctcgataccgatctggagaacgagaagacatccaccgttcccctggctgagatgcttggcgatatgatatgggaagacctcagtgagtgccttatcaagaactgcctagtgtactcaattcccactaattccagcaaactccagcaatatgaggaaatcattcagtcgaccgaggaatttgagaacgccctgaaggaaatgagatttctgaagggggataccactgatctcctgaaatacgcgaggaatatcaactcccatttcgccaataagaaatgccaggatgtcatagtggccgcacgcaatctcatgacgagcgagatccacaacacagtgaaaattataccagattctaagatcaatgttccagagttgcccaccccagatgaagataacaagttggaagtccaaaaggtctccaacacacagtaccatgaagtgatgaacctggaaccagaaaatacactggaccaacatagcttttcattaccaacttgcagaatttccgagtccgtaaagaagctcatggaacttgcgtatcagacattgctggaagctacgactagcagtgaccagtgcgcagtgcaactgttttattccgtgcgcaatattttccatctgttccacgacgtagtgcctacatatcacaaagaaaatctgcagaaactaccccagttagctgccatccaccacaacaactgcatgtacatcgcccaccacctgctgactctcggacatcagttccggcttcgcctggcacccatcctgtgtgatggtacagccaccttcgttgacctcgtaccaggattcagaaggttaggcaccgaatgcttcttagcccagatgcgagcccagaaaggggaattgctggagaggctctcttccgccaggaatttttctaacatggatgacgaagagaactactcagctgctagtaaggccgtgaggcaggtcctccatcaactgaagagactcgggatcgtgtggcaggatgtgttgcctgtcaatatttattgtaaggctatgggtaccttattgaataccgccatttcagaggttatcggaaaaattacagctctggaatag

SEQ ID NO: 149034 - DNA, 2992 bp, Artificial Sequence
  derived and/or modified sequence
agtgcgcccctcgccttccgggcggcggtctgaggcccgcgagactccgtttcccggcaggcctcgcgtcaagacggccggcgggacgggagctgcggcgctggctacgagagtgacccagtcagcgttggttcccgtcttggccatggcctcgttcgtgacagaagttttggcacactccgggaggctggaaaaggaggatctggggacccggatcagccgcctgacccggcgggtggaggagatcaagggtgaggtgtgcaatatgattagcaagaagtacagtgaattcctgcctagcatgcagagcgcgcagggcctgattacccaggtggataagctatctgaagacattgacctgctgaaatccaggatagagagtgaggtccgccgggatcttcacgtatcaaccggtgaatttacagacttaaagcagcagttggaaagagactcagttgtcctaagtttgcttaaacagttgcaggagttttccactgctattgaagaatataattgtgcattaacagagaagaagtatgtcactggtgctcagcgtctggaagaggcacagaaatgcttgaagttattaaaatccagaaaatgctttgatttaaaaatattgaaatctctcagcatggagctcacaatacagaaacagaacatactttatcaccttggagaagagtggcagaagctgattgtatggaagttcccaccatcaaaagataccagcagtttggaatcttacctacaaactgaacttcatttatacactgaacaatcgcacaaagaggagaagacccctatgccacccatcagttctgtcctcttggcattttctgttcttggagaactacacagcaagcttaaatcatttggtcagatgctgctgaagtatatccttaggccgctggcatcttgcccatcccttcatgctgtgatagaaagccagcctaacatagttattattcgttttgaatctataatgactaacttggaatatccatcaccatctgaagtttttacaaagatcagactggtactagaagtgctccagaaacagcttctagatttgccacttgacactgacctggaaaatgaaaaaacatctactgtcccattggctgagatgcttggagacatgatctgggaggacttgtctgagtgcctcatcaaaaactgtttggtttattcgattccaacaaatagcagcaaattacagcaatatgaagagatcatacagtccactgaagaatttgaaaatgccctaaaggaaatgagatttttaaaaggagatactacagatttgctgaaatacgctcgtaacatcaattctcattttgcaaacaaaaagtgccaggatgtgattgtggcagccagaaatctaatgacctcagaaattcataacactgtgaagattattcctgattctaagataaatgtgccagagttacccactcctgatgaggataacaaactggaagtacagaaagtatccaatactcagtaccacgaagtgatgaatttagagcctgaaaatacattggaccaacattccttttccttgcccacatgccgtatcagtgagtctgtgaagaaattaatggaactcgcctatcagactttactagaggcaacaaccagtagtgatcaatgtgctgttcaacttttctactcagtgaggaatatcttccatttgttccatgatgttgtaccaacatatcacaaggagaaccttcaaaaacttccccagttggctgctattcatcacaacaactgtatgtacattgctcaccacttgctgaccctcgggcatcagttcagattgcgtcttgcccccattctttgtgatggcactgctacttttgtggatcttgtacctggcttcaggagacttgggacagaatgctttttggcccaaatgcgggcacagaaaggtgaacttctggaaagattatcaagtgctaggaacttttcaaatatggacgatgaagagaattattctgcagcaagtaaagcagtccggcaggtactgcaccaactaaagagacttggaattgtgtggcaggatgtcctgccagtgaatatatattgcaaggctatggggactttactcaatacagcaatttctgaggtcattggcaaaattactgccctagaggacatatctactgaagatggtgataggttatattccttatgcaaaacagtgatggatgaaggaccccaagtatttgcacctttatctgaagaaagcaagaacaagaaatatcaagaagaggttccagtctatgtgccaaaatggatgccattcaaggaattgatgatgatgctacaagccagcttgcaagaaattggggatcggtgggcagatggaaaaggacccctggcagctgcgttctcttccagtgaagtaaaagctttaattcgtgccttgtttcagaacacagaaagaagagcagctgcccttgctaaaattaaatagctccatcttcttaagaaagctatgtcttgaatatgtggattcttcccttggcataattactcccttaaagacttctttgaatcgcccattggttttggtgaaccagtacatcttggaagtttgactttacagaagaacgtcttacctcctggcctgtacgaggctttgtttaagaactgtttattaagataaattgtcaagtaaagcacctcaattcattgactttctagccatcttcctttgattagctaacaaactgtcaggcagcattatttcatgctgcttccagagccctctgggagctatatacattgtaaatgcaggccctagctttggaacgaggaattgggagattccaggagtcagggtagagaatttctgagcaaatcggagatattttaggggtgtggaggaggggaagggaggaatgggccaccatatttggccttacaggaattaaggagacttcctgtaatatttctttccaataaatattgctttttacaa

SEQ ID NO: 149035 - DNA, 2735 bp, Artificial Sequence
  derived and/or modified sequence
gtcagcgttggttcccgtcttggccatggcctcgttcgtgacagaagttttggcacactccgggaggctggaaaaggaggatctggggacccggatcagccgcctgacccggcgggtggaggagatcaagggtgaggtgtgcaatatgattagcaagaagtacagtgaattcctgcctagcatgcagagcgcgcagggcctgattacccaggtggataagctatctgaagacattgacctgctgaaatccaggatagagagtgaggtccgccgggatcttcacgtatcaaccggtgaatttacagacttaaagcagcagttggaaagagactcagttgtcctaagtttgcttaaacagttgcaggagttttccactgctattgaagaatataattgtgcattaacagagaagaagtatgtcactggtgctcagcgtctggaagaggcacagaaatgcttgaagttattaaaatccagaaaatgctttgatttaaaaatattgaaatctctcagcatggagctcacaatacagaaacagaacatactttatcaccttggagaagagtggcagaagctgattgtatggaagttcccaccatcaaaagataccagcagtttggaatcttacctacaaactgaacttcatttatacactgaacaatcgcacaaagaggagaagacccctatgccacccatcagttctgtcctcttggcattttctgttcttggagaactacacagcaagcttaaatcatttggtcagatgctgctgaagtatatccttaggccgctggcatcttgcccatcccttcatgctgtgatagaaagccagcctaacatagttattattcgttttgaatctataatgactaacttggaatatccatcaccatctgaagtttttacaaagatcagactggtactagaagtgctccagaaacagcttctagatttgccacttgacactgacctggaaaatgaaaaaacatctactgtcccattggctgagatgcttggagacatgatctgggaggacttgtctgagtgcctcatcaaaaactgtttggtttattcgattccaacaaatagcagcaaattacagcaatatgaagagatcatacagtccactgaagaatttgaaaatgccctaaaggaaatgagatttttaaaaggagatactacagatttgctgaaatacgctcgtaacatcaattctcattttgcaaacaaaaagtgccaggatgtgattgtggcagccagaaatctaatgacctcagaaattcataacactgtgaagattattcctgattctaagataaatgtgccagagttacccactcctgatgaggataacaaactggaagtacagaaagtatccaatactcagtaccacgaagtgatgaatttagagcctgaaaatacattggaccaacattccttttccttgcccacatgccgtatcagtgagtctgtgaagaaattaatggaactcgcctatcagactttactagaggcaacaaccagtagtgatcaatgtgctgttcaacttttctactcagtgaggaatatcttccatttgttccatgatgttgtaccaacatatcacaaggagaaccttcaaaaacttccccagttggctgctattcatcacaacaactgtatgtacattgctcaccacttgctgaccctcgggcatcagttcagattgcgtcttgcccccattctttgtgatggcactgctacttttgtggatcttgtacctggcttcaggagacttgggacagaatgctttttggcccaaatgcgggcacagaaaggtgaacttctggaaagattatcaagtgctaggaacttttcaaatatggacgatgaagagaattattctgcagcaagtaaagcagtccggcaggtactgcaccaactaaagagacttggaattgtgtggcaggatgtcctgccagtgaatatatattgcaaggctatggggactttactcaatacagcaatttctgaggtcattggcaaaattactgccctagagtgatggatgaaggaccccaagtatttgcacctttatctgaagaaagcaagaacaagaaatatcaagaagaggttccagtctatgtgccaaaatggatgccattcaaggaattgatgatgatgctacaagccagcttgcaagaaattggggatcggtgggcagatggaaaaggacccctggcagctgcgttctcttccagtgaagtaaaagctttaattcgtgccttgtttcagaacacagaaagaagagcagctgcccttgctaaaattaaatagctccatcttcttaagaaagctatgtcttgaatatgtggattcttcccttggcataattactcccttaaagacttctttgaatcgcccattggttttggtgaaccagtacatcttggaagtttgactttacagaagaacgtcttacctcctggcctgtacgaggctttgtttaagaactgtttattaagataaattgtcaagtaaagcacctcaattcattgactttctagccatcttcctttgattagctaacaaactgtcaggcagcattatttcatgctgcttccagagccctctgggagctatatacattgtaaatgcaggccctagctttggaacgaggaattgggagattccaggagtcagggtagagaatttctgagcaaatcggagatattttaggggtgtggaggagggga

SEQ ID NO: 149036 - protein, 328 aa, Artificial Sequence
  derived and/or modified sequence
MTGSNEFKLNQPPEDGISSVKFSPNTSQFLLVSSWDTSVRLYDVPANSMRLKYQHTGAVLDCAFYDPTHAWSGGLDHQLKMHDLNTDQENLVGTHDAPIRCVEYCPEVNVMVTGSWDQTVKLWDPRTPCNAGTFSQPEKVYTLSVSGDRLIVGTAGRRVLVWDLRNMGYVQQRRESSLKYQTRCIRAFPNKQGYVLSSIEGRVAVEYLDPSPEVQKKKYAFKCHRLKENNIEQIYPVNAISFHNIHNTFATGGSDGFVNIWDPFNKKRLCQFHRYPTSIASLAFSNDGTTLAIASSYMYEMDDTEHPEDGIFIRQVTDAETKPKSPCT

SEQ ID NO: 149037 - protein, 248 aa, Artificial Sequence
  derived and/or modified sequence
MHDLNTDQENLVGTHDAPIRCVEYCPEVNVMVTGSWDQTVKLWDPRTPCNAGTFSQPEKVYTLSVSGDRLIVGTAGRRVLVWDLRNMGYVQQRRESSLKYQTRCIRAFPNKQGYVLSSIEGRVAVEYLDPSPEVQKKKYAFKCHRLKENNIEQIYPVNAISFHNIHNTFATGGSDGFVNIWDPFNKKRLCQFHRYPTSIASLAFSNDGTTLAIASSYMYEMDDTEHPEDGIFIRQVTDAETKPKSPCT

SEQ ID NO: 149038 - DNA, 987 bp, Artificial Sequence
  derived and/or modified sequence
atgaccggaagcaatgaatttaagctaaatcaacctcctgaggatggtatttctagtgtcaagttttccccgaatacaagtcagtttctgctggtctcatcatgggatacttctgtgaggctgtatgatgtgcccgccaattccatgcggttaaaataccagcatacaggagccgtgctggactgtgccttctacgatccaactcacgcgtggagtggcggcctcgaccatcaactgaagatgcacgacctcaacacagaccaggaaaacctcgtggggacccacgacgctcccattagatgcgtggaatactgtcccgaggtcaatgtgatggtgacgggtagctgggatcagactgtcaagttatgggaccctaggaccccatgcaatgcaggcacgtttagccagcctgagaaagtctatactctaagcgtgtcgggcgataggctcatcgtaggtactgctgggcgacgcgtgctggtctgggaccttaggaacatggggtatgtccagcagcgtcgcgagagttctctcaaataccagaccagatgtatacgcgcttttccaaataagcaggggtatgtactgtcttcaatcgagggtcgcgtggccgtggagtaccttgatccatcacccgaagtccagaagaaaaaatacgcattcaagtgccatcgcctgaaagaaaacaatatagagcaaatatacccagtgaatgccattagtttccataatatacacaatacattcgctactggaggttcagatggattcgtaaatatttgggacccatttaataaaaagcgactttgtcaatttcatcgataccccacatctattgcttccctggcattttctaacgatggcactaccctcgcaatcgccagcagttacatgtatgaaatggatgacacagaacaccccgaggacggcatcttcatccgtcaggtgaccgatgcagaaacaaagccaaagtctccatgtacctag

SEQ ID NO: 149039 - DNA, 747 bp, Artificial Sequence
  derived and/or modified sequence
atgcacgacctgaacactgatcaggaaaacctcgtgggcacccatgacgcacccattcgctgtgttgagtactgccccgaagtcaacgttatggtgacgggaagctgggaccagaccgtgaagctatgggacccccgcaccccctgtaatgcgggtacgttttcacaaccagaaaaagtgtacactctctccgtatctggggatcgactgatagtggggactgccggaaggagagttctagtgtgggatctgagaaatatgggatacgttcagcagaggcgcgagtctagcctcaaataccagactcgatgtatcagggctttcccgaataaacagggctatgtgttatcatcgatcgaaggacgagtcgctgtagagtacttagatccctcaccagaggtgcagaagaaaaagtacgcctttaaatgtcaccgcttgaaggagaacaacatcgaacagatctaccctgtaaacgcaatctcttttcacaacatacacaacacgtttgcgaccggtggcagcgatggttttgtgaacatttgggatccgttcaacaaaaagcgcctctgccagttccatcgctaccccaccagcatcgcgagcctggccttttctaatgacggaacgaccttggctatcgccagttcatacatgtatgaaatggacgatactgagcacccagaggacggcatttttattcgccaggtgacggatgctgaaactaaacccaaatctccttgcacttag

SEQ ID NO: 149040 - DNA, 987 bp, Artificial Sequence
  derived and/or modified sequence
atgacaggcagcaatgagttcaagctgaaccagcccccagaagatggcatcagctctgtgaagttcagccccaacaccagccagttcctgctggtgtcctcctgggacacctctgtgcggctgtatgatgtgcctgccaacagcatgaggctgaagtaccagcacactggagctgtgctggactgtgccttctatgaccccacccacgcctggagcggcggcctggaccaccagctgaagatgcatgacctgaacacagaccaggagaacctggtgggcacccatgatgcccccatccgctgtgtggagtactgcccagaggtgaatgtgatggtgacaggctcctgggaccagacagtgaagctgtgggaccccaggaccccctgcaatgccggcaccttcagccagcctgagaaggtgtacaccctgtctgtgtctggggaccggctgattgtgggcacagctggaagaagagtgctggtgtgggacctgaggaacatgggctacgtgcagcagaggcgggagagcagcctgaagtaccagacccgctgcatccgggccttccccaacaagcagggctacgtgctgagcagcattgagggccgggtggccgtggagtacctggaccccagccctgaggtgcagaagaagaagtatgccttcaagtgccaccggctgaaggagaacaacatcgagcagatctaccctgtgaatgccatctccttccacaacatccacaacacctttgccactggaggcagtgatggctttgtgaacatctgggaccccttcaacaagaagaggctgtgccagttccaccgctaccccaccagcatcgccagcctggccttcagcaatgatggcaccaccctggccatcgccagcagctacatgtatgagatggatgacacagagcacccagaagatggcatcttcatccggcaggtgacagatgctgagaccaagcccaagagcccctgcacctag

SEQ ID NO: 149041 - DNA, 747 bp, Artificial Sequence
  derived and/or modified sequence
atgcatgacctgaacacagaccaggagaacctggtgggcacccatgatgcccccatccgctgtgtggagtactgcccagaggtgaatgtgatggtgacaggctcctgggaccagacagtgaagctgtgggaccccaggaccccctgcaatgccggcaccttcagccagcctgagaaggtgtacaccctgtctgtgtctggggaccggctgattgtgggcacagctggaagaagagtgctggtgtgggacctgaggaacatgggctacgtgcagcagaggcgggagagcagcctgaagtaccagacccgctgcatccgggccttccccaacaagcagggctacgtgctgagcagcattgagggccgggtggccgtggagtacctggaccccagccctgaggtgcagaagaagaagtatgccttcaagtgccaccggctgaaggagaacaacatcgagcagatctaccctgtgaatgccatctccttccacaacatccacaacacctttgccactggaggcagtgatggctttgtgaacatctgggaccccttcaacaagaagaggctgtgccagttccaccgctaccccaccagcatcgccagcctggccttcagcaatgatggcaccaccctggccatcgccagcagctacatgtatgagatggatgacacagagcacccagaagatggcatcttcatccggcaggtgacagatgctgagaccaagcccaagagcccctgcacctag

SEQ ID NO: 149042 - DNA, 987 bp, Artificial Sequence
  derived and/or modified sequence
atgaccggcagcaacgagttcaagctgaaccagccccccgaggacggcatatcgagtgtcaagttcagccccaacacttcccagtttcttctggtctccagctgggatacatcagtgaggctctatgacgtgcccgccaacagcatgaggctgaagtaccaacacaccggtgcagtgctcgactgcgccttctatgaccccactcacgcctggagcggagggctggatcaccagctgaagatgcatgacctgaacaccgaccaagagaatctggtgggaacacacgacgcaccgatccggtgtgttgagtattgccctgaagtgaatgtgatggtaaccggatcctgggatcaaacagttaagctatgggaccccagaacaccctgcaatgccggtacattttcccagccagagaaggtgtatacactcagcgtctccggagatcgcctgatagtggggacagctggccggagggtgcttgtgtgggatctgagaaacatgggatatgtgcagcagcgacgggagtcgtctttaaagtatcagactagatgcatccgggcatttccgaataagcagggctacgtcttaagctccatcgaggggagggtagctgtcgagtatctcgatccatcacccgaggtgcagaagaagaagtatgcctttaagtgccaccggctgaaggagaataacattgaacaaatatacccagtgaatgctatcagctttcataacattcataatactttcgctacaggcggcagcgacgggtttgtgaatatttgggatcctttcaacaagaagaggttatgccaattccaccggtacccaacatcaattgcaagcttagcctttagtaatgacggaacgacgcttgctatcgcaagcagctatatgtacgagatggacgacacagagcacccagaggatggcatttttatccgccaggtcacggatgcggagaccaaaccaaagagtccttgtacttag

SEQ ID NO: 149043 - DNA, 747 bp, Artificial Sequence
  derived and/or modified sequence
atgcacgacctgaacaccgaccaggagaacctggtgggcacccacgatgcacccattaggtgtgtggagtattgcccggaagtcaacgtgatggtgacaggttcttgggaccagacggtcaaactgtgggatcccagaacgccttgcaatgcggggaccttctcgcagcctgaaaaggtgtacaccctgtccgtgagtggcgatcgactcatcgtagggactgcagggaggcgcgtcctcgtttgggacttacgcaacatgggctatgtgcagcagaggagggaatccagcttgaaataccagacgcgctgcatcagggctttccccaacaaacaagggtacgtgctcagcagtattgagggcagagtggccgtggaatacctcgacccttcccccgaggttcagaagaagaaatacgcattcaagtgccacagactcaaagagaataatattgagcagatctatcccgtgaacgcaatttctttccataatatacacaatacctttgcaactggagggtcagatggtttcgtgaacatctgggatccgttcaataaaaagagactttgtcagtttcacaggtacccgacgtcaattgcttcattggccttcagcaacgacggtaccactctagctattgcatcctcctacatgtatgagatggatgacaccgagcatcctgaagacggaatatttatcagacaggtcactgatgcggagaccaaacctaagtccccttgcacttag

SEQ ID NO: 149044 - DNA, 987 bp, Artificial Sequence
  derived and/or modified sequence
atgacagggagcaatgaattcaaactgaatcaacctccagaggacggaatcagctccgttaagtttagccccaacacatcacagtttctgctcgttagtagctgggacacgagtgtgagactgtatgatgtccctgctaatagcatgcggttaaagtatcagcatacaggcgctgtactggactgtgcattttacgatcccactcatgcatggagcggaggcctggaccaccagctgaaaatgcacgacctgaacacagaccaagaaaatctggtgggaacccacgatgctcctattcgatgtgtcgaatattgtccagaggtaaacgttatggtcactggcagctgggaccagacagttaagttgtgggaccccaggactccttgcaacgctggtaccttttctcagcccgaaaaggtctacactctgtccgtatcaggtgatagactaatcgtgggcactgccggacgcagagttctggtttgggatctgagaaatatgggctatgtgcagcagcgccgtgaatcgagcctgaaataccagacaagatgcattagggctttccccaataagcaggggtatgtgctctccagtatcgagggcagagtggccgtcgaatacctggatccttctcctgaggtccaaaagaaaaagtacgcattcaaatgtcaccgactgaaagagaacaacatcgagcaaatatatcccgtaaacgccatttcattccacaacatccataacacctttgccaccgggggatcagacggctttgtcaacatttgggacccattcaataaaaagcgcctgtgccagtttcacagatatccaacctcaatcgcgtcactggctttttctaatgatggaactactctggcaatcgcttcatcttacatgtacgagatggacgatacagagcatcccgaagatgggatctttataagacaggtgacagatgctgagaccaaaccaaaatctccgtgcacctag

SEQ ID NO: 149045 - DNA, 747 bp, Artificial Sequence
  derived and/or modified sequence
atgcatgatcttaatacggaccaagagaatctggtgggcacccatgatgctcccattagatgcgtggaatattgtcccgaagtcaatgtgatggtaaccgggagctgggatcagaccgtcaagctctgggatccacggacgccttgcaacgccggaaccttctcacagcccgagaaagtatacacactgagcgtcagcggcgataggctgatagtcggcactgcgggacggagggtcctcgtttgggacctcaggaatatgggttacgtacagcagagacgggaatccagcctcaaatatcagacccggtgcattagagcttttccaaacaagcagggctacgttttgtcctcgatcgaaggcagagtagccgtggagtatctcgatccatcccctgaagtccagaagaagaagtacgccttcaaatgtcaccgtttaaaggagaataatattgagcagatttatcctgtgaatgccattagttttcacaacatccataacactttcgctaccggagggtcggacgggtttgttaatatttgggatccctttaacaagaagcggctgtgccagttccataggtaccctacatctatcgcttccctagccttctcaaatgatggcacaacattggccatagcttcatcctatatgtacgagatggatgacacagagcatccagaagacgggatatttattcgccaggtcacggacgctgaaaccaagccgaagtccccgtgcacatag

SEQ ID NO: 149046 - DNA, 2731 bp, Artificial Sequence
  derived and/or modified sequence
gggttgaccgatgctgggcagctgagcggaccaatcggccccctagactgagacgttggcgtttgaaatcagccaatggcaggtctacactggagcttcctctccgcctccttcgcctagcctgcgagtgttctgagggaagcaaggaggcggcggcggccgcagcgagtggcgagtagtggaaacgttgcttctgaggggagcccaagatgaccggttctaacgagttcaagctgaaccagccacccgaggatggcatctcctccgtgaagttcagccccaacacctcccagttcctgcttgtctcctcctgggacacgtccgtgcgtctctacgatgtgccggccaactccatgcggctcaagtaccagcacaccggcgccgtcctggactgcgccttctacgatccaacgcatgcctggagtggaggactagatcatcaattgaaaatgcatgatttgaacactgatcaagaaaatcttgttgggacccatgatgcccctatcagatgtgttgaatactgtccagaagtgaatgtgatggtcactggaagttgggatcagacagttaaactgtgggatcccagaactccttgtaatgctgggaccttctctcagcctgaaaaggtatataccctctcagtgtctggagaccggctgattgtgggaacagcaggccgcagagtgttggtgtgggacttacggaacatgggttacgtgcagcagcgcagggagtccagcctgaaataccagactcgctgcatacgagcgtttccaaacaagcagggttatgtattaagctctattgaaggccgagtggcagttgagtatttggacccaagccctgaggtacagaagaagaagtatgccttcaaatgtcacagactaaaagaaaataatattgagcagatttacccagtcaatgccatttcttttcacaatatccacaatacatttgccacaggtggttctgatggctttgtaaatatttgggatccatttaacaaaaagcgactgtgccaattccatcggtaccccacgagcatcgcatcacttgccttcagtaatgatgggactacgcttgcaatagcgtcatcatatatgtatgaaatggatgacacagaacatcctgaagatggtatcttcattcgccaagtgacagatgcagaaacaaaacccaagtcaccatgtacttgacaagatttcatttacttaagtgccatgttgatgataataaaacaattcgtactccccaatggtggatttattactattaaagaaaccagggaaaatattaattttaatattataacaacctgaaaataatggaaaagaggtttttgaatttttttttttaaataaacaccttcttaagtgcatgagatggtttgatggtttgctgcattaaaggtatttgggcaaacaaaattggagggcaagtgactgcagttttgagaatcagttttgaccttgatgattttttgtttccactgtggaaataaatgtttgtaaataagtgtaataaaaatccctttgcattctttctggaccttaaatggtagaggaaaaggctcgtgagccatttgtttcttttgctggttatagttgctaattctaaagctgcttcagactgcttcatgaggaggttaatctacaattaaacaatatttcctcttggccgtccattattttctgaagcagatggttcatcatttcctgggctgttaaacaaagcgaggttaaggttagactcttgggaatcagctagttttcaatcttattagggtgcagaaggaaaactaataagaaaacctcctaatatcattttgtgactgtaaacaattatttattagcaaacaattgatcccagaagggcaaattgtttgagtcagtaatgagctgagaaaagacagagcatatctgtgtatttggaaaaataattgtaacgtaattgcagtgcatttagacaggcatctatttggacctgtttctatctctaaatgaatttttggaaacattaatgaggtttacatatttctctgacatttatatagttcttatgtccatttcagttgaccagccgctggtgattaaagttaaaaagaaaaaaattatagtgagaatgagattcatttcaatgtaatgcactaaagcagaacacgaacttagcttggcctattctaggtagttccaaatagtatttttgttgtcaaactttaaaatttatattaatttgcaaatgtatgtctctgagtaggacttggacctttcctgagatttattttatccgtgatgtattttttttaattcttttgatacagagaagggtctttttttttttaagtatttcagtgaaaacttggtgtaagtctgaacccatcttttgaaatgtattttcttcattgcaggtccacctaatcatcctgtgaaagtggtttctctatggaaagctttgtttgcttcctacaaatacatgcttattccttaagggatgtgttagagttactgtggatttctctgttttctgtcttacaagaaacttgtctatgtaccttaatactttgtttaggatgaggagtctttgtgtccctgtacagtagtctgacgtatttccccttctgtcccctagtaagcccagttgctgtatctgaacagtttgagctctttttgtaatatactctaaacctgttatttctgtgctaataaacgagatgcagaacccttgaatgttg

SEQ ID NO: 149047 - DNA, 1175 bp, Artificial Sequence
  derived and/or modified sequence
ctagcctgcgagtgttctgagggaagcaaggaggcggcggcggccgcagcgagtggcgagtagtggaaacgttgcttctgaggggagcccaaggatccaacgcatgcctggagtggaggactagatcatcaattgaaaatgcatgatttgaacactgatcaagaaaatcttgttgggacccatgatgcccctatcagatgtgttgaatactgtccagaagtgaatgtgatggtcactggaagttgggatcagacagttaaactgtgggatcccagaactccttgtaatgctgggaccttctctcagcctgaaaaggtatataccctctcagtgtctggagaccggctgattgtgggaacagcaggccgcagagtgttggtgtgggacttacggaacatgggttacgtgcagcagcgcagggagtccagcctgaaataccagactcgctgcatacgagcgtttccaaacaagcagggttatgtattaagctctattgaaggccgagtggcagttgagtatttggacccaagccctgaggtacagaagaagaagtatgccttcaaatgtcacagactaaaagaaaataatattgagcagatttacccagtcaatgccatttcttttcacaatatccacaatacatttgccacaggtggttctgatggctttgtaaatatttgggatccatttaacaaaaagcgactgtgccaattccatcggtaccccacgagcatcgcatcacttgccttcagtaatgatgggactacgcttgcaatagcgtcatcatatatgtatgaaatggatgacacagaacatcctgaagatggtatcttcattcgccaagtgacagatgcagaaacaaaacccaagtcaccatgtacttgacaagatttcatttacttaagtgccatgttgatgataataaaacaattcgtactccccaatggtggatttattactattaaagaaaccagggaaaatattaattttaatattataacaacctgaaaataatggaaaagaggtttttgaatttttttttttaaataaacaccttcttaagtgcatgagatggtttgatggtttgctgcattaaaggtatttgggcaaacaaaattggagggcaagtgactgcagttttgagaatcagttttgaccttgatgattttttgttt

SEQ ID NO: 149048 - DNA, 987 bp, Artificial Sequence
  derived and/or modified sequence
atgaccggcagcaacgagttcaagctgaaccagccccccgaggacggcatcagcagcgtgaagttcagccccaacaccagccagttcctgctggtgagcagctgggacaccagcgtgagactgtacgacgtgcccgccaacagcatgagactgaagtaccagcacaccggcgccgtgctggactgcgccttctacgaccccacccacgcctggagcggcggcctggaccaccagctgaagatgcacgacctgaacaccgaccaggagaacctggtgggcacccacgacgcccccatcagatgcgtggagtactgccccgaggtgaacgtgatggtgaccggcagctgggaccagaccgtgaagctgtgggaccccagaaccccctgcaacgccggcaccttcagccagcccgagaaggtgtacaccctgagcgtgagcggcgacagactgatcgtgggcaccgccggcagaagagtgctggtgtgggacctgagaaacatgggctacgtgcagcagagaagagagagcagcctgaagtaccagaccagatgcatcagagccttccccaacaagcagggctacgtgctgagcagcatcgagggcagagtggccgtggagtacctggaccccagccccgaggtgcagaagaagaagtacgccttcaagtgccacagactgaaggagaacaacatcgagcagatctaccccgtgaacgccatcagcttccacaacatccacaacaccttcgccaccggcggcagcgacggcttcgtgaacatctgggaccccttcaacaagaagagactgtgccagttccacagataccccaccagcatcgccagcctggccttcagcaacgacggcaccaccctggccatcgccagcagctacatgtacgagatggacgacaccgagcaccccgaggacggcatcttcatcagacaggtgaccgacgccgagaccaagcccaagagcccctgcacctag

SEQ ID NO: 149049 - DNA, 747 bp, Artificial Sequence
  derived and/or modified sequence
atgcacgacctgaacaccgaccaggagaacctggtgggcacccacgacgcccccatcagatgcgtggagtactgccccgaggtgaacgtgatggtgaccggcagctgggaccagaccgtgaagctgtgggaccccagaaccccctgcaacgccggcaccttcagccagcccgagaaggtgtacaccctgagcgtgagcggcgacagactgatcgtgggcaccgccggcagaagagtgctggtgtgggacctgagaaacatgggctacgtgcagcagagaagagagagcagcctgaagtaccagaccagatgcatcagagccttccccaacaagcagggctacgtgctgagcagcatcgagggcagagtggccgtggagtacctggaccccagccccgaggtgcagaagaagaagtacgccttcaagtgccacagactgaaggagaacaacatcgagcagatctaccccgtgaacgccatcagcttccacaacatccacaacaccttcgccaccggcggcagcgacggcttcgtgaacatctgggaccccttcaacaagaagagactgtgccagttccacagataccccaccagcatcgccagcctggccttcagcaacgacggcaccaccctggccatcgccagcagctacatgtacgagatggacgacaccgagcaccccgaggacggcatcttcatcagacaggtgaccgacgccgagaccaagcccaagagcccctgcacctag

SEQ ID NO: 149050 - protein, 660 aa, Artificial Sequence
  derived and/or modified sequence
MEAAAAAAAAAAAAAAAGGGCGSGPPPLLLSEGEQQCYSELFARCAGAAGGGPGSGPPEAARVAPGTATAAAGPVADLFRASQLPAETLHQITELCGAKRVGYFGPTQFYIALKLIAAAQSGLPVRIESIKCELPLPRFMMSKNDGEIRFGNPAELHGTKVQIPYLTTEKNSFKRMDDEDKQQETQSPTMSPLASPPSSPPHYQRVPLSHGYSKLRSSAEQMHPAPYEARQPLVQPEGSSSGGPGTKPLRHQASLIRSFSVERELQDNSSYPDEPWRITEEQREYYVNQFRSLQPDPSSFISGSVAKNFFTKSKLSIPELSYIWELSDADCDGALTLPEFCAAFHLIVARKNGYPLPEGLPPTLQPEYLQAAFPKPKWDCQLFDSYSESLPANQQPRDLNRMEKTSVKDMADLPVPNQDVTSDDKQALKSTINEALPKDVSEDPATPKDSNSLKARPRSRSYSSTSIEEAMKRGEDPPTPPPRPQKTHSRASSLDLNKVFQPSVPATKSGLLPPPPALPPRPCPSQSEQVSEAELLPQLSRAPSQAAESSPAKKDVLYSQPPSKPIRRKFRPENQATENQEPSTAASGPASAATMKPHPTVQKQSSKQKKAIQTAIRKNKEANAVLARLNSELQQQLKEVHQERIALENQLEQLRPVTVL

SEQ ID NO: 149051 - protein, 607 aa, Artificial Sequence
  derived and/or modified sequence
MEAAAAAAAAAAAAAAAGGGCGSGPPPLLLSEGEQQCYSELFARCAGAAGGGPGSGPPEAARVAPGTATAAAGPVADLFRASQLPAETLHQITELCGAKRVGYFGPTQFYIALKLIAAAQSGLPVRIESIKCELPLPRFMMSKNDGEIRFGNPAELHGTKVQIPYLTTEKNSFKRMDDEDKQQETQSPTMSPLASPPSSPPHYQRVPLSHGYSKLRSSAEQMHPAPYEARQPLVQPEGSSSGGPGTKPLRHQASLIRSFSVERELQDNSSYPDEPWRITEEQREYYVNQFRSLQPDPSSFISGSVAKNFFTKSKLSIPELSYIWELSDADCDGALTLPEFCAAFHLIVARKNGYPLPEGLPPTLQPEYLQAAFPKPKWDCQLFDSYSESLPANQQPRDLNRMEKTSVKDMADLPVPNQDVTSDDKQALKSTINEALPKDVSEDPATPKDSNSLKARPRSRSYSSTSIEEAMKRGEDPPTPPPRPQKTHSRASSLDLNKVFQPSVPATKSGLLPPPPALPPRPCPSQSEQVSEAELLPQLSRAPSQAAESSPAKKDVLYSQPPSKPIRRKFRPVCGIQPLISIELRAFRTSRHLFNVSLVHWQALSIA

SEQ ID NO: 149052 - DNA, 1983 bp, Artificial Sequence
  derived and/or modified sequence
atggaagctgcagcagcagcagctgccgctgcggccgccgctgctgccgccgggggcgggtgcggttcaggtcccccacccctgttattgagtgagggagaacaacagtgctactccgagctgtttgctaggtgtgccggcgcagctggaggaggccctgggtccggtcctccggaagccgcccgagtggccccaggcacagccaccgcagcggcgggacccgtcgccgacttatttagggccagtcagttaccagctgagacattgcatcaaattacggaactgtgtggcgcaaaaagagtcgggtattttggccctacccagttttacatcgctctcaaacttatcgctgcagcccagtctggactccctgtcaggatcgagagtattaagtgcgaacttcctctccctaggtttatgatgtccaagaatgacggcgagattcggtttggtaatcccgctgagttgcacggcaccaaagtgcaaattccttatctgacaaccgagaaaaattctttcaagcgcatggatgatgaggataaacagcaagaaacccagtctcccacaatgtcacctctggccagtccaccctcatcgccacctcattaccagagagttccactgtcccacgggtacagcaagctgcgcagcagcgccgaacaaatgcaccctgccccatacgaggctcgccagcctttagtccagcctgaaggctcatcctctggagggccaggcacaaaaccactgcgccatcaggcctccctgatccgcagttttagtgtggagagggaacttcaggataactcctcctacccagacgaaccatggagaatcaccgaggagcagcgggaatactacgtaaatcagttcagaagccttcagcccgacccttctagctttatttcaggatcagtggccaaaaactttttcaccaagtctaaactctccattcccgagctctcatacatatgggagctgtccgacgcagactgtgacggcgcactgacgctgcccgagttctgcgctgcttttcatctgatcgtagccaggaaaaatggttatcctctgccggaaggcctgcctcccaccctacagcctgagtacctccaggccgccttcccgaagccgaagtgggattgtcagttgtttgattcctactctgaatcactgccagctaaccaacagccccgggacctgaatcgaatggagaagaccagtgtgaaggacatggcagacctgcctgttccaaatcaggatgtcacatccgacgataagcaggccttgaagagtacaatcaatgaagccttgccaaaagacgtcagcgaggaccctgctacccctaaggactcgaactcactgaaggctagacccagaagccgctcatactcctccactagcatcgaagaagctatgaagcgcggcgaagaccccccaactcccccgcccagaccacaaaagacccattctcgtgcgagcagcttggacttgaataaagtgtttcagccatcggttccggcgactaaaagtggtctgcttccacccccacctgccttgccccctcgcccatgtccgagccagtcggaacaggtaagtgaagcagagctgcttccacagctgtctagagcgccatcacaggctgccgaaagcagcccagcaaaaaaggatgtgctctacagtcaaccacctagcaagccaattcgtagaaagtttaggcctgagaaccaggcaacagaaaaccaggagccttctacggcagcttctggtcccgcaagcgcagctacaatgaaaccccaccccacagttcagaagcagagttctaagcaaaagaaagcaattcagaccgcaattcgcaagaacaaggaggctaacgccgtacttgcgcgacttaacagcgagttgcagcagcaactgaaggaagtgcatcaggagcgcatcgctttggagaaccaactagaacagctgcggcctgtcactgtgctttag

SEQ ID NO: 149053 - DNA, 1983 bp, Artificial Sequence
  derived and/or modified sequence
atggaggccgctgctgctgctgctgctgctgctgctgctgctgctgctgctgggggcggctgcggcagcggccccccacccctgctgctgtctgagggggagcagcagtgctacagcgagctgtttgcccgctgtgccggggctgctgggggcggccctggcagcggccccccagaggccgcccgggtggcccctggaacagccacagctgctgctggccctgtggccgacctcttccgggccagccagctgcctgctgagaccctgcaccagatcacagagctgtgtggggccaagagggtgggctacttcggccccacccagttctacatcgccctgaagctgattgctgctgcccagagcggcctgcctgtgagaattgagagcatcaagtgtgagctgcccctgccccgcttcatgatgagcaagaatgatggagagatccgcttcggcaacccagctgagctgcacggcaccaaggtgcagatcccctacctgaccacagagaagaacagcttcaagaggatggatgatgaggacaagcagcaggagacccagagccccaccatgagccccctggccagcccccccagcagccccccccactaccagagggtgcccctgagccacggctacagcaagctgcggagcagcgctgagcagatgcacccagccccctatgaggcccggcagcccctggtgcagcctgagggcagcagcagcggcggccctggcaccaagcccctgcggcaccaggccagcctcatccgctccttctctgtggagcgggagctgcaggacaacagcagctacccagatgagccctggaggatcacagaggagcagcgggagtactacgtgaaccagttccgcagcctgcagcctgaccccagcagcttcatcagcggctctgtggccaagaacttcttcaccaagagcaagctgagcatccctgagctgagctacatctgggagctgagtgatgctgactgtgatggagccctgaccctgcctgagttctgtgccgccttccacctgattgtggccaggaagaatggctaccccctgcctgagggcctgccccccaccctgcagcctgagtacctgcaggccgccttccccaagcccaagtgggactgccagctgtttgacagctacagcgagagcctgcctgccaaccagcagccccgggacctgaacaggatggagaagacctctgtgaaggacatggctgacctgcctgtgcccaaccaggatgtgaccagtgatgacaagcaggccctgaagagcaccatcaatgaggccctgcccaaggatgtgtctgaggaccctgccacccccaaggacagcaacagcctgaaggcccggcccaggagccgcagctacagcagcaccagcattgaggaggccatgaagagaggagaagatcctcccaccccaccaccccggccccagaagacccacagccgggccagcagcctggacctgaacaaggtgttccagcccagcgtgcctgccaccaagagcggcctgctgcccccacctccagccctgcccccccggccctgccccagccagagcgagcaggtgtctgaggccgagctgctgccccagctgagccgggcccccagccaggccgctgagagcagccctgccaagaaggatgtgctgtacagccagccccccagcaagcccatccggaggaagttccggcctgagaaccaggccacagagaaccaggagcccagcacagctgccagcggccctgccagcgctgccaccatgaagccccaccccaccgtgcagaagcagagcagcaagcagaagaaggccatccagacagccatcaggaagaacaaggaggccaatgctgtgctggcccggctgaacagcgagctgcagcagcagctgaaggaggtgcaccaggagagaattgccctggagaaccagctggagcagctgcggcctgtgacagtgctgtag

SEQ ID NO: 149054 - DNA, 1983 bp, Artificial Sequence
  derived and/or modified sequence
atggaggccgccgccgccgccgccgccgccgccgccgccgccgccgccgctgggggggggtgtggaagcgggccccctccgctcctcctctcggaaggagagcaacaatgctactccgaactcttcgcgcgatgtgcgggcgcggccggaggcgggcctggctccgggccgcctgaggcagcgagagtggcccccggtactgccacagccgcggcaggtccggtcgcagatctgttccgggcctcccagttgccagctgagacgctccaccagatcactgagctgtgcggcgcgaaacgcgtggggtatttcggccctactcagttctatatagctctgaaattgattgccgcagctcagagcggcctccctgtgcgaatcgagagcataaagtgtgaactccctctcccacggttcatgatgtccaagaatgatggcgaaatcagattcggaaaccccgcagagctgcacggaaccaaagtccagattccgtacctaacaaccgagaaaaattcttttaagagaatggacgatgaagataaacagcaggagacccaaagcccaaccatgagcccattagccagcccaccttctagccccccacattaccagcgagtgcctcttagtcacggctactctaagctcaggtcaagcgcagagcagatgcacccggcaccttacgaagctcgacagccacttgtccagccggagggcagcagttctggaggccccggaaccaaaccgcttaggcaccaggccagccttattaggtcattttctgtggagagggagctccaagataattctagttatcccgacgagccctggcgtattacggaagagcagagggaatactacgttaaccaattccgatcactccagccagacccaagtagtttcatatctggaagtgtagccaagaactttttcaccaagagcaagctttccattccggaactctcctacatttgggaacttagcgacgcggactgtgacggtgctttaactctgcctgaattctgtgcagcctttcatctgattgtggcaagaaaaaacggctacccccttccagaaggactgcccccaacgttgcaaccagagtatctgcaggcggcttttcccaagcccaagtgggactgccagttgtttgatagttattcagagtccctgccagccaaccagcagcccagggatctaaatcggatggagaagactagcgtgaaggatatggctgacctgcccgtccccaatcaggatgtaacttctgacgacaaacaggccctgaagtcaaccatcaacgaagccctgcccaaagacgtttctgaagaccctgccacacccaaggactccaacagtctcaaagctcggccacggagccggtcgtattcatccacgtctattgaggaggccatgaaaaggggggaagatcctcctacccctccaccgagacctcaaaaaacccattcacgcgcaagtagcttggacctcaacaaagtgtttcagccgagcgtcccagcaactaagagcggattgcttccacctccgccagcacttcctccgcgcccatgcccttcacagtctgaacaggtgtccgaggcagaattgctgccccagctttccagggcccccagccaggcagccgagagcagtcctgccaagaaagatgttctgtatagccagcctccgtctaaacctattaggaggaagtttcgccctgagaatcaagcaacagagaaccaagaaccttccacagctgcatctggccccgcatctgccgctaccatgaaacctcatcccacagtgcagaaacagagtagcaagcagaaaaaggcgattcaaaccgctattcgaaaaaacaaggaggctaacgccgtgctggcaaggttaaatagtgagctgcagcagcagctcaaagaggtccatcaggagagaatcgcccttgagaaccaactggagcagctccgaccagtcacggtgttgtag

SEQ ID NO: 149055 - DNA, 1983 bp, Artificial Sequence
  derived and/or modified sequence
atggaggccgcagccgcagccgcagcagccgcagccgcagcggcagctgctggaggcggatgcggcagcggacctccccctcttcttttaagcgagggagaacaacaatgctatagtgaactgttcgcccgatgtgctggagccgctgggggtggaccagggagcgggcctcccgaagctgccagagtggcccctggaactgcgactgccgcagctgggcctgttgccgacctcttcagagcttcgcaactgcccgcagagacactgcaccagattactgagctgtgtggggcaaaacgagtcggctacttcggaccaactcagttttacattgccctgaagctcatcgcagcagcacaaagtggcctccctgtgagaattgagtccataaagtgtgagctgccattgcccagatttatgatgagtaaaaatgacggcgaaattcgatttggtaaccccgcagaactccacggcactaaggttcaaattccatacctaaccacagaaaaaaattcattcaagcgcatggacgacgaggataagcagcaggaaacgcagtcccccaccatgagtccactcgcctctccaccatcctcgcccccacactaccagcgagtgcctttatcacacggttattctaagctacgatcctcagctgagcaaatgcacccagctccttatgaagccaggcagcctctcgtccagccagagggttcctccagtggcggaccagggactaaaccgctccggcaccaggccagcctgattaggagttttagtgtggagagggagctgcaggacaacagctcctacccagacgaaccttggcgcatcactgaggagcaacgagaatattacgtcaaccagtttcgaagtttgcagccagacccttcttctttcatttcgggctctgtcgctaagaatttctttacaaagtctaaactttcaatccctgagctcagctatatatgggaactctcagatgctgattgtgatggtgccctgacacttcccgaattctgtgctgcatttcatttaattgtggcaagaaagaatgggtatccactaccagagggtctccctcccacacttcaaccagagtaccttcaggctgcgttcccaaagcctaagtgggattgccaactgttcgactcatactccgaatcgctgccggcaaatcagcagccgagggacttgaataggatggagaagactagcgtcaaggacatggccgacctccctgtcccaaatcaggacgtgaccagtgacgacaaacaggcattaaagtcgacaatcaacgaagccctgccaaaagacgtgtcagaggacccggctactcctaaggacagcaacagtttgaaggcacgaccacggtcccgttcctatagcagcaccagcatcgaggaggccatgaagcgaggggaggatccacccacacctccgccaagaccgcagaaaacccattccagggcctcttcactggacttaaataaggtatttcagccctctgtccctgccacaaagtcaggtcttctgccccctccgcctgcgctcccaccaaggccatgcccctctcagagcgaacaagtaagcgaagctgaactgcttccacagcttagccgggcaccctcccaagcagccgaaagctccccggcaaagaaagatgtgttgtacagtcagccaccctctaagcccattcgcaggaaatttcggcctgaaaaccaggccacagaaaaccaggagccaagtactgcagcatcaggtcccgcaagcgccgctacaatgaaacctcatcctaccgtccagaaacagtcctctaaacagaaaaaagccatccaaaccgcgatacggaaaaacaaggaggccaatgcagtgctcgccagattaaactccgagctgcagcagcaactgaaagaggtccatcaagagcgaatcgctctggagaaccagctggagcagcttcgacccgtgacagtgctgtag

SEQ ID NO: 149056 - DNA, 7945 bp, Artificial Sequence
  derived and/or modified sequence
ccgggaggaagcggccgcgcggcagctgcggggcgtgggggtggtggtggcggcggcggtggtggcggcggcggcggcggcggcagctgaggccgaggaggcggtggctgtggcggacgcagcagcaccccagctagggacagggctccgccgcgcccccttgctggccccatggaggcggcagcggcggcggcggcggcggcagcggcagcggcagcggcgggcgggggctgtggctccgggccgccgccgctgctgctgagcgagggcgagcagcagtgctactccgagctcttcgcgcgctgtgccggcgccgcgggcgggggccccgggtctgggccccccgaggccgccagagtcgcccccggcacggccactgcggccgccggccccgtggctgacctgtttcgggcatcgcagctgcccgccgagacgctgcaccagatcacagaactgtgtggtgcaaagcgggttggttattttggtccaacacagttttacattgccctgaaattaattgctgcagcacaatctggcctcccggtacggatagagagtattaaatgtgaattgcctctgcctcgctttatgatgtcaaagaatgatggtgagatacgatttgggaacccagctgagctgcatggaactaaggttcagattccatatttaactacagaaaaaaattccttcaaaagaatggacgatgaggataaacagcaggaaacacagtctcccacgatgtcacccctcgcctcccctccttcttccccgcctcattaccagagggtgcccttgagccatggctacagcaaactgcggagcagcgcagaacagatgcatccagcaccttatgaagctaggcagccccttgtccagcccgagggatcctcatcagggggcccaggaaccaagccccttcggcatcaggcttcccttatccggtccttttcagtggagagggaactacaggataacagcagttaccccgacgaaccctggaggataacagaagaacagcgcgagtactatgtcaatcagttccgatcccttcagccagacccaagctctttcatttcaggttctgtggccaagaacttcttcaccaaatcaaagctttccattccagaactctcctatatatgggagcttagtgatgctgactgtgatggagccctgaccctgcctgagttctgtgctgcgtttcatctcattgtggctcggaagaacggctacccattgcctgagggcctccctccaactctgcagccagaatacctgcaggcagcttttcctaagcccaaatgggactgtcaattatttgattcttattctgagtcactgccggcaaatcaacaacctcgtgacttgaatcggatggagaagacatctgttaaagacatggctgaccttcctgtccctaaccaggatgtaactagtgatgacaaacaagctttgaaaagtactatcaatgaagccttaccaaaggacgtgtctgaggatccagcaactcccaaggattccaacagtctcaaagcaagaccaagatccagatcttactctagcacctccatagaagaggccatgaaaaggggcgaggaccctcccaccccgccacctcggccacagaaaacccattccagagcctcctccttggatctgaataaagtcttccagcccagtgtgccagctaccaagtcaggattgttacccccaccacctgcgctccctccaagaccttgtccatcacagtctgaacaagtgtcggaggccgagttactcccacagctgagcagagccccatcccaggctgcagaaagtagtccagcaaagaaggatgtactgtattctcagccaccatcaaagcccattcgtaggaaattcagaccagaaaaccaagctacagaaaaccaagagccttccactgctgcaagtgggccagcttctgcggcaaccatgaaaccgcatccaacagtccaaaagcagtcttccaaacagaagaaggccattcaaactgctatccgcaaaaataaagaggcaaacgcagtgctggctcggctgaacagtgagctccagcagcagctcaaggaggttcatcaagaacgaattgcattggaaaaccaattggaacaacttcgtccggtcactgtgttgtgacccccccatggttcaagtgacagtgggtgaccttgtctgccaagatctttcttttgaatgttttgaacccaactacttgtcatagatgtttgactgtgtcaaaagctgtgagcagcaaaatataatccatatgaccttttctcttgcacttcacttgtatgttttactgtggtggaaaaaatacttcaactgattatcacacttgaaatgctaattatcagtggaatttgtctcctattcttaagtacttctgcaaggtattagatgctgctccttaccaaaaatcagtcttctagcaaataaaaataacttagagcattatttatttaaagaatttatgttttctataaaaccttataaccaagaaccttcaggatgcttgtaaccaagtactttcaggatgctttttgtatgtatatcacatagagtaggttggtttcctgagtaattgggattccaactagatagtcattggtgtgaccataataaaaacaaaagctaaaataaaagcatcagatttagactggcgctgtgccctctaccactatatgccaaaaattgcttctctagtgccattttgatattatatctagctataaataatacatgactatcgttttctattgaatgtcaaagacttactgggtctttacacctctgtaaagtggaggttttggcaatgagctgtttaacttggccaagctaggctgtcaacccagacaactcagtcctttcatgtaaatttttgggcaagagaagtctgctttgactgccttgcctgaccaaattaaataaatagttgccagatctctacttttatcctgcatgggataatatatctgtaaatgcatgagtttggaaaccacccatcaaatatgaaaggctgatgagactgttaggattgataaacatttgttgtttgaacccagctatccaaactggggaagaaggggaaatggttgttaccaacaatctctagtagttattttaatctttattttaacctggattgcaaatgtatggggtatgaggagataatgaaagaaaagtggtcctcatgctggatatgtgactgttttgttctctgtaaagtgtattcttgggaagtgattggtttatatcagattcagaggagcccaattaactccagtgtaggtaatgtaaaacagtaagctcaaattgcagaagccagtatcctacagaaatttaagtagctactgcttctcctgaaagcccaagttgaaaatgggaccacaggggcacagggctactgaccctcacagggcatgccagcgttaacaccactttgagagaccaatggcaagaaatgctgtctcttgtgcattttactaatttccccattcttagggtagcagggtgggggtgtatagggtctttttgaagcagttttggataggtttgcaatatgtgggattcagcctttgatttcaatagagctgagagcttttagaacaagcaggcatttatttaatgtttccttagtccattggcaagctttatcaatagcttaatggcagaggataaaggctcaaacagatgatgttttttccacagaaaaacaaattgttgaatctattccgtgcatatttaaggattttgaattgattttgaaaatcatgaaacttgaactatttttctattccctttttttcttccccatttgctgccttttttgtttttgtgggggaagggttgggagtaagtttaaactcttccgaagattatgaatgggtcagcacaaatttttaggcaactgctttttccatgttctgagatctacgggctacaacaaattttatcagcagtgttttttgtttttttgagatggagacttgctctgtcgcccaggctggagcgcagtggcgcaatctcggctcactgcaacctccacctcctgggttcaagcaattcttgtgcctcagcctcccgagtagctgggattacaggcacccaccaccacgctcagctaatttttgtatttttagtagagatgggattttgtcatgttggctaggctagtctcgaattcctgacctcaagtgatccacccgccttggcctctcgaagtgctgggattacaggcgtgagccacccgcccggctatcagcactgttctgattgcagacgtttcacagcatgtttggcttttggtaaattcaatccaggaaagactagcatgtgcactttatctcataatcttccagtacatatgctctcagttgggatagcagttcatttccattaggcagacgtataaactaaggaatgttagtctgcagtattcattttaaaaatattgacatgcttttcccctcccctccatgaagtcagtgccagagtgagccagattgggaggttggggttttgtttggttggcttggttttcattaagggaaaaaacttgcattggacaatcaaattcccctgagtttcataatctcatcaatattttaagataggcgagcacacactaataatatctatgcctaccttcttgggtggactcaactgtaaccacagtttattagttgcttagaagtggatttttaaaaaacagttaaatgtgtgtgcataacacacaagtaatgacacactactattattattacctaagtagtgctcatcctctctttctgtgttttcttaggatgtgcactttaatttaggattgtaacgcctaataatatttctgtgagcctttaatgtgatttataagatggccgaattactgaaatcaccattatacctcttccataaaacgactccaaagttagacctgcctgttggggagaattctatagacagaaggtcaatgttgtccccatccataggggttgaattaccttgctgttaagtggtcttcccccattgggatcctacagtcccacagatgaaagcacagtagtagctgacagctggcttatttggtccctcggcatctctcgtatgtggcatattgcttttgccactttcctatccagcagacatcaaagcaaaactaaaaggtagatatctggaatgaatgtatatgttgtaattgaggcagatatttgccttaattggaaggatctaactgctttacaaatattaaacaagtgcttgggcatgattgggagaggaggcagcttagctggaagctgtgcccatcttactgtcactggagaataggatgtcagagctgggcaggactggtacccatcatttgcagtttgcatgtggggaaaccaaagccctaagaaacaacagttcctggcccaaaaaatccatagaaagaggtaactagtggcagatttggggcgccaacctgattttatggattttgagttagattctctaccctctatcaatactaaaaatagattaggagggtttttttttctgtttatcatgttgaatttcattgacttaattagtctttaaatttgaaaacatgttttagggagtttagttctagaaatttctcttagattgaagtgacagaatctgaaagaaaagaatatgattgagctatttgttttcctgaacacctcaccttttatgatgcaataagttactctgagtttcttggcagagtttttgacagctgttgctttcaatggattccattcctgtattccttatgggaggttgtttttaaaatagactactgcgattgaaatgaactcaatatgtagttaagttatagttttcttcaatgtatttttagttacttgggtcacaaatgttcaatttcagcatattttagggtgagtaatcaaaaatgtgaatttgcctttgatttcctaccactgtctgagctatcataaagcattctctttagttgtgatttgattctatagtctgtttctaaatgacatttgtctgtttcttaaatgatctcacagccatggtaataatagatgtgtactcagaagatcaataaggtaatattggaattcatgtgttttttgcaattaaggcaggcatttgccaatgtcttcttttaagcagtagttggaaacatctcaattacagtgtaacaccttagagctaaaaacatttgttcaacacaaactagaatcacaccttctcactagatatcaccaagggaatgtggttttaaaaataaaaagaaaacaatataacgtatcatggcaaccagagcttcccatattattgacaagtagggatcattaggttctggtttgaacattctgaatgtgaacaaaatgaaatagtagttaagaggtgttttcccactgtgtttaaagagaacactagtaattctggtttttctttctaactgctttactgtttcaagggtattcttttaaaactctgatttcaaaggatcagttgaatttatactttagttatgggtgttttgttactttttttttttttgtatcatgactcagtatggttcaatttcctagtaagaagtggggatttgtgtttttggagtcctcagctcacatgtcttgttcctccttcagcacaagctaggggagatcctaccaacactgataggtcagtcattgatggcaatttgaatgtgggtattactctgtgagccaccctgcttcgcttgtttgtaaggagaaatgcatctggttatgtgaatttcccgagagcagcagacatggagggccagactttaaaagcaacgcaagcagattcgaagagctgttgccctcttctaaaaaaggcttttggaggctgtgttacatgcatgccctaaagcagtcagtctgttagtatgagcaagacatctgaagtacacagttgcttttaggcttgtatagttattttctacacatgccaacacacatgatgataaaggaaccttttctaggaggcattgcagggtttcaatacacaggacatgttctagttacagaagccttgctctgctgtcaacaattgggaaatgctcattttttcatgttttgtgaatactctggtcttgctgtaagctaatgtcatggctgtgggatattagagaagtgggtttatgactctgaagaccagcagacaccagactttaaaagtgcttaaattggaatttggaaactacagtaaagaaaccttcagataccagttccatcctgaagccctctgttgaacaacagggccagatcctaaagctctttcagggagctcttctctggggctggaacagttgattatgcaaccccattgtgtggagattggatcaactgagttgtgttatttttgttttaagtcaccttgtgcgagaacctcaaccgcacctatcttgggaaccgggtatacccttttctttagcactgctatcctttttgtcttcagcacaaataagatgttcaagtgagccagaagcaagaagagccattttagtcttcatagctattggctaagagagataatgagctgatggtctattttaaccttgaaagtaaaaatgtatattttttcactacaagtacattgaacagtaaaaagtgtaacagcaaagtatatatttgatgccttctgtcttttcatgataatgtgctaacaagttgtgttaatattttactcagccagagtctcattcatttgctaagcattgggaacattatgtatattgaccttaaacataggtgtcctatatttggattgtgacttgtagactcaagctaaccttactgcctctttttcacacttgttgaaaagtctgtgaagaacatagttaaagatctccaactttggaaaatatacatgatgtgaaactggggtgctatgttaaaaataaatgtatgataactaa

SEQ ID NO: 149057 - DNA, 1983 bp, Artificial Sequence
  derived and/or modified sequence
atggaggccgccgccgccgccgccgccgccgccgccgccgccgccgccgccggcggcggctgcggcagcggccccccccccctgctgctgagcgagggcgagcagcagtgctacagcgagctgttcgccagatgcgccggcgccgccggcggcggccccggcagcggcccccccgaggccgccagagtggcccccggcaccgccaccgccgccgccggccccgtggccgacctgttcagagccagccagctgcccgccgagaccctgcaccagatcaccgagctgtgcggcgccaagagagtgggctacttcggccccacccagttctacatcgccctgaagctgatcgccgccgcccagagcggcctgcccgtgagaatcgagagcatcaagtgcgagctgcccctgcccagattcatgatgagcaagaacgacggcgagatcagattcggcaaccccgccgagctgcacggcaccaaggtgcagatcccctacctgaccaccgagaagaacagcttcaagagaatggacgacgaggacaagcagcaggagacccagagccccaccatgagccccctggccagcccccccagcagccccccccactaccagagagtgcccctgagccacggctacagcaagctgagaagcagcgccgagcagatgcaccccgccccctacgaggccagacagcccctggtgcagcccgagggcagcagcagcggcggccccggcaccaagcccctgagacaccaggccagcctgatcagaagcttcagcgtggagagagagctgcaggacaacagcagctaccccgacgagccctggagaatcaccgaggagcagagagagtactacgtgaaccagttcagaagcctgcagcccgaccccagcagcttcatcagcggcagcgtggccaagaacttcttcaccaagagcaagctgagcatccccgagctgagctacatctgggagctgagcgacgccgactgcgacggcgccctgaccctgcccgagttctgcgccgccttccacctgatcgtggccagaaagaacggctaccccctgcccgagggcctgccccccaccctgcagcccgagtacctgcaggccgccttccccaagcccaagtgggactgccagctgttcgacagctacagcgagagcctgcccgccaaccagcagcccagagacctgaacagaatggagaagaccagcgtgaaggacatggccgacctgcccgtgcccaaccaggacgtgaccagcgacgacaagcaggccctgaagagcaccatcaacgaggccctgcccaaggacgtgagcgaggaccccgccacccccaaggacagcaacagcctgaaggccagacccagaagcagaagctacagcagcaccagcatcgaggaggccatgaagagaggcgaggacccccccacccccccccccagaccccagaagacccacagcagagccagcagcctggacctgaacaaggtgttccagcccagcgtgcccgccaccaagagcggcctgctgccccccccccccgccctgccccccagaccctgccccagccagagcgagcaggtgagcgaggccgagctgctgccccagctgagcagagcccccagccaggccgccgagagcagccccgccaagaaggacgtgctgtacagccagccccccagcaagcccatcagaagaaagttcagacccgagaaccaggccaccgagaaccaggagcccagcaccgccgccagcggccccgccagcgccgccaccatgaagccccaccccaccgtgcagaagcagagcagcaagcagaagaaggccatccagaccgccatcagaaagaacaaggaggccaacgccgtgctggccagactgaacagcgagctgcagcagcagctgaaggaggtgcaccaggagagaatcgccctggagaaccagctggagcagctgagacccgtgaccgtgctgtag

SEQ ID NO: 149058 - protein, 1099 aa, Artificial Sequence
  derived and/or modified sequence
MGKLIRMGPQERWLLRTKRLHWSRLLFLLGMLIIGSTYQHLRRPRGLSSLWAAVSSHQPIKLASRDLSSEEMMMMSSSPSKPSSEMGGKMLVPQASVGSDEATLSMTVENIPSMPKRTAKMIPTTTKNNYSPTAAGTERRKEDTPTSSRTLTYYTSTSSRQIVKKYTPTPRGEMKSYSPTQVREKVKYTPSPRGRRVGTYVPSTFMTMETSHAITPRTTVKDSDITATYKILETNSLKRIMEETTPTTLKGMFDSTPTFLTHEVEANVLTSPRSVMEKNNLFPPRRVESNSSAHPWGLVGKSNPKTPQGTVLLHTPATSEGQVTISTMTGSSPAETKAFTAAWSLRNPSPRTSVSAIKTAPAIVWRLAKKPSTAPSTSTTPTVRAKLTMQVHHCVVVKPTPAMLTTPSPSLTTALLPEELSPSPSVLPPSLPDLHPKGEYPPDLFSVEERRQGWVVLHVFGMMYVFVALAIVCDEYFVPALGVITDKLQISEDVAGATFMAAGGSAPELFTSLIGVFISHSNVGIGTIVGSAVFNILFVIGTCSLFSREILNLTWWPLFRDVSFYILDLIMLILFFLDSLIAWWESLLLLLAYAFYVFTMKWNKHIEVWVKEQLSRRPVAKVMALEDLSKPGDGAIAVDELQDNKKLKLPSLLTRGSSSTSLHNSTIRSTIYQLMLHSLDPLREVRLAKEKEEESLNQGARAQPQAKAESKPEEEEPAKLPAVTVTPAPVPDIKGDQKENPGGQEDVAEAESTGEMPGEEGETAGEGETEEKSGGETQPEGEGETETQGKGEECEDENEAEGKGDNEGEDEGEIHAEDGEMKGNEGETESQELSAENHGEAKNDEKGVEDGGGSDGGDSEEEEEEEEEQEEEEEEEEQEEEEEEEEEEEEKGNEEPLSLDWPETRQKQAIYLFLLPIVFPLWLTVPDVRRQESRKFFVFTFLGSIMWIAMFSYLMVWWAHQVGETIGISEEIMGLTILAAGTSIPDLITSVIVARKGLGDMAVSSSVGSNIFDITVGLPVPWLLFSLINGLQPVPVSSNGLFCAIVLLFLMLLFVISSIASCKWRMNKILGFTMFLLYFVFLIISVMLEDRIISCPVSV

SEQ ID NO: 149059 - DNA, 3300 bp, Artificial Sequence
  derived and/or modified sequence
atgggcaaactcatcaggatgggtccccaggaaaggtggctgctgagaacgaagcgattacactggagtcgcttactcttcctgcttggcatgttgatcatagggagcacataccagcatcttcggcgccccaggggactctcatcactatgggcggccgtcagcagtcaccagccaatcaagctggcctcccgggacctgtctagcgaagagatgatgatgatgtccagctctcccagcaagcctagtagcgaaatgggtgggaagatgctggtgccacaggctagcgttggctcagacgaagccacactctcaatgaccgttgagaacattcccagcatgcccaaacgcaccgccaagatgatcccaacaacgaccaagaataattactcaccgacagcagccggcacagaacggcgcaaagaggacacaccaactagcagccgaactcttacatactatactagcacctcctctagacaaatcgtgaagaaatacactccgactccaagaggcgagatgaagagctatagccctactcaggttcgcgaaaaggtcaagtatacacctagtccccgaggcagaagggtaggcacatacgtaccatcgacattcatgaccatggaaacttctcacgccattaccccccggaccacagttaaggatagtgacattactgcaacctacaagatattggagaccaattccctcaagcgcattatggaggaaaccacacccactaccctgaaaggcatgttcgatagtaccccaaccttcttgacccatgaagtggaagccaatgtgctcacctccccccgtagcgtgatggagaagaacaatctgttccctccccgccgtgtggagtcgaacagctcagcacatccttggggcctggtaggaaaatctaaccccaaaaccccccagggaaccgtgctgcttcataccccagccacttcggaaggtcaggtgactataagcaccatgacaggctcttcacctgcggagaccaaggctttcacagccgcttggtcccttcggaatccctcaccaaggacatcagtctcagcaattaagactgcaccagccatcgtttggaggcttgctaagaagccatccactgccccctctacctctacaacccctactgttagggccaaattgactatgcaggtccaccattgtgtggtagtgaagccaacccccgctatgctcacgacaccatcaccaagtctgacaaccgccttgttaccagaggaattaagtccttcacccagcgtgctgccaccatccctcccagacctgcaccccaagggtgagtacccacccgatctcttttcggtcgaggaacggaggcaggggtgggtggtcctgcacgtgtttgggatgatgtacgtctttgttgctctcgctatcgtgtgcgacgaatattttgtccctgcactcggggttatcactgataagctccaaatttccgaggatgtggctggggctaccttcatggccgcgggcggcagcgccccagaactgtttacttcccttattggcgtctttatttcgcatagtaacgttggcatcggcacaatagtggggagcgctgtgttcaatatactgtttgttatcgggacgtgcagccttttctctcgcgagatcctgaatttgacatggtggccattgttcagggatgtatctttttacattctggacctgattatgctgatacttttctttttggattctctgattgcctggtgggagtctctcttactcctgttagcctacgccttttacgtcttcaccatgaagtggaataagcacatcgaagtctgggtcaaagagcaattgtcgcgccggcctgtcgccaaggttatggctctcgaggacctcagtaagcctggtgatggggccattgcggtggacgagctgcaggacaataagaaactgaagctgccaagcctgctgacccgaggcagcagctccacgtcattgcacaacagcacaattcgtagcacaatctatcagctgatgttgcatagcctcgaccccctcagggaagtccgattggccaaggaaaaggaagaggaatccctgaatcaaggagcccgagctcagccgcaggccaaagctgaatctaagccggaggaggaagaacctgctaagctaccagccgttaccgtcaccccagccccggtaccggatatcaagggcgaccagaaggagaaccccggggggcaggaggatgttgccgaggccgagtccacaggagagatgccaggggaagaaggtgaaacagcaggggaaggggaaaccgaagagaaatccggcggggaaacacagcccgaaggcgagggagaaaccgaaacccaggggaagggagaagaatgcgaagatgaaaatgaagcagagggtaaaggcgataatgagggggaagacgaaggagaaattcacgccgaggacggggaaatgaagggcaacgagggagaaactgagtctcaggaactgagtgcagagaatcacggcgaggcaaagaacgacgaaaagggcgtcgaagacggcggtggaagcgatggaggtgattccgaagaagaggaggaagaagaggaggaacaagaggaagaggaagaagaggaagaacaggaggaggaagaggaagaggaggaggaggaagaggagaaaggcaacgaggagccgttgagcctcgactggcccgagacaagacagaagcaggccatctatctgttcctgttgcctattgtctttccactgtggttaacagtccctgacgtgagacgacaggaatctcgaaagtttttcgtcttcacatttctgggcagcattatgtggattgccatgttttcgtacctcatggtctggtgggcccatcaagtgggagagaccataggcatcagtgaggaaattatgggcctgactatcctggccgctgggacatccataccagatctgattacctccgtgattgtagcaaggaagggcctgggcgacatggcagtgtcgagcagtgtcgggagcaacatttttgacattactgtgggtctgcctgtgccctggctgctgttttcactaatcaacgggctgcagcccgtacccgttagctcaaatggattgttttgtgctatagtcctcctgtttctgatgctactgtttgtcatctcttcaatcgcctcctgtaagtggcggatgaacaagatactcggcttcaccatgtttctgctgtattttgtgttcctgataatttctgtgatgcttgaggacagaatcatctcctgccccgtgtcagtctag

SEQ ID NO: 149060 - DNA, 3300 bp, Artificial Sequence
  derived and/or modified sequence
atgggcaagctgatccgcatgggcccccaggagcgctggctgctgcggaccaagaggctgcactggagccggctgctcttcctgctgggcatgctgatcatcggcagcacctaccagcacctgcggcggccccggggcctgagcagcctgtgggccgctgtgagcagccaccagcccatcaagctggccagccgggacctgagcagcgaggagatgatgatgatgagcagcagccccagcaagcccagcagcgagatgggcggcaagatgctggtgccccaggcctctgtgggcagtgatgaggccaccctgtccatgacagtggagaacatccccagcatgcccaagaggacagccaagatgatccccaccaccaccaagaacaactacagccccacagctgctggaacagaaagaaggaaggaggacacccccaccagcagcaggaccctgacctactacaccagcaccagcagccggcagatcgtgaagaagtacacccccaccccaagaggagagatgaagagctacagccccacccaggtgcgggagaaggtgaagtacacccccagcccccggggcagaagagtgggcacctacgtgcccagcaccttcatgaccatggagaccagccacgccatcacccccaggaccaccgtgaaggacagcgacatcacagccacctacaagatcctggagaccaacagcctgaagaggatcatggaggagaccacccccaccaccctgaagggcatgtttgacagcacccccaccttcctgacccatgaggtggaggccaacgtgctgaccagccccaggtctgtgatggagaagaacaacctcttccccccaagaagagtggagagcaacagcagcgcccacccctggggcctggtgggcaagagcaaccccaagaccccccagggcaccgtgctgctgcacaccccagccaccagcgagggccaggtgaccatcagcaccatgacaggcagcagccctgctgagaccaaggccttcaccgctgcctggagcctgaggaaccccagccccaggacctctgtgtctgccatcaagacagccccagccatcgtgtggaggctggccaagaagcccagcacagcccccagcaccagcaccacccccaccgtgcgggccaagctgaccatgcaggtgcaccactgtgtggtggtgaagcccaccccagccatgctgaccacccccagccccagcctgaccacagccctgctgcctgaggagctgagccccagccccagcgtgctgccccccagcctgcctgacctgcaccccaagggggagtaccccccagacctcttctctgtggaggagcggcggcagggctgggtggtgctgcacgtgtttggcatgatgtatgtgtttgtggccctggccatcgtgtgtgatgagtactttgtgcctgccctgggcgtcatcacagacaagctgcagatcagtgaagatgtggccggggccaccttcatggccgccggcggcagcgcccctgagctgttcaccagcctcatcggggtcttcatcagccacagcaatgtgggcatcggcaccatcgtgggcagcgctgtgttcaacatcctcttcgtcatcggcacctgcagcctcttcagccgggagatcctgaacctgacctggtggcccctcttcagagatgtgtccttctacatcctggacctgatcatgctgatcctcttcttcctggacagcctgattgcctggtgggagagcctgctgctgctgctggcctatgccttctacgtgttcaccatgaagtggaacaagcacatcgaggtgtgggtgaaggagcagctgagccggcggcctgtggccaaggtgatggccctggaggacctgagcaagccaggagatggagccatcgctgtggatgagctgcaggacaacaagaagctgaagctgcccagcctgctgacccggggcagcagcagcaccagcctgcacaacagcaccatccgcagcaccatctaccagctgatgctgcacagcctggaccccctgcgggaggtgcggctggccaaggagaaggaggaggagagcctgaaccagggcgcccgggcccagccccaggccaaggccgagagcaagccagaggaggaggagcccgccaagctgcctgctgtgacagtgaccccagcccctgtgcctgacatcaagggggaccagaaggaaaatcctgggggccaggaggatgtggccgaggccgagagcactggagagatgcctggagaggagggggagacagctggggagggggagacagaggagaagtctggaggagagacccagcctgagggggagggggagacagagacccagggcaagggggaggagtgtgaagatgaaaatgaggccgagggcaaaggagacaatgaaggagaagatgaaggagagatccacgcagaagatggagagatgaagggaaatgaaggagaaacagagagccaggagctgtctgctgagaaccacggggaggccaagaatgatgagaagggcgtggaggatggcggcggcagtgatggaggagacagcgaggaggaggaggaggaggaggaggagcaggaggaggaggaggaggaggaggagcaggaggaggaggaggaggaggaggaggaggaggaggagaagggaaatgaggagcccctgagcctggactggccagagacccggcagaagcaggccatctacctgttcctgctgcccatcgtgttccccctgtggctgactgtgcctgatgtgcggcggcaggagagcaggaagttctttgtgttcaccttcctgggcagcatcatgtggatcgccatgttctcctacctgatggtgtggtgggcccaccaggtgggggagaccatcggcatcagcgaggagatcatgggcctgaccatcctggccgccggcaccagcatcccagacctgatcaccagcgtcatcgtggccaggaagggcctgggggacatggctgtgagcagctctgtgggcagcaacatctttgacatcaccgtgggcctgcctgtgccctggctgctcttcagcctcatcaatggcctgcagcctgtgcctgtgagcagcaatggcctcttctgtgccatcgtgctgctcttcctgatgctgctcttcgtcatcagcagcatcgccagctgcaagtggaggatgaacaagatcctgggcttcaccatgttcctgctgtactttgtgttcctgatcatctctgtgatgctggaggaccgcatcatcagctgccctgtgtctgtgtag

SEQ ID NO: 149061 - DNA, 3300 bp, Artificial Sequence
  derived and/or modified sequence
atgggcaagctgatccggatgggcccccaggagcggtggctgctgagaaccaaaaggctgcactggtcccgcctgttattcctcctaggcatgcttataatcggctctacataccagcatttaaggagaccgcgggggctgagcagcctgtgggccgcagttagcagccaccagcccattaagttagcgtctagggatctttccagcgaggagatgatgatgatgtcctcatcccctagcaagcccagctccgagatgggaggcaaaatgctggtgcctcaggcatctgtaggttccgacgaggccactctctctatgacagttgagaacataccatctatgccaaaaagaaccgcaaagatgattccaactacgacaaagaacaattatagtccaacagctgcaggcactgagagacgcaaagaagacactccaaccagcagtaggacattgacttactacacctctacctcaagtcgccagatcgtaaaaaaatatacccctactcctaggggcgaaatgaaaagctactctccaacacaggtgcgcgaaaaggtcaagtacacgccaagtccccgaggccgaagggtaggcacgtacgtcccgagtaccttcatgactatggaaacctcacacgctatcacaccccgtactacggtgaaagattccgacattaccgcaacctataagatcctcgaaactaactccctaaagcggattatggaggagacgacacctactacgctgaaaggtatgttcgactccacacctacattcttgacccacgaggtggaggccaacgtactgacgtctcctcggagcgtgatggaaaagaataacctcttccctcctaggagggttgaaagcaacagcagtgcccacccctggggcctcgtgggcaagagcaatccgaagacccctcaaggaaccgttctgctgcatacaccagctaccagtgagggccaagtgaccatctcaacgatgacaggctcttctccagccgagactaaagcttttaccgcggcgtggtcattaagaaatccctctcccagaactagcgtgagtgcgataaaaaccgctcctgcaattgtgtggcgtctggccaaaaaaccatccacggctccctccacctccacaacacctacagtgcgagctaaattgactatgcaagtccaccattgcgtcgtagtaaagcccacaccagcgatgttgacgactccttcccccagtcttactacagcgctactcccagaagagttgtccccatctcccagtgtcttacctccttcgctgcccgacctgcatccaaaaggggagtaccctccagacttgtttagcgtagaggagcggagacaaggttgggtagtgctgcacgtgtttggaatgatgtacgtttttgtggccctggctattgtatgtgatgaatatttcgttccggcattaggcgttatcacagacaagctccagatatctgaagatgtggcaggcgcaacttttatggccgctggtggcagcgctccagaactgttcacctccctcatcggagtctttatcagccactccaacgtaggtataggcaccattgtgggcagcgccgtctttaatatactcttcgttatcgggacctgtagcctattctctcgcgaaattcttaatctgacgtggtggcctctatttcgcgacgtttctttttatatcctcgatctcatcatgctgatactgttcttcctagattctctaattgcctggtgggagtcccttctgttactcttagcttacgcgttctacgtttttaccatgaaatggaacaaacacatcgaggtgtgggtcaaggagcaactttccaggcgccctgtagcaaaagtcatggcattagaagatctgagtaaacctggagatggtgctattgccgtggacgagcttcaggacaacaagaagttaaagctgccatctctgttgacccgtgggtccagtagcacgagcctgcataacagcacgatccggtctaccatttatcaacttatgctgcattccctcgatcctctgagagaagttcggctagcaaaagagaaagaggaggagtcacttaaccagggggctagggcccagccccaggctaaagctgagagcaagcccgaggaggaagagcctgccaagctgcccgcagtgactgtcacacctgcaccagtccctgatattaagggagaccaaaaggaaaaccccgggggtcaggaggatgtagcagaagctgaaagtaccggcgaaatgcctggtgaagaaggcgagaccgcaggggaaggcgaaaccgaagagaagtctggcggcgagacacagcccgaaggcgaaggcgagacggaaacacaggggaagggagaggagtgcgaggatgagaatgaagccgagggtaaaggggacaatgagggagaggatgagggagaaatccacgcggaagacggcgagatgaaggggaatgagggtgaaacagagtcgcaagaattgagcgctgaaaatcacggcgaggcaaaaaatgatgagaaaggagtggaagatggcgggggttccgatgggggagattctgaggaagaggaagaagaggaagaggaacaggaagaggaggaagaggaagaggagcaggaggaggaagaggaagaagaagaggaagaggaggaaaagggcaatgaggagccactgtccctggattggcctgagacgcgccagaaacaagcaatctacttgttccttctgccaatcgtctttccattatggttaacagtcccagatgtgcgcaggcaggaaagccggaagttcttcgtgtttactttcctgggatctataatgtggattgcgatgttttcatatcttatggtttggtgggcgcaccaggtcggtgaaactattgggatatccgaggaaatcatgggactgaccatactcgccgctggtacatctattcctgatttgatcaccagtgtgatcgttgcaagaaagggtcttggcgacatggctgtgagctctagcgtgggatcaaatatattcgatattacagtggggctgcctgtcccttggcttctgttctctttaataaacgggcttcaaccggttccggtgagcagtaacggtctattctgcgctatcgtgctgttgtttttgatgcttctgtttgttatatcctccatcgcttcctgtaaatggagaatgaataagattcttgggttcactatgtttcttctttacttcgtctttttgataatttccgtcatgttggaagaccgtatcatctcttgccccgtctctgtttag

SEQ ID NO: 149062 - DNA, 3300 bp, Artificial Sequence
  derived and/or modified sequence
atgggcaaactgataagaatgggcccacaggagcggtggttattgcgtacaaaaaggctccactggtcacgcttgttgtttctccttggtatgttgatcatagggagcacgtaccagcatctgcgccgtccccgaggcctatcctcactgtgggccgcagtgagcagccaccagccgatcaagttggcatccagagatctgtcaagtgaagagatgatgatgatgtctagctctccttccaagccttccagcgagatgggcggaaagatgctagtccctcaggcatcggtcggctccgatgaggctacgttgtccatgacagtggagaacatcccaagcatgcccaagaggaccgcgaagatgattccgactaccaccaagaataactattccccaacagccgctggaactgaacgcagaaaagaggacacgcccacctcatctcgcaccctgacctactatacctccacatccagcaggcagatagtcaagaagtatactccgacaccacgcggtgagatgaagagctatagcccaactcaagtgcgggagaaggttaaatatactccctcaccacgcggacggagagtcggtacatatgtccctagtacgtttatgactatggagacatcacatgcgatcaccccgagaacaaccgtgaaggatagcgacatcacagcaacatataaaatcctcgaaacgaacagcttaaagcgtatcatggaagaaacaaccccaaccacgttaaaaggtatgtttgattcaacccccacgttcttgacccacgaagtggaagcgaacgttctgactagtcctcgtagtgtaatggaaaagaataatctgtttcccccacgtcgagtggaatctaactcatctgcccatccttggggactcgtggggaagagcaacccgaaaactcctcagggcacggttctgctgcacacccctgcgactagcgagggccaagtaacaatctccaccatgaccggttcctctcccgcagagaccaaggctttcaccgccgcatggagcctccgaaatccgtcccccagaacatccgtgtccgcaattaaaactgcccctgctatcgtgtggagactagctaagaaaccaagtacggcgccttcaaccagcaccactcctacagtgagggccaaactaacaatgcaggtgcaccactgcgtcgtggtcaagcccacaccagctatgctcaccacgcctagcccctcactgacaactgcactgctgccagaggagctgagcccatcaccttctgtgctgccaccttctcttccagacttacatccaaaaggagagtaccctccagacctgttctccgttgaggagaggaggcagggatgggtggtgctgcatgtctttggaatgatgtatgtgttcgtggccttggcaatcgtctgtgacgagtacttcgtgcccgcactgggcgttatcacggataagttgcaaatctccgaagatgtcgccggagcaacctttatggcagctggcggttccgcacccgaactgttcaccagcttaataggtgtcttcatatcacattccaacgttggaattgggactattgttggctccgcagtttttaacatcctgtttgttataggcacctgcagtctgttctcgcgggaaattctaaatcttacatggtggccattgtttagagacgtgagtttttatattctggacctgattatgctgattctatttttcctcgatagcttgatagcttggtgggagtctctgcttcttttgttggcatatgccttctatgtgttcaccatgaagtggaacaagcatattgaggtctgggtcaaggagcagctcagtcgacggccagttgctaaagtgatggctctcgaagatctgagcaagcccggagacggggctattgctgttgatgaactgcaggacaacaaaaaactaaaactgcccagtcttctaacacgcggatccagctccaccagccttcacaattccacaattcgcagtacgatctaccaactcatgctgcattcattggaccccctgcgcgaggtgcgattagctaaggagaaagaggaggagtcattaaatcagggagcgagggcccagccacaggctaaagcagaatcgaagccggaggaggaggaaccagccaagctgcctgccgtgactgtgactcccgcaccagttccagacattaagggggatcagaaggaaaaccctggcggtcaggaggatgttgccgaggccgagtccacaggggaaatgcccggagaagaaggcgaaactgctggcgaaggcgagacagaagagaaatcaggaggcgagactcagcctgaaggagaaggtgaaacagagacacaaggcaagggagaggaatgtgaggacgaaaacgaggccgagggaaagggcgataacgaaggcgaagacgaaggtgagatccatgctgaggatggtgaaatgaaagggaacgagggcgagacagagtcacaagagctgtccgccgagaaccatggggaggccaagaacgatgagaagggggtggaagacggtggcggttccgacggcggagattccgaagaagaggaggaggaggaagaagaacaggaggaggaagaagaagaggaagaacaagaggaagaggaggaggaggaggaagaggaggaagagaagggcaatgaagagcccttgtccctagactggccagagaccaggcagaagcaggcaatttacctatttttgttgcccatagtgtttcctttatggttaaccgtacccgacgtgcgaagacaggagagtcggaaattcttcgtgtttacattcctgggatcaatcatgtggattgctatgttcagttaccttatggtttggtgggcacatcaggtgggtgaaactattggcatttcggaggagattatgggcttaaccattctagccgcaggcacgtctatccccgatttgataacatcagtgattgtggctcgaaagggattgggggacatggcagtcagctcctctgtgggctccaatatattcgatatcacggttggactgcctgttccatggcttctcttctcactaatcaacggactgcagccagtccccgtgtcttccaacgggctcttctgtgctattgtgctcctgtttctcatgctcctgtttgtgatcagtagcatcgctagctgtaaatggcgcatgaacaagatcctaggcttcacaatgttcctgctttatttcgtgttcctgatcatctctgtgatgctggaagatcgcattatatcttgccctgtctcagtgtag

SEQ ID NO: 149063 - DNA, 5768 bp, Artificial Sequence
  derived and/or modified sequence
cccttcacacccgaccctgccttgaattaggattccataggagagctgggggcaggagaatggggtgttccctgctgtccagcttcagacccactctttgagatattggattctgacaagtttccagagctgagaagacagccagatgtcaaggtctgaagggttgtggataccccctggctgggcttcatggagaaatcttctctgatcaccaacctgaatcccagagtagcctccatcttaggacagaatgagaggccttctgtaaccagatataactggccagcatggggaaattgatcaggatggggccgcaagagaggtggttactccggacaaagcggcttcattggagtcgcctcctcttcttactgggaatgttgatcatcggttctacttatcagcaccttaggagaccccggggcctttcctcattgtgggcagcagtctcttctcatcagcctataaaactggccagtcgggacctctccagtgaagagatgatgatgatgagcagcagcccttcaaaacctagctccgaaatggggggtaagatgctggtaccccaagcctcagtgggcagtgatgaagcaacactgagcatgacagtggagaatatccccagtatgcctaaaagaacagccaagatgatcccaacaacaaccaagaataattacagcccaacagcagcaggtacagaaagaaggaaggaagacaccccaacatccagtagaacactgacttactacacctcaacttcaagcagacaaatagtaaaaaagtataccccaacacccaggggagaaatgaagagctacagcccaactcaagtgagggaaaaggtgaagtatactccttccccacgtggtagaagagtaggcacttacgtgccgtccacattcatgacaatggaaacaagccatgcgatcacccccaggacaacagtgaaagacagtgacattacagcaacctataaaatactcgaaaccaactctcttaagagaataatggaggaaaccaccccaaccactctcaagggaatgtttgatagcaccccaacttttctgacacatgaggtagaagcaaacgtcttgacttctccaaggagcgtcatggaaaaaaacaacctgtttccccccagaagagtggaaagtaacagctcagcccatccctgggggttagtgggaaagagcaacccgaagactccccagggaacagtcctgttgcataccccagccacctctgaggggcaggtgacaataagcaccatgacaggcagcagcccagcagaaaccaaagccttcactgctgcctggagtcttaggaatccttcacccaggaccagtgtatcagccatcaaaacagccccagccatagtctggaggctggcaaagaaaccttccacagcacccagcacctcaacaacccctacggtcagggcaaagctgaccatgcaggtccatcactgtgtggttgtgaagccaaccccagccatgctcaccactccctccccaagcctcacaacagccctgctcccagaggagctcagtcctagtccctcagtgctgcctcccagcttgccagacctccaccccaagggagagtaccccccagatctgttcagtgtggaggagcggcggcagggctgggtggtcctgcacgtttttggcatgatgtatgtgtttgtggccttggccattgtttgcgacgagtacttcgttccagccctgggtgtcatcacagacaagctgcagatctccgaggatgtggcaggcgccacattcatggctgctggaggctctgctcctgagctcttcacctccctcatcggtgtcttcatttcccacagcaacgtgggcattggtaccattgtgggctctgctgtgttcaacattctctttgtcattggcacttgttccctcttctcccgagagatcctcaacctcacctggtggcccttattccgtgatgtctccttctacatccttgacctgataatgctcatcctcttcttcctggacagcctcattgcctggtgggagagcctgctgctgctgctggcctatgccttctatgtgttcaccatgaagtggaacaagcatatcgaggtctgggtgaaggagcagctcagcaggaggccagtggccaaggtcatggccttagaagacctcagcaagccgggcgatggggccattgcggtggatgagctacaggataacaagaagctgaagctcccgtccttgctgacccgagggagcagctcgacctctctgcacaacagcaccatccgcagcaccatctaccagctcatgctccacagcctggaccccctgagggaagttcgccttgccaaggagaaggaggaggagagcttgaatcaaggggccagagcccaaccccaggccaaagcagaaagcaaaccagaagaggaggagccagccaagctccctgcggtcacggtcacaccagcccctgttccagacatcaagggagatcagaaggagaatccaggcggtcaggaagatgtggctgaggccgagagcacaggtgaaatgccaggcgaagagggcgaaactgctggtgaaggtgaaactgaagagaaaagtggaggtgaaactcaaccagaaggtgaaggtgaaactgaaacacaaggaaaaggagaagaatgtgaagatgaaaatgaagcagaaggaaaaggagacaatgaaggtgaagatgagggtgaaatccacgcagaagatggtgaaatgaaaggtaatgaaggtgaaactgaaagccaggaactcagtgctgaaaatcacggtgaagccaaaaatgatgagaaaggtgtagaagatggagggggaagtgatggaggggatagcgaagaggaggaagaggaggaggaagagcaggaggaagaggaggaggaggaagagcaggaggaagaggaggaggaggaggaggaagaggaggagaagggaaatgaagagcctctgtccctggactggcctgaaaccaggcagaagcaggccatttacctcttccttctgcccatcgtgttcccactgtggctgacagtccccgacgtccgaaggcaggagtctaggaagttttttgttttcaccttcctgggatctatcatgtggatagccatgttctcatacctcatggtgtggtgggctcaccaggttggtgaaacaatagggatttctgaagagatcatgggcctgacaatccttgcagcaggcacatcaattcctgacctcatcaccagtgtgattgtcgctcgaaaaggcctgggagacatggctgtgtcaagctctgtgggcagtaacatatttgatatcactgtgggcttgcctgttccttggttgcttttctctcttatcaatggattacagccagttccagtcagcagcaatggcttgttttgtgcaattgttttgctttttctcatgcttctgtttgtgatctcttcaattgcgtcatgtaaatggagaatgaacaagatcctgggcttcacaatgttcctcctttactttgtattcctgataatcagtgtgatgttagaagatcgaatcatatcctgtcctgtatctgtctgaatcagtcactcttgctcacaatgggcatggatcagaagaccatgcagaagttactgtatctcttgtgaccctaatgaaagaatgtatatgatcctggaaagtgaactgggtgacctaggacctctgatatgaatgtgatctgagactaaagtttgtccttggaaacacctgcagctcattgtggattaagaacctcacccctggaggggtggagtttctacccctgactcatgcagacatctattacatggaggcagtagaaggacccctggagccagagggttttctaaatgagataactgggggcaaaggttgggataggcgcagcagctataagacaagctcctacgctcactgttccctgatcattccaaaggctgctggcccaaaagatgcagatgtggtctacatctcagccttcctgacctctgccccaaacacacgctgcaattttgtctcctccttttctgttcaaattgtgaggttctatcaggtttgtaatcactgtagcttcagttattggtgagtctaaggatccaaggctacagaaaaaaaagaaatataacaggaattaatgatcattccacgttttgtagcccactgcatctggatatataccagtattttctttttttttttttttgagacagagtttggctcttgttgcccaggctggtgtgcaatggcgtgatctcggcacaccacaaccttcacctccccggttcaagcaattctcctgcctcagcctgaagtcgtgatctgcccgcctcggcctcccaaagtgctgggattacaggcgtcagccaccgcgcctggcctataccagtattttctagtttaaaggaggactacattaactcttattgttgtgtttctgaaaagtgaaatttaaaaagcagcctgaaaaataaaaatttataatttgcccttgaattggaaggaatggagattagggaaggaaaactactctagaggccatttaaaagtatgtatttattagaacatgcaaattcatgttgtctccatcagtggtcaccttgagggattagacattctaatggaatgtcctggctccaccctccagcatgttctcacccaacaatgacagttgagtggagtgggaagggaagtcattctaaagagtccaaagtcagtagcgccacatctggtttataaagtaagagatccagtgggacaatgctatttttgtatgccaacctagataggattataaagcaagactgatttcttctgtggtttatgaatggatcttaaggtaattacaaaagggaaattccaagaatgcataacacaatgacaacatggtgagaaaagtgcagtactacttccaaggtagctagtgtaaaggacacttgagtttttaaaactgtggttaaatgttttatgtggaatttgatgagtttgtatattaaataccactgcttgctgcttttactagaatcaagttaagggacacgttagaaatagaacagcttaatatcactggcttcagagcaaaatgagctcgggtgactgcagattatgatggtaaatatggctttaattacaaacatgaggaatgattcactgaagatgaaaagataggacggatgtgatatgaaaaaaacccaaacattttggcattgaatgatggctaaggtgttccaagtattccatcttttaagatgaattgcttaattaattgcctcgctaccccaggattctcattctttggaaataatttttattaaatttcaataaactgtgaatcccaatggtattttactttacaacatggatgggctcatccttatctttaggtcatttggtcagaatcctcccgagaagactgatgaagagtatggaatcatgttccaattctatattcttaattatccttattcctgatgctactgcattgctgggtttccatagccaaggcctaagaacaggaggagaaggcaatgcttgtgggagggaggtcccaataccaaaattctgggcactaacctggtgtctgcagcccgttcccgttagcctcggggatgtcacctcacccacagcctgggatctgacgttcttcctcagactggagtaaggagtgatggaccgtaaaatgctgtgtaatgataaaaggctgaaatatccactgaatgattaaaaccaactctaataatctga

SEQ ID NO: 149064 - DNA, 3300 bp, Artificial Sequence
  derived and/or modified sequence
atgggcaagctgatcagaatgggcccccaggagagatggctgctgagaaccaagagactgcactggagcagactgctgttcctgctgggcatgctgatcatcggcagcacctaccagcacctgagaagacccagaggcctgagcagcctgtgggccgccgtgagcagccaccagcccatcaagctggccagcagagacctgagcagcgaggagatgatgatgatgagcagcagccccagcaagcccagcagcgagatgggcggcaagatgctggtgccccaggccagcgtgggcagcgacgaggccaccctgagcatgaccgtggagaacatccccagcatgcccaagagaaccgccaagatgatccccaccaccaccaagaacaactacagccccaccgccgccggcaccgagagaagaaaggaggacacccccaccagcagcagaaccctgacctactacaccagcaccagcagcagacagatcgtgaagaagtacacccccacccccagaggcgagatgaagagctacagccccacccaggtgagagagaaggtgaagtacacccccagccccagaggcagaagagtgggcacctacgtgcccagcaccttcatgaccatggagaccagccacgccatcacccccagaaccaccgtgaaggacagcgacatcaccgccacctacaagatcctggagaccaacagcctgaagagaatcatggaggagaccacccccaccaccctgaagggcatgttcgacagcacccccaccttcctgacccacgaggtggaggccaacgtgctgaccagccccagaagcgtgatggagaagaacaacctgttcccccccagaagagtggagagcaacagcagcgcccacccctggggcctggtgggcaagagcaaccccaagaccccccagggcaccgtgctgctgcacacccccgccaccagcgagggccaggtgaccatcagcaccatgaccggcagcagccccgccgagaccaaggccttcaccgccgcctggagcctgagaaaccccagccccagaaccagcgtgagcgccatcaagaccgcccccgccatcgtgtggagactggccaagaagcccagcaccgcccccagcaccagcaccacccccaccgtgagagccaagctgaccatgcaggtgcaccactgcgtggtggtgaagcccacccccgccatgctgaccacccccagccccagcctgaccaccgccctgctgcccgaggagctgagccccagccccagcgtgctgccccccagcctgcccgacctgcaccccaagggcgagtacccccccgacctgttcagcgtggaggagagaagacagggctgggtggtgctgcacgtgttcggcatgatgtacgtgttcgtggccctggccatcgtgtgcgacgagtacttcgtgcccgccctgggcgtgatcaccgacaagctgcagatcagcgaggacgtggccggcgccaccttcatggccgccggcggcagcgcccccgagctgttcaccagcctgatcggcgtgttcatcagccacagcaacgtgggcatcggcaccatcgtgggcagcgccgtgttcaacatcctgttcgtgatcggcacctgcagcctgttcagcagagagatcctgaacctgacctggtggcccctgttcagagacgtgagcttctacatcctggacctgatcatgctgatcctgttcttcctggacagcctgatcgcctggtgggagagcctgctgctgctgctggcctacgccttctacgtgttcaccatgaagtggaacaagcacatcgaggtgtgggtgaaggagcagctgagcagaagacccgtggccaaggtgatggccctggaggacctgagcaagcccggcgacggcgccatcgccgtggacgagctgcaggacaacaagaagctgaagctgcccagcctgctgaccagaggcagcagcagcaccagcctgcacaacagcaccatcagaagcaccatctaccagctgatgctgcacagcctggaccccctgagagaggtgagactggccaaggagaaggaggaggagagcctgaaccagggcgccagagcccagccccaggccaaggccgagagcaagcccgaggaggaggagcccgccaagctgcccgccgtgaccgtgacccccgcccccgtgcccgacatcaagggcgaccagaaggagaaccccggcggccaggaggacgtggccgaggccgagagcaccggcgagatgcccggcgaggagggcgagaccgccggcgagggcgagaccgaggagaagagcggcggcgagacccagcccgagggcgagggcgagaccgagacccagggcaagggcgaggagtgcgaggacgagaacgaggccgagggcaagggcgacaacgagggcgaggacgagggcgagatccacgccgaggacggcgagatgaagggcaacgagggcgagaccgagagccaggagctgagcgccgagaaccacggcgaggccaagaacgacgagaagggcgtggaggacggcggcggcagcgacggcggcgacagcgaggaggaggaggaggaggaggaggagcaggaggaggaggaggaggaggaggagcaggaggaggaggaggaggaggaggaggaggaggaggagaagggcaacgaggagcccctgagcctggactggcccgagaccagacagaagcaggccatctacctgttcctgctgcccatcgtgttccccctgtggctgaccgtgcccgacgtgagaagacaggagagcagaaagttcttcgtgttcaccttcctgggcagcatcatgtggatcgccatgttcagctacctgatggtgtggtgggcccaccaggtgggcgagaccatcggcatcagcgaggagatcatgggcctgaccatcctggccgccggcaccagcatccccgacctgatcaccagcgtgatcgtggccagaaagggcctgggcgacatggccgtgagcagcagcgtgggcagcaacatcttcgacatcaccgtgggcctgcccgtgccctggctgctgttcagcctgatcaacggcctgcagcccgtgcccgtgagcagcaacggcctgttctgcgccatcgtgctgctgttcctgatgctgctgttcgtgatcagcagcatcgccagctgcaagtggagaatgaacaagatcctgggcttcaccatgttcctgctgtacttcgtgttcctgatcatcagcgtgatgctggaggacagaatcatcagctgccccgtgagcgtgtag

SEQ ID NO: 149065 - protein, 783 aa, Artificial Sequence
  derived and/or modified sequence
MPGKLRSDAGLESDTAMKKGETLRKQTEEKEKKEKPKSDKTEEIAEEEETVFPKAKQVKKKAEPSEVDMNSPKSKKAKKKEEPSQNDISPKTKSLRKKKEPIEKKVVSSKTKKVTKNEEPSEEEIDAPKPKKMKKEKEMNGETREKSPKLKNGFPHPEPDCNPSEAASEESNSEIEQEIPVEQKEGAFSNFPISEETIKLLKGRGVTFLFPIQAKTFHHVYSGKDLIAQARTGTGKTFSFAIPLIEKLHGELQDRKRGRAPQVLVLAPTRELANQVSKDFSDITKKLSVACFYGGTPYGGQFERMRNGIDILVGTPGRIKDHIQNGKLDLTKLKHVVLDEVDQMLDMGFADQVEEILSVAYKKDSEDNPQTLLFSATCPHWVFNVAKKYMKSTYEQVDLIGKKTQKTAITVEHLAIKCHWTQRAAVIGDVIRVYSGHQGRTIIFCETKKEAQELSQNSAIKQDAQSLHGDIPQKQREITLKGFRNGSFGVLVATNVAARGLDIPEVDLVIQSSPPKDVESYIHRSGRTGRAGRTGVCICFYQHKEEYQLVQVEQKAGIKFKRIGVPSATEIIKASSKDAIRLLDSVPPTAISHFKQSAEKLIEEKGAVEALAAALAHISGATSVDQRSLINSNVGFVTMILQCSIEMPNISYAWKELKEQLGEEIDSKVKGMVFLKGKLGVCFDVPTASVTEIQEKWHDSRRWQLSVATEQPELEGPREGYGGFRGQREGSRGFRGQRDGNRRFRGQREGSRGPRGQRSGGGNKSNRSQNKGQKRSFSKAFGQ

SEQ ID NO: 149066 - protein, 82 aa, Artificial Sequence
  derived and/or modified sequence
MPGKLRSDAGLESDTAMKKGETLRKQTEEKEKKEKPKSDKTEEIAEEEETVFPKAKQVKKKAEPSEVDMNSPKSKKKKKKKK

SEQ ID NO: 149067 - DNA, 2352 bp, Artificial Sequence
  derived and/or modified sequence
atgcctggcaaactgcgctccgacgcaggactggaaagtgacaccgcaatgaaaaagggggagacgctgcggaaacaaacagaggaaaaagagaaaaaggagaagcccaaatccgataagacggaagaaattgccgaggaggaagagacagtgtttcccaaagccaagcaggtgaaaaagaaggccgaaccctcagaggtggacatgaattctccaaagagcaaaaaagcgaaaaagaaagaagagccatcccaaaacgatatctccccaaagacaaagagccttagaaagaaaaaagagcccatagaaaaaaaggtagtgtctagtaagaccaagaaggtcacaaagaacgaggagcccagcgaggaagagattgacgcaccgaagccgaaaaaaatgaaaaaggaaaaagagatgaacggcgaaaccagagaaaaatctcctaagctcaaaaatggctttccacatccagaacctgactgtaacccttccgaggcagcatctgaagaatcaaattccgagatcgagcaggagatccccgttgaacagaaagaaggggcctttagcaattttcctatctccgaggaaactattaaactcctcaagggccggggagtgacctttctcttccctatacaggctaaaacgtttcaccatgtttactctgggaaggacctgatagctcaagctaggactggcacaggaaaaactttctccttcgccataccactaatcgagaagctgcacggggagctccaggaccggaagcgcgggagggccccgcaggtgcttgtgctggctcctactcgggagttggccaaccaagtatccaaggacttcagcgatattactaagaagttgagtgtcgcttgtttctacggtggtacgccctacggcgggcagttcgaaaggatgaggaacgggatagacattctcgtgggcacgccgggcagaataaaggatcacatccaaaatggaaagttggatctgaccaagctcaagcatgtcgtcctggacgaggtggaccagatgcttgacatgggctttgcggaccaagtcgaggagatcttatccgtagcttataagaaggactcagaagacaatccacagaccctgctctttagcgcaacgtgccctcattgggtgttcaatgtggccaagaaatatatgaagtccacatacgagcaggtggacctgattggcaagaaaacacagaagacggcaattaccgtggaacacctggccattaaatgtcattggacacagcgggcagccgtgattggggacgtcatccgagtgtacagcggacaccaaggcagaactatcatcttttgcgagacaaagaaggaggcccaagagctgagtcagaactcagctataaaacaagatgcccagagcttacatggagatattccacagaagcaacgggaaattactttgaaaggtttccgcaacggaagttttggggtgctggtcgctaccaacgtggctgcacggggtctcgatatccctgaggtggatctggtaatccagagctctccacccaaggatgtggagagttacatacacagatcaggccgcactggacgtgcgggcaggaccggggtgtgcatctgcttttaccagcacaaggaggaataccagctggtccaggtcgagcaaaaagcaggcatcaagttcaagcgaatcggcgtgccttcggcaaccgagataataaaggcctcttctaaagatgccattagactgttggattcagtgcctcctacggcgatatcccattttaagcaaagtgccgagaagctgattgaggagaagggtgccgtggaagctttggctgctgcactagcccacatttccggcgcaacatctgtcgaccagaggtctctaatcaattctaatgtcggttttgttaccatgattctgcagtgttcgattgagatgccaaacatttcctacgcttggaaagagctgaaagagcagctcggcgaagaaatcgatagtaaggtgaaggggatggtgttcctgaaggggaaactgggtgtctgtttcgatgtgcctaccgcctccgtgaccgaaatccaggagaagtggcacgattctcggcgttggcagctgtccgtagccaccgagcagcctgagcttgaaggacccagggaagggtacggtggcttccgaggccagcgcgaagggagcagggggttcagaggccaaagagatggcaatagaagatttaggggtcagcgtgagggttctaggggaccccgtggccagagaagcggtggtggaaataaaagtaacagaagtcagaacaagggtcaaaagcgaagcttcagcaaggcattcgggcagtag

SEQ ID NO: 149068 - DNA, 2352 bp, Artificial Sequence
  derived and/or modified sequence
atgcctgggaagctgcggagtgatgctggcctggagagtgacacagccatgaagaagggggagaccctgaggaagcagacagaggagaaggagaagaaggagaagcccaagagtgacaagacagaggagattgctgaggaggaggagaccgtcttccccaaggccaagcaggtgaagaagaaggccgagcccagcgaggtggacatgaacagccccaagagcaagaaggccaagaagaaggaggagcccagccagaatgacatcagccccaagaccaagagcctgaggaagaagaaggagcccatcgagaagaaggtggtgagcagcaagaccaagaaggtgaccaagaatgaggagcccagcgaggaggagattgatgcccccaagcccaagaagatgaagaaggagaaggagatgaatggagagacccgggagaagagccccaagctgaagaatggcttcccccaccctgagccagactgcaaccccagcgaggccgccagcgaggagagcaacagcgagattgagcaggagatccctgtggagcagaaggagggcgccttcagcaacttccccatcagcgaggagaccatcaagctgctgaagggccggggcgtgaccttcctgttccccatccaggccaagaccttccaccacgtgtacagcggcaaggacctgattgcccaggccaggacaggcaccgggaagaccttctcctttgccatccccctgattgagaagctgcatggagagctgcaggacaggaagaggggccgggccccccaggtgctggtgctggcccccacccgggagctggccaaccaggtgtccaaggacttcagtgacatcaccaagaagctgtctgtggcctgcttctatggaggcaccccctacggcggccagtttgagaggatgagaaatggaattgacatcctggtgggcaccccaggccgcatcaaggaccacatccagaatggcaagctggacctgaccaagctgaagcacgtggtgctggatgaggtggaccagatgctggacatgggctttgctgaccaggtggaggagatcctgtctgtggcctacaagaaggacagcgaggacaacccccagaccctgctcttcagcgccacctgcccccactgggtgttcaacgtggccaagaagtacatgaagagcacctatgagcaggtggacctgattggcaagaagacccagaagacagccatcaccgtggagcacctggccatcaagtgccactggacccagagagctgctgtgattggagatgtgatccgggtgtacagcggccaccagggccgcaccatcatcttctgtgagaccaagaaggaggcccaggagctgagccagaacagcgccatcaagcaggatgcccagagcctgcacggggacatcccccagaagcagcgggagatcaccctgaagggcttcagaaatggcagctttggagtgctggtggccaccaacgtggccgcccggggcctggacatccctgaggtggacctggtgatccagagcagcccccccaaggatgtggagagctacatccacaggagcggccgcacaggccgggccggccgcactggagtgtgcatctgcttctaccagcacaaggaggagtaccagctggtgcaggtggagcagaaggccggcatcaagttcaagagaattggagtgcccagcgccacagagatcatcaaggccagcagcaaggatgccatccggctgctggacagcgtgcccccaacagccatcagccacttcaagcagagcgctgagaagctgattgaggagaagggagctgtggaggccctggccgccgccctggcccacatcagcggggccacctctgtggaccagaggagcctcatcaacagcaatgtgggctttgtgaccatgatcctgcagtgcagcattgagatgcccaacatctcctatgcctggaaggagctgaaggagcagctgggggaggagattgacagcaaggtgaagggcatggtgttcctgaagggcaagctgggcgtgtgctttgatgtgcccacagcctctgtgacagagatccaggagaagtggcatgacagccgccgctggcagctgtctgtggccacagagcagcctgagctggagggcccccgggagggctatggaggcttccggggccagcgggagggcagccggggcttccggggccagagagatggcaacagacgcttccggggccagcgggagggcagccggggcccccggggccagaggtctgggggcggcaacaagagcaacagaagccagaacaagggccagaagaggagcttcagcaaggccttcggccagtag

SEQ ID NO: 149069 - DNA, 2352 bp, Artificial Sequence
  derived and/or modified sequence
atgcccggcaagctgcggagcgacgccggcctggagagcgacaccgctatgaaaaagggagaaacactgcgcaagcagaccgaagagaaagaaaaaaaggagaaacctaaatcagacaagacagaggagatcgccgaagaagaggagacagtcttccccaaggccaagcaggttaagaaaaaagccgaaccctccgaagtggacatgaatagcccaaagagtaagaaggcaaagaagaaagaggaaccatcccagaacgatatttccccaaaaaccaaatcactgcgcaaaaaaaaggagccgatcgagaaaaaagtggtgtcttctaaaactaagaaagttaccaagaacgaggagccctctgaagaggaaattgatgctcctaagcctaagaagatgaaaaaggaaaaggaaatgaacggcgaaacccgagagaaaagcccaaaactgaaaaacggattcccacaccccgagcctgactgcaatccctcagaagccgccagtgaagagtcaaactctgaaatcgagcaagaaatccctgtggaacagaaggagggagcatttagtaactttcccatatcagaagagactattaagctgctgaaggggaggggcgtgacatttctgttccccattcaggccaagacatttcaccatgtctacagcgggaaggatctcattgctcaggctaggacaggtaccgggaaaaccttcagtttcgctatccctctgatcgagaagctgcacggtgagctccaagaccgaaaaagggggcgggctccgcaggtgctggtgctggcgccgactcgggagttagccaatcaggtttcaaaggatttcagtgacattacaaaaaagctgtccgtagcctgcttttatggagggacaccctatggggggcaattcgagcggatgcggaacggaatagacattctggtcgggaccccaggcagaattaaggatcacatccagaatggtaaactggatctcactaagcttaaacacgtggtgctggacgaggtggaccagatgctagatatgggattcgcagatcaagtggaagagatcctgagcgttgcctacaaaaaggactcagaagacaatcctcaaactctactgttttctgctacctgcccacattgggtgtttaacgtggcaaagaaatatatgaagagcacttacgaacaggtcgacctaatcgggaagaaaacccagaagaccgctattactgtagaacatctcgccatcaagtgtcattggacacagagagcagcagttatcggcgacgtgatcagggtctattctgggcaccagggacgaacaattattttctgtgaaacaaaaaaggaagctcaggagctgagccaaaactccgccattaaacaggatgcacagtccctccatggtgacatcccacagaaacagagagaaattacactgaaaggatttaggaatggatctttcggcgtgttggtggccactaacgtagcagctaggggtttggacatcccagaagtggaccttgtgatccaaagctcaccccctaaggacgtagagagctacatacatcgcagcgggaggaccggtagggctggccgcacgggcgtctgcatttgtttttaccagcacaaagaggagtaccaactggtgcaggtcgagcagaaagcagggattaagtttaagcggatcggtgtgccttccgcaactgagatcattaaggcgtcatctaaggatgctatccgactgctagattcagtgcccccaacagctatttcccattttaaacagagcgcagaaaagctcattgaagagaagggggctgtggaagccttagccgccgctttagcccacatctctggtgctacaagcgtcgaccagagatccctgataaatagcaacgtaggcttcgtgaccatgatcctgcaatgcagcatcgaaatgccaaatatctcatatgcgtggaaagaactcaaggaacagctcggcgaagagattgactccaaagtcaaaggcatggtgtttcttaaaggaaaattaggcgtgtgtttcgacgttcctacggcatccgtcactgagattcaggagaagtggcatgatagtcgccgatggcagctcagtgtcgccactgaacagcccgagctggagggccctcgagaaggctacggcggtttcagagggcagcgcgagggtagcagagggtttagaggccagcgggatggaaaccgaaggttccgcggccagagagaaggctccagagggccacggggccaacgatccggaggagggaacaagagtaaccgctctcagaataaaggacagaaacgaagcttcagtaaggcattcggccagtag

SEQ ID NO: 149070 - DNA, 2352 bp, Artificial Sequence
  derived and/or modified sequence
atgcctgggaagctgaggtccgatgcaggcctagagtccgacaccgctatgaaaaagggcgaaactctcaggaaacagacagaggagaaagaaaagaaggaaaagccgaagtcggacaaaaccgaagagattgctgaagaggaagagacggtatttcccaaggcgaagcaggtaaaaaagaaggccgagccctccgaggtggacatgaactcccccaagtccaagaaagctaagaaaaaggaggagccctcgcaaaacgatatttcgcccaagactaagtcgctccggaaaaagaaggagcctatcgaaaaaaaagtagttagctcaaaaaccaaaaaggtgaccaagaacgaggaaccttcagaagaagaaatcgacgccccaaagccaaagaaaatgaaaaaggagaaggagatgaacggtgagacccgggagaaatctcctaaactcaagaacggcttcccacaccctgagccagattgcaacccatcagaggccgcaagcgaggagagcaacagcgaaatcgagcaggagatcccagtggagcagaaggaaggtgcattctctaacttccctataagtgaagagactattaaactccttaaagggagaggcgttacattcctgttcccaattcaggccaaaacgttccaccatgtatacagcggtaaagatctcatagcacaggcgcgaacaggtacaggaaaaaccttcagcttcgccataccactgattgaaaagcttcacggggagctgcaggaccgcaaaaggggaagagccccacaggtacttgtgttagcacccacacgcgagctagccaaccaggtatcgaaggatttctcggacattacaaagaaactgagcgtagcctgcttctatggtggcaccccttacgggggacagttcgagcggatgcggaatggcatcgatatcttggtcggaacacccggaaggatcaaggatcatatccaaaacgggaaactggatcttaccaagctgaaacacgtagtactcgacgaggtcgatcaaatgctggatatgggctttgccgaccaggtcgaagaaatcctctcagtggcctacaagaaagactctgaagataacccccaaaccctactatttagtgccacatgcccccactgggtgtttaacgtagccaaaaagtatatgaagagtacttacgagcaggtggatttgattggtaaaaagacccagaagacagccataaccgttgaacacctcgctattaaatgtcactggacgcaaagggccgctgtgattggggatgtgattagggtgtactccggacaccagggcaggacaataatcttctgcgagacaaaaaaggaggcacaggagttgagtcagaacagtgcaattaagcaagacgcccagagcttgcatggagatataccccagaagcaaagggagatcacacttaaaggttttcgtaacggtagttttggggtgctggtggctaccaacgttgctgcgagaggcctcgatatcccagaggttgacctcgtgattcaatcttctcccccaaaagatgttgagtcctacattcaccggtctggcaggacaggaagggcaggtcggactggagtttgcatttgtttttaccagcataaagaggagtaccagttagtccaggtggagcagaaagccggtattaagttcaaaagaattggagttccatccgcaaccgagatcatcaaagctagctctaaggacgcgatcagattgctggattccgtgcctccaaccgccatctcccacttcaaacagtcagccgaaaaactcattgaggaaaaaggggcagtcgaggcgctggctgccgctctcgctcacattagcggcgctacctcagtcgaccagaggtcactgatcaactctaatgtaggcttcgttaccatgatactgcagtgtagcattgaaatgccaaacatcagctatgcgtggaaggaactgaaagagcagttgggcgaagagatcgattccaaggtcaaggggatggtgttcctgaaggggaagctcggagtctgctttgatgtccccacagcgtccgtcacagagattcaagaaaagtggcacgattcgaggaggtggcaattatctgtggccactgagcagccagagctcgaaggccctagggaggggtacgggggatttaggggccagagagagggaagccgtgggttccgcggacaacgcgatggcaacaggaggttccgtggccagagggaaggtagcagaggtcctaggggacagagaagcggaggaggcaataaatccaatcgatcccagaacaagggacagaaacgaagcttcagcaaagcatttgggcaatag

SEQ ID NO: 149071 - DNA, 4711 bp, Artificial Sequence
  derived and/or modified sequence
gggaagtgacgagagccgggtggacccagggtggggaactacctcttcctctccacgcggttgagaagaccggtcggcctgggcaacctgcgctgaagatgccgggaaaactccgtagtgacgctggtttggaatcagacaccgcaatgaaaaaaggggagacactgcgaaagcaaaccgaggagaaagagaaaaaagagaagccaaaatctgataagactgaagagatagcagaagaggaagaaactgttttccccaaagctaaacaagttaaaaagaaagcagagccttctgaagttgacatgaattctcctaaatccaaaaaggcaaaaaagaaagaggagccatctcaaaatgacatttctcctaaaaccaaaagtttgagaaagaaaaaggagcccattgaaaagaaagtggtttcttctaaaaccaaaaaagtgacaaaaaatgaggagccttctgaggaagaaatagatgctcctaagcccaagaagatgaagaaagaaaaggaaatgaatggagaaactagagagaaaagccccaaactgaagaatggatttcctcatcctgaaccggactgtaaccccagtgaagctgccagtgaagaaagtaacagtgagatagagcaggaaatacctgtggaacaaaaagaaggcgctttctctaattttcccatatctgaagaaactattaaacttctcaaaggccgaggagtgaccttcctatttcctatacaagcaaagacattccatcatgtttacagcgggaaggacttaattgcacaggcacggacaggaactgggaagacattctcctttgccatccctttgattgagaaacttcatggggaactgcaagacaggaagagaggccgtgcccctcaggtactggttcttgcacctacaagagagttggcaaatcaagtaagcaaagacttcagtgacatcacaaaaaagctgtcagtggcttgtttttatggtggaactccctatggaggtcaatttgaacgcatgaggaatgggattgatatcctggttggaacaccaggtcgtatcaaagaccacatacagaatggcaaactagatctcaccaaacttaagcatgttgtcctggatgaagtggaccagatgttggatatgggatttgctgatcaagtggaagagattttaagtgtggcatacaagaaagattctgaagacaatccccaaacattgcttttttctgcaacttgccctcattgggtatttaatgttgccaagaaatacatgaaatctacatatgaacaggtggacctgattggtaaaaagactcagaaaacggcaataactgtggagcatctggctattaagtgccactggactcagagggcagcagttattggggatgtcatccgagtatatagtggtcatcaaggacgcactatcatcttttgtgaaaccaagaaagaagcccaggagctgtcccagaattcagctataaagcaggatgctcagtccttgcatggagacattccacagaagcaaagggaaatcaccctgaaaggttttagaaatggtagttttggagttttggtggcaaccaatgttgctgcacgtgggttagacatccctgaggttgatttggttatacaaagctctccaccaaaggatgtagagtcctacattcatcgatccgggcggacaggcagagctggaaggacgggggtgtgcatctgcttttatcagcacaaggaagaatatcagttagtacaagtggagcaaaaagcgggaattaagttcaaacgaataggtgttccttctgcaacagaaataataaaagcttccagcaaagatgccatcaggcttttggattccgtgcctcccactgccattagtcacttcaaacaatcagctgagaagctgatagaggagaagggagctgtggaagctctggcagcagcactggcccatatttcaggtgccacgtccgtagaccagcgctccttgatcaactcaaatgtgggttttgtgaccatgatcttgcagtgctcaattgaaatgccaaatattagttatgcttggaaagaacttaaagagcagctgggcgaggagattgattccaaagtgaagggaatggtttttctcaaaggaaagctgggtgtttgctttgatgtacctaccgcatcagtaacagaaatacaggagaaatggcatgattcacgacgctggcagctctctgtggccacagagcaaccagaactggaaggaccacgggaaggatatggaggcttcaggggacagcgggaaggcagtcgaggcttcaggggacagcgggacggaaacagaagattcagaggacagcgggaaggcagtagaggcccgagaggacagcgatcaggaggtggcaacaaaagtaacagatcccaaaacaaaggccagaagcggagtttcagtaaagcatttggtcaataattagaaatagaagatttatatagcaaaaagagaatgatgtttggcaatatagaactgaacattatttttcatgcaaagttaaaagcacattgtgcctccttttgaccacttgccaagtccctgtctctttcagacacagacaagcttcatttaaattatttcatctgatcattatcatttataactttattgttacttcttcatcagtttttccttttgaaaggtgtatgaattcattacatttttattctaatgtattatctgtagattagaagataaaatcaagcatgtatctgcctatactttgtgagttcacctgtctttatactcaaaagtgtcccttaatagtgtccttccctgaaataaatacctaagggagtgtaacagtctctggaggaccactttgagcctttggaagttaaggtttcctcagccacctgccgaacagtttctcatgtggtcctattatttgtctactgagacttaatactgagcaatgttttgaaacaagatttcaaactaatctgggttgtaatacagtttataccagtgtatgctctagacttggaagatgtagtatgtttgatgtggattacctatacttatgttcgttttgatacatttttagcttctcattataaggtgattcatgctttagtgaattcttcatagatagtatatataaaagtacattttaatagaaagccagggttttaaggaatttcacatgtataaggtggctccatagctttatttgtaagtaggctggataaatggtgcttaaatggtaatgtactccacttcttcctattggaagattaacattatttaccaagaaggacttaagggagtagggggcgcagattagcattgctcaagagtatgtaaaaaaaaaaaaaaaaaaaaagaaccaaaccactggaaataatcaaatgcaaaaaggtaacaaattcataactggaaagcaaagagaagaacaagtatgatttggatgataaagcattgttttaatggtgaaaacttcacagatcactaatgtttctagaggttaacttcaagtgggcaagctggggtttttaggtagtcagtggcctagttcctaaagccacagtataggatctgttaaactgaatgtctgttgaaagtttgttttagctgcttggaggcttccttttaagacaaactgtatgtgattaagttgttttgagggaactgaagaacctgatgtagcccctggccagataactgcctgatttctcagatattatttctctgggaaacattctacatagcacaggagcttaagagtggcattatcttctcgccttaatttccagagattatttctgtactgagaatcctggaactactatgctaggaaatttaaagctgcatggtctgtcttgttttcatttaattattgtgaatacctagaatctttcttggtcctgatttctcttgcttaatccagtctttatctctaactgccccttatttgatcaccatgtactaggagctctgatagccagctcagctcctaatccttgaggcaacattctttttctatttgaacttcagttctgtccttgaatcccgactagatatttcttgccctctggtctcagaattctcttggcttttattccttgatccacttgccagttttatcactttacccttgttcctcatggcttcccatcaagccatgggtattaggtgacagtgtaatttattagattctggttttgcccaaatactgggcatgctttaataataactgaaccatttcattatttggataggcatgggtaccttatcaagcagattaaaaggatatggtacccgtcctttagaaaagaacagctaaaaccttgttgtggattatggatttagcctaaagaaaaataatctggcataaattaagagtaagagagaagattaatagaaatttcacttcacataacttaaaacatggctatttcaataaaggactaaagtttctcctggatcccagaattcaacctgtatttataaatgtataatgtatttagctactttttggtttaaatgaacttgttgggttagcttggtaaatgttataatttttactattttctacaaagaaaatattttctaatttaagttggagctatctgtgcagcagtttctctacagttgtgcataaatgtttttactataaaatgagctaatgtataaaatactgctgtataccataataaagatagtaatacttgatttta

SEQ ID NO: 149072 - DNA, 2352 bp, Artificial Sequence
  derived and/or modified sequence
atgcccggcaagctgagaagcgacgccggcctggagagcgacaccgccatgaagaagggcgagaccctgagaaagcagaccgaggagaaggagaagaaggagaagcccaagagcgacaagaccgaggagatcgccgaggaggaggagaccgtgttccccaaggccaagcaggtgaagaagaaggccgagcccagcgaggtggacatgaacagccccaagagcaagaaggccaagaagaaggaggagcccagccagaacgacatcagccccaagaccaagagcctgagaaagaagaaggagcccatcgagaagaaggtggtgagcagcaagaccaagaaggtgaccaagaacgaggagcccagcgaggaggagatcgacgcccccaagcccaagaagatgaagaaggagaaggagatgaacggcgagaccagagagaagagccccaagctgaagaacggcttcccccaccccgagcccgactgcaaccccagcgaggccgccagcgaggagagcaacagcgagatcgagcaggagatccccgtggagcagaaggagggcgccttcagcaacttccccatcagcgaggagaccatcaagctgctgaagggcagaggcgtgaccttcctgttccccatccaggccaagaccttccaccacgtgtacagcggcaaggacctgatcgcccaggccagaaccggcaccggcaagaccttcagcttcgccatccccctgatcgagaagctgcacggcgagctgcaggacagaaagagaggcagagccccccaggtgctggtgctggcccccaccagagagctggccaaccaggtgagcaaggacttcagcgacatcaccaagaagctgagcgtggcctgcttctacggcggcaccccctacggcggccagttcgagagaatgagaaacggcatcgacatcctggtgggcacccccggcagaatcaaggaccacatccagaacggcaagctggacctgaccaagctgaagcacgtggtgctggacgaggtggaccagatgctggacatgggcttcgccgaccaggtggaggagatcctgagcgtggcctacaagaaggacagcgaggacaacccccagaccctgctgttcagcgccacctgcccccactgggtgttcaacgtggccaagaagtacatgaagagcacctacgagcaggtggacctgatcggcaagaagacccagaagaccgccatcaccgtggagcacctggccatcaagtgccactggacccagagagccgccgtgatcggcgacgtgatcagagtgtacagcggccaccagggcagaaccatcatcttctgcgagaccaagaaggaggcccaggagctgagccagaacagcgccatcaagcaggacgcccagagcctgcacggcgacatcccccagaagcagagagagatcaccctgaagggcttcagaaacggcagcttcggcgtgctggtggccaccaacgtggccgccagaggcctggacatccccgaggtggacctggtgatccagagcagcccccccaaggacgtggagagctacatccacagaagcggcagaaccggcagagccggcagaaccggcgtgtgcatctgcttctaccagcacaaggaggagtaccagctggtgcaggtggagcagaaggccggcatcaagttcaagagaatcggcgtgcccagcgccaccgagatcatcaaggccagcagcaaggacgccatcagactgctggacagcgtgccccccaccgccatcagccacttcaagcagagcgccgagaagctgatcgaggagaagggcgccgtggaggccctggccgccgccctggcccacatcagcggcgccaccagcgtggaccagagaagcctgatcaacagcaacgtgggcttcgtgaccatgatcctgcagtgcagcatcgagatgcccaacatcagctacgcctggaaggagctgaaggagcagctgggcgaggagatcgacagcaaggtgaagggcatggtgttcctgaagggcaagctgggcgtgtgcttcgacgtgcccaccgccagcgtgaccgagatccaggagaagtggcacgacagcagaagatggcagctgagcgtggccaccgagcagcccgagctggagggccccagagagggctacggcggcttcagaggccagagagagggcagcagaggcttcagaggccagagagacggcaacagaagattcagaggccagagagagggcagcagaggccccagaggccagagaagcggcggcggcaacaagagcaacagaagccagaacaagggccagaagagaagcttcagcaaggccttcggccagtag

SEQ ID NO: 149073 - protein, 437 aa, Artificial Sequence
  derived and/or modified sequence
MADDPSAADRNVEIWKIKKLIKSLEAARGNGTSMISLIIPPKDQISRVAKMLADEFGTASNIKSRVNRLSVLGAITSVQQRLKLYNKVPPNGLVVYCGTIVTEEGKEKKVNIDFEPFKPINTSLYLCDNKFHTEALTALLSDDSKFGFIVIDGSGALFGTLQGNTREVLHKFTVDLPKKHGRGGQSALRFARLRMEKRHNYVRKVAETAVQLFISGDKVNVAGLVLAGSADFKTELSQSDMFDQRLQSKVLKLVDISYGGENGFNQAIELSTEVLSNVKFIQEKKLIGRYFDEISQDTGKYCFGVEDTLKALEMGAVEILIVYENLDIMRYVLHCQGTEEEKILYLTPEQEKDKSHFTDKETGQEHELIESMPLLEWFANNYKKFGATLEIVTDKSQEGSQFVKGFGGIGGILRYRVDFQGMEYQGGDDEFFDLDDY

SEQ ID NO: 149074 - protein, 404 aa, Artificial Sequence
  derived and/or modified sequence
MISLIIPPKDQISRVAKMLADEFGTASNIKSRVNRLSVLGAITSVQQRLKLYNKVPPNGLVVYCGTIVTEEGKEKKVNIDFEPFKPINTSLYLCDNKFHTEALTALLSDDSKFGFIVIDGSGALFGTLQGNTREVLHKFTVDLPKKHGRGGQSALRFARLRMEKRHNYVRKVAETAVQLFISGDKVNVAGLVLAGSADFKTELSQSDMFDQRLQSKVLKLVDISYGGENGFNQAIELSTEVLSNVKFIQEKKLIGRYFDEISQDTGKYCFGVEDTLKALEMGAVEILIVYENLDIMRYVLHCQGTEEEKILYLTPEQEKDKSHFTDKETGQEHELIESMPLLEWFANNYKKFGATLEIVTDKSQEGSQFVKGFGGIGGILRYRVDFQGMEYQGGDDEFFDLDDY

SEQ ID NO: 149075 - DNA, 3742 bp, Artificial Sequence
  derived and/or modified sequence
actcgcaccggccccctcccttccgcctgccgccttccactccgcccctggcggaggaagtgatgtcacaggccccatgtgagcggattgcaacacatgcagctgcctggagagagggagccggtgtcctacgtcagagccgccgccgccgcggagccgccgccggggaggagcagccgctgccgcccaggactgggcccttagggaggaggaggcgagaagatggcggacgaccccagtgctgccgacaggaacgtggagatctggaagatcaagaagctcattaagagcttggaggcggcccgcggcaatggcaccagcatgatatcattgatcattcctcccaaagaccagatttcacgagtggcaaaaatgttagcggatgagtttggaactgcatctaacattaagtcacgagtaaaccgcctttcagtcctgggagccattacatctgtacaacaaagactcaaactttataacaaagtacctccaaatggtctggttgtatactgtggaacaattgtaacagaagaaggaaaggaaaagaaagtcaacattgactttgaacctttcaaaccaattaatacgtcattgtatttgtgtgacaacaaattccatacagaggctcttacagcactactttcagatgatagcaagtttggattcattgtaatagatggtagtggtgcactttttggcacactccaaggaaacacaagagaagtcctgcacaaattcactgtggatctcccaaagaaacacggtagaggaggtcagtcagccttgcgttttgcccgtttaagaatggaaaagcgacataactatgttcggaaagtagcagagactgctgtgcagctgtttatttctggggacaaagtgaatgtggctggtctagttttagctggatccgctgactttaaaactgaactaagtcaatctgatatgtttgatcagaggttacaatcaaaagttttaaaattagttgatatatcctatggtggtgaaaatggattcaaccaagctattgagttatctactgaagtcctctccaacgtgaaattcattcaagagaagaaattaataggacgatactttgatgaaatcagccaggacacgggcaagtactgttttggcgttgaagatacactaaaggctttggaaatgggagctgtagaaattctaatagtctatgaaaatctggatataatgagatatgttcttcattgccaaggcacagaagaggagaaaattctctatctaactccagagcaagaaaaggataaatctcatttcacagacaaagagaccggacaggaacatgagcttatcgagagcatgcccctgttggaatggtttgctaacaactataaaaaatttggagctacgttggaaattgtcacagataaatcacaagaagggtctcagtttgtgaaaggatttggtggaattggaggtatcttgcggtaccgagtagatttccagggaatggaataccaaggaggagacgatgaattttttgaccttgatgactactaggtagtcgacatgggtccggcaaaacgtgcctcaccctccagcatccaacccaaggagcatacccatggtggaatccaaacagatccctgccttacaattggaacatttccagaacttaatccatgagcattggatattgaaaagaaaaccgaaacaaaaccagacccagccctacactttggtttgtcatggtgtcagcgcagcagcctacaactaagttcctaaacgccactttggactaatttaaaaaagaatcccagtttttacttttactggatggtgaaattggttgctcttgtattttatgaaaaaaaatgatttttttaaccttcatacatagaagcaaaaatactttaactgctgtaaaccttcaaaagttaatagaagtgagatcatactggtttgtttcttattttgattggagaaaaattaaattgctgcatttcgcagtgacccatttacatggcattctcagcttagactgcgtaagaagaaatatatgtggtgaaatgttggaaccatttctctcttggtctctgtttaatgttgaaagggtgagctaataggaggcactttcaacttcactccctcacgctaccccgtccccctccagactggcagtttcaaggatgcaaattgcattgcaaaatcaaactgactcatgaagcatttgggccagtgcactgtttacttccatctgtttgcagacacatttgtgcccggcgtttgggagccctttgtatcaatgttctgacaagggtccctataaccttaacctactcgaaaccggtttgggatggatatgatggggcttctgtgctattgctgggattgggagaaataaaacatgcaatttaagtggaagcgaagaaatttaaagaggattttattttgcttgggtcaatccttgttaaaagggaggtggatgtgttttccttgtgttggatggcatgagattatgtgaatgttttgatttattaaaatgaactgcaaggtttttcacaggaacgacagacatgtatgactgcatgtaattataaactcctgacctcctggtggggttggagcatctgtttcaaatgtgggacttacaagcacttctcacatgagaaattaggggcgggtgggaagggatgggacacagcttctggcaccatggatttaagaccatgttggatccaaaagttggcctgaaaccctgaagcttatgcttcacagctgggctgtaagtcagacttgaacccagctgatatgcaaggtcatggcgtgcccagggtggtgacagttgaacaaagtgtatagtacgtgcccagtggtagcgatggaaaaaagtataccaaatggactttgaaggaccaaaggttttaaaagtcaattggtatcacctccacactgactagggtagtggggtgcatttggttttcaaattgggtacttttaacactttagtgcctgactgctgttctttactgacttgattcagtcactcgtagctttattggtctgaaccagctccttgttcccaggttacagacctgcctatcgttccaataatcctgtttcacttgaatgaagggagtatgtcttaaatgtaaagtttctggttctcacactgtactctgaggtccaaatactgtctgtcaatgtgtaacctgatgtctcaaccccctgtgagaagagtccattatttggtgttcaccaacgtgggagacttcaccggaacaggcttttttgctttgggctctgctatttgtttgcagaacacccaagagcgagcaaacatgctctcttcacagcagtaccttagggttttgccattgtaaatgggtctgatgtgatatgacaagaccagagaaattggatgtaaatttacatttttgaatatgcttgttgtttcacatgatacatttagggtatgcagctccttttgtagtttttatttttactatttaagtttggaaatgatgccaaatttttgtatttctttaatcaatgtgttctcttcggtgatatatattgcattatatattgatgtgtgtatcaatatatattgatatgtattacacttacacatacaaacacatataagagggggtgaaaaccgtagcctttgcattctctatagcctctgcagagagatactaagcagcaaaatcttggtgttgtgatgtacagaaatggagaagagtattaaaccatatttaag

SEQ ID NO: 149076 - DNA, 3874 bp, Artificial Sequence
  derived and/or modified sequence
gccccatgtgagcggattgcaacacatgcagctgcctggagagagggagccggtgtcctacgtcagagccgccgccgccgcggagccgccgccggggaggagcagccgctgccgcccaggactgggcccttagggaggaggaggcgagaagatggcggacgaccccagtgctgccgacaggaacgtggagatctggaagatcaagaagctcattaagagcttggaggcggcccgcgggtgagcgccgcgtccggcaccctccgtgccctcttggttcccggacccctcaggatggacgcccccgcgccgcatggccggatgaggagaaccaggcactagccaactcccgccttctggatctctgggtagtagcccctgacccaggggcgagggtcggcgcggttggcccgagaaggggtcctttccccgcatggggcaatggcaccagcatgatatcattgatcattcctcccaaagaccagatttcacgagtggcaaaaatgttagcggatgagtttggaactgcatctaacattaagtcacgagtaaaccgcctttcagtcctgggagccattacatctgtacaacaaagactcaaactttataacaaagtacctccaaatggtctggttgtatactgtggaacaattgtaacagaagaaggaaaggaaaagaaagtcaacattgactttgaacctttcaaaccaattaatacgtcattgtatttgtgtgacaacaaattccatacagaggctcttacagcactactttcagatgatagcaagtttggattcattgtaatagatggtagtggtgcactttttggcacactccaaggaaacacaagagaagtcctgcacaaattcactgtggatctcccaaagaaacacggtagaggaggtcagtcagccttgcgttttgcccgtttaagaatggaaaagcgacataactatgttcggaaagtagcagagactgctgtgcagctgtttatttctggggacaaagtgaatgtggctggtctagttttagctggatccgctgactttaaaactgaactaagtcaatctgatatgtttgatcagaggttacaatcaaaagttttaaaattagttgatatatcctatggtggtgaaaatggattcaaccaagctattgagttatctactgaagtcctctccaacgtgaaattcattcaagagaagaaattaataggacgatactttgatgaaatcagccaggacacgggcaagtactgttttggcgttgaagatacactaaaggctttggaaatgggagctgtagaaattctaatagtctatgaaaatctggatataatgagatatgttcttcattgccaaggcacagaagaggagaaaattctctatctaactccagagcaagaaaaggataaatctcatttcacagacaaagagaccggacaggaacatgagcttatcgagagcatgcccctgttggaatggtttgctaacaactataaaaaatttggagctacgttggaaattgtcacagataaatcacaagaagggtctcagtttgtgaaaggatttggtggaattggaggtatcttgcggtaccgagtagatttccagggaatggaataccaaggaggagacgatgaattttttgaccttgatgactactaggtagtcgacatgggtccggcaaaacgtgcctcaccctccagcatccaacccaaggagcatacccatggtggaatccaaacagatccctgccttacaattggaacatttccagaacttaatccatgagcattggatattgaaaagaaaaccgaaacaaaaccagacccagccctacactttggtttgtcatggtgtcagcgcagcagcctacaactaagttcctaaacgccactttggactaatttaaaaaagaatcccagtttttacttttactggatggtgaaattggttgctcttgtattttatgaaaaaaaatgatttttttaaccttcatacatagaagcaaaaatactttaactgctgtaaaccttcaaaagttaatagaagtgagatcatactggtttgtttcttattttgattggagaaaaattaaattgctgcatttcgcagtgacccatttacatggcattctcagcttagactgcgtaagaagaaatatatgtggtgaaatgttggaaccatttctctcttggtctctgtttaatgttgaaagggtgagctaataggaggcactttcaacttcactccctcacgctaccccgtccccctccagactggcagtttcaaggatgcaaattgcattgcaaaatcaaactgactcatgaagcatttgggccagtgcactgtttacttccatctgtttgcagacacatttgtgcccggcgtttgggagccctttgtatcaatgttctgacaagggtccctataaccttaacctactcgaaaccggtttgggatggatatgatggggcttctgtgctattgctgggattgggagaaataaaacatgcaatttaagtggaagcgaagaaatttaaagaggattttattttgcttgggtcaatccttgttaaaagggaggtggatgtgttttccttgtgttggatggcatgagattatgtgaatgttttgatttattaaaatgaactgcaaggtttttcacaggaacgacagacatgtatgactgcatgtaattataaactcctgacctcctggtggggttggagcatctgtttcaaatgtgggacttacaagcacttctcacatgagaaattaggggcgggtgggaagggatgggacacagcttctggcaccatggatttaagaccatgttggatccaaaagttggcctgaaaccctgaagcttatgcttcacagctgggctgtaagtcagacttgaacccagctgatatgcaaggtcatggcgtgcccagggtggtgacagttgaacaaagtgtatagtacgtgcccagtggtagcgatggaaaaaagtataccaaatggactttgaaggaccaaaggttttaaaagtcaattggtatcacctccacactgactagggtagtggggtgcatttggttttcaaattgggtacttttaacactttagtgcctgactgctgttctttactgacttgattcagtcactcgtagctttattggtctgaaccagctccttgttcccaggttacagacctgcctatcgttccaataatcctgtttcacttgaatgaagggagtatgtcttaaatgtaaagtttctggttctcacactgtactctgaggtccaaatactgtctgtcaatgtgtaacctgatgtctcaaccccctgtgagaagagtccattatttggtgttcaccaacgtgggagacttcaccggaacaggcttttttgctttgggctctgctatttgtttgcagaacacccaagagcgagcaaacatgctctcttcacagcagtaccttagggttttgccattgtaaatgggtctgatgtgatatgacaagaccagagaaattggatgtaaatttacatttttgaatatgcttgttgtttcacatgatacatttagggtatgcagctccttttgtagtttttatttttactatttaagtttggaaatgatgccaaatttttgtatttctttaatcaatgtgttctcttcggtgatatatattgcattatatattgatgtgtgtatcaatatatattgatatgtattacacttacacatacaaacacatataagagggggtgaaaaccgtagcctttgcattctctatagcctctgcagagagatactaagcagcaaaatcttggtgttgtgatgtacagaaatggagaagagtattaaaccatatttaagaata

SEQ ID NO: 149077 - DNA, 1314 bp, Artificial Sequence
  derived and/or modified sequence
atggccgacgatccgtctgctgctgacaggaacgtggaaatttggaagattaaaaagttgatcaagagcctcgaggccgctcggggaaacggaacatccatgatctctctgattattccacctaaagatcagatctctagggtggccaaaatgctagcagatgagtttggcacagcctccaatatcaaaagtcgcgtgaacagactttcggtgctgggggctatcacgagtgtgcagcagcggctgaagctgtacaacaaggtcccccccaatggtctggttgtgtactgtggcactattgtcacagaggaaggcaaggagaaaaaagtaaacattgattttgaacccttcaaaccgattaataccagcttatatttgtgcgacaataagtttcacaccgaggctcttaccgcactcctctccgacgatagcaaatttgggttcattgtgatcgacgggagtggagcactgttcggcacgctgcagggtaatacgagggaggtgctgcacaaatttactgtggacctgcccaagaagcatggcaggggaggccagtccgctctgagatttgccaggttgcgcatggaaaaaaggcataactacgtgagaaaggtggccgagactgcagtgcagctattcatttctggagacaaagtgaacgtggctggtctggttctggccgggagcgcggatttcaaaaccgaactgtcccagagcgatatgtttgatcagagactccagtccaaggtcctcaaacttgtggacatttcatatggaggcgaaaacgggtttaaccaagctattgagcttagcaccgaagtgctcagcaatgtcaaatttattcaggagaagaaactgatagggcggtattttgatgaaatctcccaggacaccggaaaatattgctttggtgttgaagataccctgaaagcattagaaatgggtgccgtggaaattctgatcgtgtacgaaaatctggacatcatgaggtacgtactgcactgccaggggactgaggaagaaaagatattatacctaacgcccgagcaagagaaggataagagccacttcaccgataaggagaccggtcaggaacatgagctcattgaatcgatgccgctgctagagtggttcgcaaacaattataagaagtttggcgccaccctggagattgtgacagataaaagtcaagaaggaagccaattcgttaaggggttcggcggcattggaggcatcctgcggtacagagtagacttccaggggatggagtaccagggtggggacgacgaattctttgatctcgatgattactag

SEQ ID NO: 149078 - DNA, 1314 bp, Artificial Sequence
  derived and/or modified sequence
atggctgatgaccccagcgctgctgacagaaatgtggagatctggaagatcaagaagctgatcaagagcctggaggccgcccggggaaatggcacctccatgatcagcctcatcatcccccccaaggaccagatcagccgggtggccaagatgctggctgatgaatttggaacagccagcaacatcaagagccgggtgaaccggctgtctgtgctgggcgccatcacctctgtgcagcagaggctgaagctgtacaacaaggtgcccccaaatggcctggtggtgtactgcggcaccatcgtgacagaggagggcaaggagaagaaggtgaacatcgactttgagcccttcaagcccatcaacaccagcctgtacctgtgtgacaacaagttccacacagaggccctgacagccctgctgagtgatgacagcaagtttggcttcatcgtgattgatggcagcggggccctgtttggcaccctgcagggcaacacccgggaggtgctgcacaagttcaccgtggacctgcccaagaagcacggccggggcggccagagcgccctgcgctttgcccggctgaggatggagaagaggcacaactacgtgaggaaggtggccgagacagctgtgcagctgttcatcagcggggacaaggtgaatgtggccggcctggtgctggccggcagcgctgacttcaagacagagctgagccagagcgacatgtttgaccagaggctgcagagcaaggtgctgaagctggtggacatctcctatggaggagaaaatggcttcaaccaggccatcgagctgagcacagaggtgctgagcaatgtgaagttcatccaggagaagaagctgattggccgctactttgatgagatcagccaggacaccgggaagtactgctttggagtggaggacaccctgaaggccctggagatgggcgctgtggagatcctgattgtgtatgagaacctggacatcatgagatatgtgctgcactgccagggcacagaggaggagaagatcctgtacctgaccccagagcaggagaaggacaagagccacttcacagacaaggagaccggccaggagcacgagctgattgaatccatgcccctgctggagtggtttgccaacaactacaagaagtttggagccaccctggagatcgtgacagacaagagccaggagggcagccagtttgtgaagggctttggaggcattggaggcatcctgcgctacagagtggacttccagggcatggagtaccagggcggagatgatgagttctttgacctggatgactactag

SEQ ID NO: 149079 - DNA, 1314 bp, Artificial Sequence
  derived and/or modified sequence
atggccgacgaccccagcgccgccgaccggaacgtggagatctggaaaattaaaaagttaatcaagagtctcgaggccgcccgtggaaatggtacaagcatgatctcgctcattataccacctaaagatcagataagcagggtagccaagatgctggccgatgaattcggaaccgccagcaacatcaaaagtcgcgttaatcgcctctccgtcctcggagcaattacaagcgtgcagcagcgtctcaaactctataacaaagtaccccccaacggactcgtggtctactgcggaacaatagttacagaagagggcaaggagaaaaaagttaacattgacttcgagcctttcaaacctataaatacctctctatacctatgcgataacaagttccacaccgaggccttaaccgccctcctttctgacgactccaagttcggttttatcgtgattgatgggagtggggctctgtttggtacactccaaggaaacacgcgggaggtgctgcacaaatttactgtcgatctgcccaaaaagcacggtcgcggagggcagagcgctttgcgattcgccaggttacgcatggagaagagacataattacgtccgaaaagtggctgagacggctgtgcagctgttcataagcggagataaagtgaatgtggcggggttggtgctggccggctccgctgacttcaagacagagctaagccagtctgatatgttcgaccaaaggctgcaaagcaaagtgttaaagttggttgacataagctatggcggggaaaacggtttcaaccaagccattgaactgtcaactgaggtcctgtctaacgtgaaatttatccaggaaaagaagctaattggtagatacttcgatgagattagccaggacaccggcaaatactgtttcggggtcgaagatacactgaaagcgttagaaatgggcgccgttgaaatactgattgtgtatgaaaacctggatatcatgcgttacgtcctgcattgtcagggaacagaggaagagaaaattctgtacctgacccccgagcaggagaaggacaaatcgcactttacggacaaggaaacaggccaggagcatgagctgatcgaatccatgccacttttggagtggtttgccaataattataaaaagttcggcgctacccttgagatcgtgactgataagagtcaagaaggttcgcaatttgtaaagggatttggtggtatcggaggaattctccggtatcgagtggatttccagggcatggagtatcaggggggggatgacgaatttttcgaccttgacgattactag

SEQ ID NO: 149080 - DNA, 1314 bp, Artificial Sequence
  derived and/or modified sequence
atggcagacgatccgtctgcagccgacaggaacgtggagatctggaagatcaaaaaactgattaagtctctagaggccgctcgaggcaatggaaccagcatgatttctcttattatccccccaaaagaccagatcagcagagtggcaaagatgttagctgatgagtttggtacggccagcaatataaagtcccgggttaatcgcctgtctgtgctgggtgcaattactagcgttcaacagcgtctcaaactgtacaacaaagtgccaccaaatggcctggtcgtttactgcgggactatcgtgaccgaggagggaaaggagaagaaggtgaatattgatttcgagccattcaaacccataaacacgtccttatatctgtgcgacaataagttccatacagaagctctcaccgctctgttaagcgacgactctaagttcggattcatcgtcattgacggatccggagccttgttcggcacactgcagggcaacactcgggaagtacttcacaagtttacagttgatttgccaaagaaacatggcaggggcggtcagagtgcacttcgattcgcacgtctccggatggagaagaggcacaattatgtccgtaaggttgccgaaaccgccgtgcagctctttatctcaggcgacaaagtgaacgtagccggactcgtcctcgcagggtctgccgactttaaaacagaactgtcacagagtgatatgttcgaccagagactgcagagtaaagttctgaaattggtggatatctcatatggaggagagaacggatttaatcaggccatcgagctctcaaccgaagtgctgagcaatgtaaagttcatacaggaaaagaagctgatcgggcgatacttcgatgaaatcagccaggacacaggcaagtattgctttggtgtggaagacaccctcaaagcactggagatgggcgctgttgaaatactgattgtttatgaaaatttagatataatgcgttacgtattacattgtcaagggacggaggaggagaaaattctttacttaactcctgagcaggagaaggacaagagccattttacagacaaggagaccggtcaggaacacgaactgatcgaaagtatgccactgctggaatggtttgccaacaattataaaaagtttggagctactctcgagattgtgactgacaagagtcaggaaggcagtcagttcgtgaaagggttcggcggaatcgggggaattctgaggtatcgagtcgactttcaaggaatggaatatcaggggggagacgacgagttttttgacctagacgactactag

SEQ ID NO: 149081 - DNA, 1314 bp, Artificial Sequence
  derived and/or modified sequence
atggccgacgaccccagcgccgccgacagaaacgtggagatctggaagatcaagaagctgatcaagagcctggaggccgccagaggcaacggcaccagcatgatcagcctgatcatcccccccaaggaccagatcagcagagtggccaagatgctggccgacgagttcggcaccgccagcaacatcaagagcagagtgaacagactgagcgtgctgggcgccatcaccagcgtgcagcagagactgaagctgtacaacaaggtgccccccaacggcctggtggtgtactgcggcaccatcgtgaccgaggagggcaaggagaagaaggtgaacatcgacttcgagcccttcaagcccatcaacaccagcctgtacctgtgcgacaacaagttccacaccgaggccctgaccgccctgctgagcgacgacagcaagttcggcttcatcgtgatcgacggcagcggcgccctgttcggcaccctgcagggcaacaccagagaggtgctgcacaagttcaccgtggacctgcccaagaagcacggcagaggcggccagagcgccctgagattcgccagactgagaatggagaagagacacaactacgtgagaaaggtggccgagaccgccgtgcagctgttcatcagcggcgacaaggtgaacgtggccggcctggtgctggccggcagcgccgacttcaagaccgagctgagccagagcgacatgttcgaccagagactgcagagcaaggtgctgaagctggtggacatcagctacggcggcgagaacggcttcaaccaggccatcgagctgagcaccgaggtgctgagcaacgtgaagttcatccaggagaagaagctgatcggcagatacttcgacgagatcagccaggacaccggcaagtactgcttcggcgtggaggacaccctgaaggccctggagatgggcgccgtggagatcctgatcgtgtacgagaacctggacatcatgagatacgtgctgcactgccagggcaccgaggaggagaagatcctgtacctgacccccgagcaggagaaggacaagagccacttcaccgacaaggagaccggccaggagcacgagctgatcgagagcatgcccctgctggagtggttcgccaacaactacaagaagttcggcgccaccctggagatcgtgaccgacaagagccaggagggcagccagttcgtgaagggcttcggcggcatcggcggcatcctgagatacagagtggacttccagggcatggagtaccagggcggcgacgacgagttcttcgacctggacgactactag

SEQ ID NO: 149082 - protein, 404 aa, Artificial Sequence
  derived and/or modified sequence
MQVSIACTEQNLRSRSSEDRLCGPRPGPGGGNGGPAGGGHGNPPGGGGSGPKARAALVPRPPAPAGALRESTGRGTGMKYRNLGKSGLRVSCLGLGTWVTFGSQISDETAEDVLTVAYEHGVNLFDTAEVYAAGKAERTLGNILKSKGWRRSSYVITTKIFWGGQAETERGLSRKHIIEGLRGSLERLQLGYVDIVFANRSDPNCPMEEIVRAMTYVINQGLALYWGTSRWGAAEIMEAYSMARQFNLIPPVCEQAEHHLFQREKVEMQLPELYHKIGVGSVTWYPLACGLITSKYDGRVPDTCRASIKGYQWLKDKVQSEDGKKQQAKVMDLLPVAHQLGCTVAQLAIAWCLRSEGVSSVLLGVSSAEQLIEHLGALQVLSQLTPQTVMEIDGLLGNKPHSKK

SEQ ID NO: 149083 - DNA, 1215 bp, Artificial Sequence
  derived and/or modified sequence
atgcaggtgtctattgcttgcaccgagcagaatctgcgcagccgcagcagcgaggacagactgtgcggccctagacccggaccaggcggcggcaacggcgggcctgccggaggcggacacgggaacccacccggtggcggcgggagcggacctaaagcccgggccgccctggtacccagaccacccgcccccgcaggtgccctgcgagaatcaacaggtcgcgggactggaatgaagtacagaaaccttggcaaatcggggctccgtgtgagctgccttggactaggaacctgggtgacctttggcagtcagatttcagatgagaccgccgaggatgtactcaccgttgcctacgagcatggtgtcaacctgtttgataccgcagaagtgtatgccgccgggaaagcagagcggaccctggggaacattttgaagtccaaagggtggagaagatcatcgtacgtgataacaacaaaaatcttttggggaggccaagccgagaccgagagaggactgtctcggaagcacattattgagggcctgagaggctccctcgagcggctccaacttggctacgttgatattgtgtttgctaacagatccgaccccaattgtcctatggaggagatagtgagggcaatgacttacgtcattaatcaggggttggcactgtactgggggacttcccgctggggcgcggcagagatcatggaggcatactcgatggcccggcagtttaacttgatacccccagtctgtgagcaggctgagcaccacctcttccaaagagagaaagtggaaatgcagctgcctgaattgtatcacaagatcggagtgggatccgtgacatggtatccgctggcatgtggactgatcacttccaaatatgatggaagggttcccgacacttgtagggcctcgataaaggggtaccagtggcttaaggacaaagtgcagtccgaagatggcaagaaacagcaagctaaagtcatggacctactgccagtagcccatcagcttggatgcacagtggctcagctcgccatcgcatggtgcctgcgtagcgaaggtgtcagctccgtattgctcggagtttctagcgcagaacaactcattgagcacctcggagcactgcaggtgcttagtcagctcacgccccagaccgtgatggagatcgatggactcctcggaaacaagccccacagcaagaaatag

SEQ ID NO: 149084 - DNA, 1215 bp, Artificial Sequence
  derived and/or modified sequence
atgcaggtgtccatcgcctgcacagagcagaacctgcggagccgcagcagcgaggaccggctgtgtggcccccggcccggccctgggggcggcaatggaggccctgctgggggcggccacggcaaccccccaggcggcggcggcagcggccccaaggcccgggccgccctggtgccccggcccccagccccagctggggccctgcgggagagcacaggccggggcaccggcatgaagtacagaaacctgggcaagagcggcctgcgggtgtcctgcctgggcctgggcacctgggtgaccttcggcagccagatcagtgatgaaacagcagaagatgtgctgactgtggcctatgagcacggcgtgaacctgtttgacacagctgaggtgtatgctgctgggaaggccgagaggaccctgggcaacatcctgaagagcaagggctggaggaggagcagctatgtgatcaccaccaagatcttctggggcggccaggccgagacagagcggggcctgagcaggaagcacatcatcgagggcctgcggggcagcctggagcggctgcagctgggctacgtggacatcgtgtttgccaacagaagtgaccccaactgccccatggaggagatcgtgcgggccatgacctacgtgatcaaccagggcctggccctgtactggggcaccagccgctggggcgctgctgagatcatggaggcctacagcatggcccggcagttcaacctgatcccccctgtgtgtgagcaggccgagcaccacctgttccagcgggagaaggtggagatgcagctgcctgagctgtaccacaagattggagtgggctctgtgacctggtaccccctggcctgtggcctcatcaccagcaaatatgatggccgggtgcctgacacctgccgggccagcatcaagggctaccagtggctgaaggacaaggtgcagagtgaagatggcaagaagcagcaggccaaggtgatggacctgctgcctgtggcccaccagctgggctgcaccgtggcccagctggccatcgcctggtgcctgcggagtgaaggagtgtcctctgtgctgctgggcgtgtcctctgctgagcagctgattgagcacctgggcgccctgcaggtgctgagccagctgaccccccagacagtgatggagattgatggcctgctgggcaacaagccccacagcaagaagtag

SEQ ID NO: 149085 - DNA, 1215 bp, Artificial Sequence
  derived and/or modified sequence
atgcaggtgagcatcgcctgcaccgagcagaacctgcggagccggagcagcgaggacagactgtgcggaccaaggccaggtccaggaggaggaaatgggggtccagccggaggtggtcatgggaaccctcccggtggaggcggaagcggacccaaggccagggccgcattggtcccaaggccgccagcgccagccggcgctctgcgggaatctactggacgtggtacaggaatgaagtaccggaacctgggcaaaagcgggctgcgtgtgtcctgtctgggccttggtacctgggtgacctttggaagtcagatctcggatgaaacagccgaggacgtgctgacagtagcttatgagcacggagtcaatttatttgatacagctgaagtctacgccgcaggcaaggctgagaggacattagggaacattctaaagtccaagggatggaggcgtagctcctacgtgataacaacaaaaatcttctggggaggtcaagccgaaactgaaagaggcctgagtcgaaaacatatcattgagggtctacggggttcactagagcggttgcagctgggctacgtggacattgtattcgctaacaggagcgatccaaactgcccgatggaagagatcgtaagggccatgacatatgtcattaatcagggactggctttatactggggaacatctaggtggggagctgctgaaattatggaggcgtacagcatggcaaggcagtttaatctcatccccccggtgtgtgaacaggctgaacatcacctgtttcagcgcgagaaagtagaaatgcagttgccagagctgtatcacaaaatcggggttgggtcagttacatggtatccgcttgcttgcgggcttatcactagtaagtacgacggtcgcgtcccagacacctgtcgcgcaagtatcaaggggtaccagtggttgaaggataaggtccagagtgaggatggtaaaaagcagcaggcaaaggtaatggacctgctgccggtcgctcaccagctgggctgcactgtagcacagctggctatagcatggtgcttgcggtcagagggcgtgtcttccgttctgctgggcgtgagctccgcagagcaattgatagagcatctgggagccctgcaggtgctcagtcagctgacccctcagacagtcatggagatcgatgggttgctggggaataaacctcacagcaaaaaatag

SEQ ID NO: 149086 - DNA, 2458 bp, Artificial Sequence
  derived and/or modified sequence
atgcaggtgtctatcgcgtgtaccgagcagaaccttcgcagccggagcagtgaggaccgtctgtgtggaccccggccgggccccgggggcggtaatggtgggccggccggcggggggcacgggaatcctccggggggtggagggtctggccccaaggcccgagctgcactggttccccgacccccagcgcccgctggggccctccgagagagcaccggccgaggcactggcatgaaatacaggaacctagggaagtctggtcttcgggtatcctgtcttggcctaggtacctgggtcacatttggttctcagatctcagatgagacagcagaggatgtgctgactgtagcctatgagcatggtgtaaacctgtttgacaccgccgaagtgtacgcagcaggaaaggctgaaagaaccctagggaacatcctcaagagcaaaggttggaggagatcaagctatgtcatcactaccaagattttttggggaggacaggcagaaaccgagcgaggtttaagccgaaagcacatcattgagggcttgcgaggatccctggaacgcctccagctgggatacgtggacattgtctttgccaatcgctcagaccccaactgtcctatggaggagattgtgcgagccatgacctatgtcatcaaccagggcctggccctatactgggggacatcccgatggggggctgcagaaatcatggaggcctactccatggccagacagttcaatctgattcctccagtgtgtgaacaagcggagcaccatctgtttcagagggagaaggtggagatgcagctgccagagctctaccacaagattggagttggatcagtcacttggtaccctctagcctgtggtctcattactagcaagtatgatgggcgagtcccagatacttgcagggcctccatcaagggctaccagtggctcaaggacaaagtgcagagtgaagatggcaagaagcaacaagccaaagtcatggaccttcttcctgtcgctcaccagctgggctgcaccgtggcccagcttgctattgcgtggtgtctccgcagtgagggtgtcagctctgtcttgctgggggtgtcgagtgcggagcagttgatagaacacctgggcgcgctacaggtgctgagccagctgaccccgcagacagtgatggaaatagacgggctcctgggaaacaagccgcattccaagaagtagtctgtcgcgggcgcagggacccaacccggtgtcgctgcacccgcccgagccccgctcctcgcagccgcctctcccgctccggatccctccacgcagcggccggagccagactagccccgcccaccaacgagtcccggcttcgagtagtgatacgcatgaacaaagccatatccttttgcagtggggtcgagagagaaagtagcacgcccgccccctgctgcgtctttctaggcccttcttgcaaatcccgggcatgagctactcgccgtcggctctctgccacttcgtctcgctccctactctcctccccttattcccgaggcccagaaaagaaaacaaaaacaaaaacccagcacatacaagaaacatacagtgtacctcaaaaggggcccttgaaatgtcatcaaagggtaataacctagtgagtgagttgtgatgtcatctggaacataggaaatggggctcttagcgtattcggtacgaaggaagccaggctggtcctggcaggaagtaaatgataatctttgggaaaccaggaccctgcctcccagcccagaggtggaggagggcggtcagggtggggtctacagtggcacagcactgacaaaggtagagggaaatgtaatagcacatctacgctgcagtctggtgaaagtggccggggtggtccttggaaaacagttgggctgttcttggcaggaattagtgacagcctttccgtcacgggcagggacgccttgatttaaaaaaaataaataaataaaacgtctgggtatagacttttgagccttgagcagggcctcctacctggcagtggggaactgcagtcttcctcctggcaataaacctaaagcaataatgatggccccttctctgtaagacttcccaggtaactgtaaataaacctcagcttgatcctcacagtgtctaaagttgcaggggcttgggaggttagggtcacagtctcacttgtctggccctctcgccccctaacattagaaatctgctagcattagctttctctccattgctcattcaccttggtgacccaggcatcgggctcctagtcactgttctcatcaaggaccaagacaccagataccccaggccccagttttcttccttcagctaccacattccttagaacccagaaatctggcttcataattttgttcctcctctttctatgaaagacttagctatctgcctttatttgtttgtatttaaagtaatattagccata

SEQ ID NO: 149087 - DNA, 1215 bp, Artificial Sequence
  derived and/or modified sequence
atgcaggtctcaatcgcatgcactgaacagaaccttagatctaggtccagtgaggaccgcctttgcggccctagaccgggacctggagggggaaacggtggtccagcaggaggcggtcacggaaatccacccggaggaggcggttcaggcccaaaggccagagcagcactggttccacgccctcccgcaccggctggagctttgagggagagtacaggtcggggtactggcatgaagtatcgtaacctgggtaagtctggtttacgggtgtcttgcctggggctgggtacctgggtgacattcggaagtcagatttctgatgaaactgccgaggatgtgctcactgtagcatatgagcatggagttaacctgtttgatactgccgaagtgtatgccgcaggcaaggcagaaaggactttagggaatatcctcaaaagcaagggatggagacggagttcttacgtcataacaactaaaattttttggggtggccaggccgaaaccgagcgaggactgtctaggaagcacatcatcgagggattgcgaggttctctggagcgattgcagcttggctacgtggatattgtatttgccaatcgcagcgatcctaactgccctatggaagaaattgtgcgggctatgacatatgtcataaaccaaggtctcgcactgtactggggcacgtctaggtggggtgcagccgagattatggaagcctattctatggccagacagttcaacctcatcccacctgtttgcgaacaggctgaacatcacctgttccaaagagagaaggtggagatgcagttgcctgagctgtatcataagataggtgtgggctctgtcacctggtaccccttagcttgtgggctgatcacttctaagtatgacggcagggtgcctgatacctgccgagcaagtattaaaggctatcaatggctgaaagacaaagttcagtcagaggacggcaagaagcagcaggcaaaggtgatggacctgctgcctgttgcacaccagctgggatgtacagtggctcagcttgcaatcgcctggtgtctgagatctgaaggggtctcttccgtgctccttggcgttagtagtgcggagcagctcatcgaacatcttggagctctgcaggtcctgagtcagcttactcctcagaccgtgatggagattgatggcctcttggggaataaaccacactctaagaagtag

SEQ ID NO: 149088 - DNA, 1215 bp, Artificial Sequence
  derived and/or modified sequence
atgcaggtgagcatcgcctgcaccgagcagaacctgagaagcagaagcagcgaggacagactgtgcggccccagacccggccccggcggcggcaacggcggccccgccggcggcggccacggcaacccccccggcggcggcggcagcggccccaaggccagagccgccctggtgcccagaccccccgcccccgccggcgccctgagagagagcaccggcagaggcaccggcatgaagtacagaaacctgggcaagagcggcctgagagtgagctgcctgggcctgggcacctgggtgaccttcggcagccagatcagcgacgagaccgccgaggacgtgctgaccgtggcctacgagcacggcgtgaacctgttcgacaccgccgaggtgtacgccgccggcaaggccgagagaaccctgggcaacatcctgaagagcaagggctggagaagaagcagctacgtgatcaccaccaagatcttctggggcggccaggccgagaccgagagaggcctgagcagaaagcacatcatcgagggcctgagaggcagcctggagagactgcagctgggctacgtggacatcgtgttcgccaacagaagcgaccccaactgccccatggaggagatcgtgagagccatgacctacgtgatcaaccagggcctggccctgtactggggcaccagcagatggggcgccgccgagatcatggaggcctacagcatggccagacagttcaacctgatcccccccgtgtgcgagcaggccgagcaccacctgttccagagagagaaggtggagatgcagctgcccgagctgtaccacaagatcggcgtgggcagcgtgacctggtaccccctggcctgcggcctgatcaccagcaagtacgacggcagagtgcccgacacctgcagagccagcatcaagggctaccagtggctgaaggacaaggtgcagagcgaggacggcaagaagcagcaggccaaggtgatggacctgctgcccgtggcccaccagctgggctgcaccgtggcccagctggccatcgcctggtgcctgagaagcgagggcgtgagcagcgtgctgctgggcgtgagcagcgccgagcagctgatcgagcacctgggcgccctgcaggtgctgagccagctgaccccccagaccgtgatggagatcgacggcctgctgggcaacaagccccacagcaagaagtag

SEQ ID NO: 149089 - protein, 729 aa, Artificial Sequence
  derived and/or modified sequence
MSFGRDMELEHFDERDKAQRYSRGSRVNGLPSPTHSAHCSFYRTRTLQTLSSEKKAKKVRFYRNGDRYFKGIVYAISPDRFRSFEALLADLTRTLSDNVNLPQGVRTIYTIDGLKKISSLDQLVEGESYVCGSIEPFKKLEYTKNVNPNWSVNVKTTSASRAVSSLATAKGSPSEVRENKDFIRPKLVTIIRSGVKPRKAVRILLNKKTAHSFEQVLTDITDAIKLDSGVVKRLYTLDGKQVMCLQDFFGDDDIFIACGPEKFRYQDDFLLDESECRVVKSTSYTKIASSSRRSTTKSPGPSRRSKSPASTSSVNGTPGSQLSTPRSGKSPSPSPTSPGSLRKQRSSQHGGSSTSLASTKVCSSMDENDGPGEEVSEEGFQIPATITERYKVGRTIGDGNFAVVKECVERSTAREYALKIIKKSKCRGKEHMIQNEVSILRRVKHPNIVLLIEEMDVPTELYLVMELVKGGDLFDAITSTNKYTERDASGMLYNLASAIKYLHSLNIVHRDIKPENLLVYEHQDGSKSLKLGDFGLATIVDGPLYTVCGTPTYVAPEIIAETGYGLKVDIWAAGVITYILLCGFPPFRGSGDDQEVLFDQILMGQVDFPSPYWDNVSDSAKELITMMLLVDVDQRFSAVQVLEHPWVNDDGLPENEHQLSVAGKIKKHFNTGPKPNSTAAGVSVIALDHGFTIKRSGSLDYYQQPGMYWIRPPLLIRRGRFSDEDATRM

SEQ ID NO: 149090 - protein, 421 aa, Artificial Sequence
  derived and/or modified sequence
LSLIKFNGTPGSQLSTPRSGKSPSPSPTSPGSLRKQRSSQHGGSSTSLASTKVCSSMDENDGPGEEVSEEGFQIPATITERYKVGRTIGDGNFAVVKECVERSTAREYALKIIKKSKCRGKEHMIQNEVSILRRVKHPNIVLLIEEMDVPTELYLVMELVKGGDLFDAITSTNKYTERDASGMLYNLASAIKYLHSLNIVHRDIKPENLLVYEHQDGSKSLKLGDFGLATIVDGPLYTVCGTPTYVAPEIIAETGYGLKVDIWAAGVITYILLCGFPPFRGSGDDQEVLFDQILMGQVDFPSPYWDNVSDSAKELITMMLLVDVDQRFSAVQVLEHPWVNDDGLPENEHQLSVAGKIKKHFNTGPKPNSTAAGVSVIALDHGFTIKRSGSLDYYQQPGMYWIRPPLLIRRGRFSDEDATRM

SEQ ID NO: 149091 - DNA, 2190 bp, Artificial Sequence
  derived and/or modified sequence
atgtccttcggcagagatatggagcttgagcacttcgatgaacgtgacaaggctcagcggtattcacggggaagtagggtaaacggtttaccatccccaacccacagtgcgcattgctcattctacagaactcgcactctacagaccctttcttccgagaagaaggccaaaaaagtgaggttctatcggaacggcgacagatatttcaagggaattgtgtatgcaatatccccagaccggtttagatcttttgaagccctcttagctgatctgacacgcactctgtccgataacgtgaacctgcctcaaggtgtacggacgatctacactatcgatggcctcaaaaagatttcttcactagatcaactggtggagggagagtcgtatgtttgcggaagcatcgagccattcaagaagttggagtataccaaaaatgtcaatcccaactggtctgtaaatgtgaagactacatcagccagtagagcggtttctagcctagccactgcaaagggaagtccttctgaagtgcgcgagaacaaggactttatccgccctaaactcgttaccataatccgttcaggcgtgaagccaagaaaggcagtccgaatattgctgaacaaaaaaaccgcccacagtttcgaacaagtcctcacagacatcactgatgccatcaagctcgactcaggagtggtgaagcgcctctataccctggacgggaaacaagtaatgtgtttacaggacttttttggtgacgacgatatctttatcgcctgcggccccgagaaattcaggtatcaggatgattttttactggacgagagcgagtgtcgggtggtgaaatcaacttcatacacaaaaatagccagtagctcccgccggagtacaacgaagtcaccagggccttcccggagatctaagtcccctgccagcacctcatcagtcaacggcacgcccggatctcagctgagcacacctagaagtggaaagagcccgagcccatcaccgacatcgcctgggtcattaagaaaacagcggtcatctcagcatggtggctctagcacttctctggcatcaaccaaagtctgctcatcaatggacgaaaacgatgggccaggagaagaagtgagtgaggagggcttccagatccccgccaccatcaccgaaagatataaagttggcaggacaatcggggacggcaacttcgcggtagtcaaggagtgcgtggaacgcagcaccgcccgagaatacgcattgaaaattattaagaagtcaaagtgccgcggcaaagagcacatgatacagaacgaggtctcgatacttaggcgggtgaagcacccaaatattgtcttactgatcgaagaaatggacgtgcccaccgaactgtatctagtcatggagctggtgaaaggaggggatctgttcgatgcaataacatccaccaataaatataccgaacgagatgctagcggtatgctgtataacttggcctcggcaatcaagtatttacactcgctaaacattgtgcatcgcgacattaagcccgagaacttgctggtgtatgagcatcaagatggatcaaaaagcctgaagttaggggactttggacttgcaacaatcgttgacgggcctttatatacagtgtgtggcactcccacttacgtggcaccggagattatcgcagagacagggtatgggctaaaagttgacatctgggctgccggcgttatcacttacatcctgctgtgcggattccctcccttccggggttctggagatgatcaagaagtcttattcgaccagatactaatggggcaggtggattttccctcaccatattgggacaatgtgtccgattccgccaaggagcttatcactatgatgcttctggtggacgtggaccagaggttcagcgctgtccaggtcctagagcatccttgggtgaacgatgacgggctgccggaaaacgaacaccaactgagtgtggccggaaaaataaaaaagcactttaatacgggaccgaaacccaactccacggccgcaggtgtgagtgtcattgccctcgatcatggattcaccattaagcgctctggcagcttggactactaccagcagccgggcatgtactggatcaggccccccctgctgatccgacgaggacgtttctccgatgaggacgcaactcgcatgtag

SEQ ID NO: 149092 - DNA, 1092 bp, Artificial Sequence
  derived and/or modified sequence
atgagtttcggcagagatatggagcttgagcatttcgacgagcgggataaagcccagcgatactctcgaggcagtagagtgaacggactccctagccccacccatagtgctcactgcagcttctataggacacgcacactccaaactctcagctctgagaagaaggccaaaaaagtacgcttctaccggaatggggacagatacttcaagggaatcgtctatgccatttccccagataggtttagaagctttgaagctttgttagccgatttgacgagaaccctgagtgataacgtgaatctgccccagggcgtgcgtaccatttatactatcgacggcctgaagaagatctctagcttggatcagctggtggagggagagtcctacgtgtgtggatctatcgaacctttcaaaaagttggagtacactaaaaatgtgaatcctaattggagtgtaaacgtgaaaactacgtctgcctctagagccgtaagttcactggccacagcaaaggggtccccctctgaagttcgggagaataaggattttatccgccctaaattagtgaccatcatcaggagtggagtcaaaccgagaaaagctgtacgtatcctgttaaacaaaaagacagcccattcattcgaacaggtgctcaccgacataactgatgctattaagctggacagcggcgtggtaaaaagactatacactctggatggtaagcaagtgatgtgcctgcaggacttttttggtgacgacgatatctttatagcgtgtggacctgaaaagtttcggtaccaggatgactttctccttgatgagtcagagtgtagggtcgtgaagagtacttcatacaccaagatcgcctcaagtagtcggagatctactactaagtcccctggaccaagcaggcggtctaagtctccagcatcgacctcaagcgtcaatggcaccccggggtcacagctatctactcctagatccggtaagagccctagtccaagccccacgtcacccggcagcttacggaaacagagagatctataccgcccgctatccagtgacgacttagacagcgtcggcgatagcgtgtag

SEQ ID NO: 149093 - DNA, 1860 bp, Artificial Sequence
  derived and/or modified sequence
atgtcattcggacgcgatatggaactggaacattttgacgaaagggacaaggcccagcggtatagccgtggttcccgggtgaacggtttgccttcacccacccactctgcacattgttcattctatcggacaaggaccctgcagacactcagtagcgagaaaaaagcaaaaaaagtgcggttttatcgtaatggagaccggtattttaagggtattgtgtatgctataagccccgaccgcttcagatcctttgaggcattgctcgcagatctgaccaggaccctgtcagacaatgtgaatctgccccagggtgtgaggactatttataccattgacggtctgaagaagattagctctctggaccaacttgtcgagggcgaatcatacgtgtgtggctcaatcgaacccttcaagaaacttgagtatacaaagaatgtgaaccctaactggagcgttaatgtgaagacaacgagtgcaagccgcgccgtctccagcttagcaaccgctaagggatccccctccgaggtcagggagaataaggattttatcagacccaagctcgtcaccataataaggtccggagttaagccccgcaaggcagtccgaattctgctgaataagaagacagcgcacagttttgaacaggtccttaccgacataactgacgccattaagctcgactccggtgtcgtcaaacggctgtacactttagatggcaagcaagtcatgtgccttcaggactttttcggagacgacgacattttcatcgcatgcggtcccgaaaaattccgttaccaggatgatttccttcttgacgaaagcgagtgtagggtcgtgaagagtacgagttataccaagatcgcctcatcctccagaaggtcaactaccaagtcccctgggcccagcagacgatctaaaagccctgccagtaccagctccgtgaatggcaccccagggagccaactgagcacgcccagaagtggtaagtccccctcaccttcccctactagtcctggctccctaagaaaacagcgatccagccagcatgggggcagcagcacatccttggccagtactaaagtgtgtagctcaatggatgagaacgacggtcctggcgaggaggtatcagaggagggctttcagattcccgcgacaatcacagaaagatacaaggtgggtcgaaccatcggagatgggaatttcgctgtggtgaaggagtgtgtcgagcgctcaacagcgcgcgagtacgccctaaagattatcaaaaagtcaaagtgcagggggaaagagcatatgatccagaacgaggtctccattctgcggcgagtcaaacatcccaacatagtgctgcttatagaagagatggacgtgcccactgaattgtacctggtaatggagctggtcaagggcggcgacctgtttgatgccataaccagcacaaacaagtaccttcactccttaaacatcgttcatagggatatcaagcctgaaaatctgcttgtttacgaacatcaggatggcagcaagagcttgaagttgggcgactttggcctggcaacaatcgtggacggaccactgtacaccgtgtgtgggacaccaacttatgtggcccctgagattatcgccgagacaggctacggtctgaaagtggatatctgggctgcaggagtcataacatacattcttttgtgcgggtttccaccgtttagaggcagcggagacgatcaggaagtgctcttcgaccagatcctgatggggcaggtggattttccttccccatactgggataacgtctctgatagcgcgaaagagctgatcacaatgatggcttctcagaagatgaacatttcctgccaatag

SEQ ID NO: 149094 - DNA, 2190 bp, Artificial Sequence
  derived and/or modified sequence
atgagctttggccgggacatggagctggagcactttgatgagcgggacaaggcccagcgctacagccggggcagccgggtgaatggcctgcccagccccacccacagcgcccactgcagcttctaccgcaccaggaccctgcagaccctgagcagcgagaagaaggccaagaaggtgcgcttctacagaaatggagaccgctacttcaagggcatcgtgtatgccatcagcccagaccgcttccgcagctttgaggccctgctggccgacctgaccaggaccctgagtgacaacgtgaacctgccccagggcgtgaggaccatctacaccattgatggcctgaagaagatcagcagcctggaccagctggtggagggggagagctatgtgtgtggcagcattgagcccttcaagaagctggagtacaccaagaatgtgaaccccaactggagcgtgaatgtgaagaccaccagcgccagcagagctgtgagcagcctggccacagccaagggcagccccagcgaggtgcgggagaacaaggacttcatccggcccaagctggtgaccatcatccgctctggagtgaagcccaggaaggctgtgcgcatcctgctgaacaagaagacagcccacagctttgagcaggtgctgacagacatcacagatgccatcaagctggacagcggcgtggtgaagaggctgtacaccctggatggcaagcaggtgatgtgcctgcaggacttctttggagatgatgacatcttcatcgcctgtggccctgagaagttccgctaccaggatgacttcctgctggatgaaagtgaatgtcgggtggtgaagagcaccagctacaccaagatcgccagcagcagccgccgcagcaccaccaagagccctggccccagcagaagaagcaagagccctgccagcaccagctctgtgaatggcaccccaggcagccagctgagcacccccaggtctgggaagagccccagccccagccccaccagccctggcagcctgaggaagcagaggagcagccagcacggcggcagcagcaccagcctggccagcaccaaggtgtgcagctccatggatgaaaatgatggccctggagaggaggtgtctgaggagggcttccagatcccagccaccatcacagagcgctacaaggtgggccgcaccatcggagatggcaactttgctgtggtgaaggaatgtgtggagaggagcacagcccgggagtatgccctgaagatcatcaagaagagcaaatgtcggggcaaggagcacatgatccagaatgaggtgtccatcctgcggcgggtgaagcaccccaacatcgtgctgctgattgaggagatggatgtgcccacagagctgtacctggtgatggagctggtgaagggcggggacctgtttgatgccatcaccagcaccaacaagtacacagaaagagatgccagcggcatgctgtacaacctggccagcgccatcaagtacctgcacagcctgaacatcgtgcaccgggacatcaagccagagaacctgctggtgtatgagcaccaggacggcagcaagagcctgaagctgggggactttggcctggccaccatcgtggatggccccctgtacacagtgtgtggcacccccacctacgtggcccctgagatcatcgccgagaccggctacggcctgaaggtggacatctgggccgccggggtcatcacctacatcctgctgtgtggcttcccccccttccggggcagcggagatgaccaggaggtgctgtttgaccagatcctgatgggccaggtggacttccccagcccctactgggacaacgtgtctgattctgccaaggagctgatcaccatgatgctgctggtggatgtggaccagcgcttctctgctgtgcaggtgctggagcacccctgggtgaatgatgatggcctgcctgaaaatgagcaccagctgtctgtggccggcaagatcaagaagcacttcaacacaggccccaagcccaacagcacagctgctggggtgtctgtgattgccctggaccacggcttcaccatcaagaggagcggcagcctggactactaccagcagcccggcatgtactggatccggccccccctgctgatcagaagaggccgcttcagtgatgaagatgccaccaggatgtag

SEQ ID NO: 149095 - DNA, 1092 bp, Artificial Sequence
  derived and/or modified sequence
atgagctttggccgggacatggagctggagcactttgatgagcgggacaaggcccagcgctacagccggggcagccgggtgaatggcctgcccagccccacccacagcgcccactgcagcttctaccgcaccaggaccctgcagaccctgagcagcgagaagaaggccaagaaggtgcgcttctacagaaatggagaccgctacttcaagggcatcgtgtatgccatcagcccagaccgcttccgcagctttgaggccctgctggccgacctgaccaggaccctgagtgacaacgtgaacctgccccagggcgtgaggaccatctacaccattgatggcctgaagaagatcagcagcctggaccagctggtggagggggagagctatgtgtgtggcagcattgagcccttcaagaagctggagtacaccaagaatgtgaaccccaactggagcgtgaatgtgaagaccaccagcgccagcagagctgtgagcagcctggccacagccaagggcagccccagcgaggtgcgggagaacaaggacttcatccggcccaagctggtgaccatcatccgctctggagtgaagcccaggaaggctgtgcgcatcctgctgaacaagaagacagcccacagctttgagcaggtgctgacagacatcacagatgccatcaagctggacagcggcgtggtgaagaggctgtacaccctggatggcaagcaggtgatgtgcctgcaggacttctttggagatgatgacatcttcatcgcctgtggccctgagaagttccgctaccaggatgacttcctgctggatgaaagtgaatgtcgggtggtgaagagcaccagctacaccaagatcgccagcagcagccgccgcagcaccaccaagagccctggccccagcagaagaagcaagagccctgccagcaccagctctgtgaatggcaccccaggcagccagctgagcacccccaggtctgggaagagccccagccccagccccaccagccctggcagcctgaggaagcagagggacctgtaccggcccctgagcagtgatgacctggacagcgtgggggacagcgtgtag

SEQ ID NO: 149096 - DNA, 1860 bp, Artificial Sequence
  derived and/or modified sequence
atgagctttggccgggacatggagctggagcactttgatgagcgggacaaggcccagcgctacagccggggcagccgggtgaatggcctgcccagccccacccacagcgcccactgcagcttctaccgcaccaggaccctgcagaccctgagcagcgagaagaaggccaagaaggtgcgcttctacagaaatggagaccgctacttcaagggcatcgtgtatgccatcagcccagaccgcttccgcagctttgaggccctgctggccgacctgaccaggaccctgagtgacaacgtgaacctgccccagggcgtgaggaccatctacaccattgatggcctgaagaagatcagcagcctggaccagctggtggagggggagagctatgtgtgtggcagcattgagcccttcaagaagctggagtacaccaagaatgtgaaccccaactggagcgtgaatgtgaagaccaccagcgccagcagagctgtgagcagcctggccacagccaagggcagccccagcgaggtgcgggagaacaaggacttcatccggcccaagctggtgaccatcatccgctctggagtgaagcccaggaaggctgtgcgcatcctgctgaacaagaagacagcccacagctttgagcaggtgctgacagacatcacagatgccatcaagctggacagcggcgtggtgaagaggctgtacaccctggatggcaagcaggtgatgtgcctgcaggacttctttggagatgatgacatcttcatcgcctgtggccctgagaagttccgctaccaggatgacttcctgctggatgaaagtgaatgtcgggtggtgaagagcaccagctacaccaagatcgccagcagcagccgccgcagcaccaccaagagccctggccccagcagaagaagcaagagccctgccagcaccagctctgtgaatggcaccccaggcagccagctgagcacccccaggtctgggaagagccccagccccagccccaccagccctggcagcctgaggaagcagaggagcagccagcacggcggcagcagcaccagcctggccagcaccaaggtgtgcagctccatggatgaaaatgatggccctggagaggaggtgtctgaggagggcttccagatcccagccaccatcacagagcgctacaaggtgggccgcaccatcggagatggcaactttgctgtggtgaaggaatgtgtggagaggagcacagcccgggagtatgccctgaagatcatcaagaagagcaaatgtcggggcaaggagcacatgatccagaatgaggtgtccatcctgcggcgggtgaagcaccccaacatcgtgctgctgattgaggagatggatgtgcccacagagctgtacctggtgatggagctggtgaagggcggggacctgtttgatgccatcaccagcaccaacaagtacctgcacagcctgaacatcgtgcaccgggacatcaagccagagaacctgctggtgtatgagcaccaggacggcagcaagagcctgaagctgggggactttggcctggccaccatcgtggatggccccctgtacacagtgtgtggcacccccacctacgtggcccctgagatcatcgccgagaccggctacggcctgaaggtggacatctgggccgccggggtcatcacctacatcctgctgtgtggcttcccccccttccggggcagcggagatgaccaggaggtgctgtttgaccagatcctgatgggccaggtggacttccccagcccctactgggacaacgtgtctgattctgccaaggagctgatcaccatgatggccagccagaagatgaacatcagctgccagtag

SEQ ID NO: 149097 - DNA, 2190 bp, Artificial Sequence
  derived and/or modified sequence
atgagcttcggccgggacatggagctggagcacttcgacgagcgggataaggctcagcgatatagtcgggggagcagggtaaatggactcccctctccgacccattcagcgcattgtagtttttacagaactcggacactacagaccctcagcagcgagaagaaggcgaagaaggtgcggttctaccgcaacggggaccggtatttcaaaggaatcgtttacgctattagtcccgaccgattcaggtccttcgaggctctcttggcagaccttacccgtaccttgagtgataatgtgaatttgccccagggagtccgaaccatctacacaatagatgggttgaagaaaatctccagcttagaccaactcgtggaaggagaatcttacgtctgtgggagtatagaaccattcaagaagctggaatataccaagaatgttaaccccaactggtctgttaatgtgaagactacaagcgctagtcgggctgtcagttcgctcgcgacggccaagggaagcccctctgaggtgagggagaacaaagattttataaggcctaaactcgtaaccataatccgctcgggagttaagcctagaaaggccgtgcggatcctattaaacaagaagaccgcccattccttcgagcaggtgttaacagatattacagatgctattaaactcgacagtggggtagtgaagaggctgtacacactggatggcaaacaggtaatgtgcctgcaagacttctttggcgacgatgatatctttattgcctgcgggccagagaagtttcgttaccaggatgactttttgctggatgaaagtgagtgtagagtggtcaaaagtacatcctacaccaaaatcgcctcatcgtctaggcggtctaccaccaaaagccccgggccctcccggaggagcaaaagccctgcatctacttcctctgtcaacggaacgcctggctcacaattgtccaccccccggtcagggaagagccccagtccaagtcctacgtctcccggtagcctgcggaaacagcggtcaagccagcacggaggttccagtaccagtctggcaagcactaaggtgtgttcctccatggacgaaaacgacgggcccggcgaggaagtgagcgaagaagggtttcaaatccccgccactattaccgaacgatataaggtcggcaggacgattggtgatggtaattttgccgttgtcaaggaatgcgtggaacgtagtactgcgcgcgagtatgcgctcaagattatcaagaagtctaaatgcaggggtaaagagcatatgatccaaaacgaggtgtctatactgaggcgagtgaagcacccaaatatagtactgttgattgaggagatggacgtacccacagagctgtaccttgtgatggagctcgtgaaaggaggagaccttttcgacgccattacttccaccaataaatataccgagagggatgcatcaggcatgctctacaacctggccagtgcaataaagtaccttcactccctaaacatcgttcacagagatattaaacccgaaaatctgctagtgtacgagcatcaggatggcagcaaatctctgaagttaggtgacttcggtcttgccacaatcgtcgacggccctctctacacagtgtgtggaacacccacatatgttgcgccagagatcatcgccgagaccggctatggcctcaaagtcgatatttgggccgcaggtgtgataacctacattttgctctgtggattcccccctttccgagggagtggggacgatcaagaagtgctcttcgaccagattctgatggggcaagtggactttccttccccgtactgggataacgtctctgacagtgcaaaggagttgatcaccatgatgctactcgtggatgtcgaccagcgcttctctgccgtgcaagtccttgagcatccttgggtgaacgacgatggcctgcctgagaatgagcaccagcttagcgtggctggaaaaatcaagaaacactttaacacagggcccaagccaaatagcaccgcagctggtgttagcgtgatagcacttgatcacggtttcactatcaagcgaagtggtagcctggattattaccaacagcccggcatgtattggatacggccacccctactgataagaagaggccgtttttccgatgaggacgctacgcgcatgtag

SEQ ID NO: 149098 - DNA, 1092 bp, Artificial Sequence
  derived and/or modified sequence
atgagcttcggccgggacatggagctggagcacttcgacgagcgggataaggcgcagcgctatagcagaggttccagggtcaacggactcccctctccaactcacagcgcgcactgtagcttttataggactcggacgcttcagaccttgtcctctgaaaagaaggcaaagaaggtccgtttttacaggaacggggaccgttactttaaagggattgtgtacgccatctcccccgaccgtttccggtctttcgaggccctcctagccgaccttactagaacgctcagcgataatgtcaatctgcctcagggcgtgagaacaatctacactatcgatgggctcaaaaaaattagttctttggatcagctagttgagggcgaaagttacgtgtgcggctcaatcgagccgttcaaaaaacttgagtatactaaaaacgtaaaccccaattggtccgtgaacgttaagaccacgagcgcctctcgagctgtgagcagcttggcgaccgcgaaggggagcccatccgaggttagagaaaataaggacttcattaggccgaagctggtcacgatcatacggtctggagtaaagcctcggaaggctgttagaatactgttgaataagaagaccgcccacagcttcgaacaggtcttaacagacatcaccgatgcaataaagctggattccggtgtggtcaagcggctctacacccttgacgggaaacaggtgatgtgtctgcaggatttctttggggatgatgatatttttattgcttgcgggcctgagaagttccggtatcaagatgactttctgctggatgagtctgagtgcagagttgtaaagtctactagctataccaagatcgctagctcctctaggagaagcacgactaagagtcccggaccatctcgcaggtccaagtcaccagcctccacctccagcgtcaacgggacaccagggtcccagctgtcaactccacgaagcggaaaatccccctccccaagcccaacctcgcccggaagcctgcgtaagcagagggatctctatcggcccctgtcaagtgacgatctcgactcagtgggcgatagcgtttag

SEQ ID NO: 149099 - DNA, 1860 bp, Artificial Sequence
  derived and/or modified sequence
atgagcttcggccgggacatggagctggagcacttcgacgagcgggacaaagctcagagatactctaggggtagtcgggtaaatggactgccaagcccaactcattccgctcattgcagcttctacagaactcgaacactccagacattgtcctcggaaaagaaagccaaaaaagtgagattttatcgcaatggggacagatattttaaaggcatcgtttatgcaattagtcccgaccgtttcaggtcattcgaggccttgctcgctgacctgacaaggaccctgtctgacaacgtgaatttacctcagggcgtgcggacaatttacacaatcgatggcttgaagaagatcagttcacttgaccagctcgtggaaggagaatcatacgtgtgcgggtccattgagccttttaagaaacttgaatacacaaagaacgtcaaccccaattggagtgtcaacgtgaaaactacttctgcttcaagagctgtgagcagcttggctacagcgaaggggagtccctccgaggtgcgagagaataaagacttcatacggcccaaactggtgactatcattaggagcggcgtgaagccacggaaggcagtgagaatcctgcttaacaaaaagacagcccattccttcgagcaggtgcttacagatatcacagacgcaattaagttggattccggagtggttaagcgcctctatacattagacgggaagcaggtgatgtgtctgcaggactttttcggtgacgatgacatattcatagcatgcgggcctgagaagttcagataccaggacgacttcttactggacgagtccgaatgtcgcgtcgtgaaatctacatcatataccaaaatcgcctcctcaagccgacgctcaacaaccaagtcaccaggccctagtcgacgctccaaaagcccagctagcacaagctctgttaacggtacacctggttcgcaactttctaccccgcgtagtgggaagagtccctccccctcacctaccagtcctggttcgctcagaaaacagcgtagctcccagcatggcggatcttcaacttcgcttgcttcaaccaaggtgtgtagcagtatggacgagaacgatgggcctggtgaagaagtctcagaggagggttttcagattcctgccactatcacagagcgatataaggtgggccgcaccatcggcgatggaaatttcgctgtcgttaaagagtgtgtcgagaggtccacggctagagagtacgctctgaagatcatcaagaaatccaagtgccggggtaaagagcatatgattcaaaacgaggtcagtattcttagaagggtgaaacatcctaatatcgtgttactgatcgaggagatggacgtgcctacagagctgtacttagtgatggagctggtcaagggaggcgacttgtttgacgctataactagtacaaacaagtatctccattctcttaacattgtgcatagagacataaaaccagagaacctgttggtatacgagcaccaggatggatcgaaatcgctcaaactcggcgattttggactagcaactattgtggacggcccactttacacggtgtgcgggacacctacgtatgtggctcccgaaatcattgcggagactggatatggccttaaggtcgacatatgggcagctggagtgattacctatattctcctgtgtgggttccctcccttccggggcagtggggatgaccaggaagtcctctttgaccagatactgatgggtcaggtggattttcccagtccatattgggacaacgtcagcgatagcgccaaggaactcattacaatgatggcctctcagaaaatgaatattagctgtcaatag

SEQ ID NO: 149100 - DNA, 2190 bp, Artificial Sequence
  derived and/or modified sequence
atgtcttttggaagggatatggagcttgagcactttgatgagagagataaagctcaacgatacagcagagggagccgagtgaacgggctaccctcccctacacactctgctcattgctctttttatcgcacccggactctgcagaccctgtcctctgaaaagaaagccaagaaggttaggttctatagaaatggagacaggtacttcaaggggatcgtctacgcaatctcccccgatcgctttaggagcttcgaggccttgcttgccgatctcacgagaacactttcggacaacgtgaaccttccccagggcgttaggactatttacacaatagacgggctcaaaaagatatcctccttagatcagttagtggagggagaaagttacgtgtgtggcagtattgagccctttaaaaagctggagtacaccaaaaacgtgaatcccaactggtcggtgaatgtcaagaccaccagtgccagccgggctgtaagcagtctggctaccgccaagggcagcccatccgaggtgagagagaataaagacttcattaggccaaaactggtgacaatcatacgctcaggggtgaaacccaggaaagctgtgcggatcttgctgaacaagaagacagcccattcttttgagcaggtcctcaccgatattacggatgcaattaagctggattccggggtggttaaacggctttatacattagacgggaagcaggtgatgtgcttgcaggacttctttggtgatgatgatatcttcattgcatgtggcccagaaaagttccgctatcaagatgattttctacttgatgagtccgagtgcagagtggtgaagtctacgagttatacgaagatcgcttcttcatcaaggcgctctactaccaagtcacccggacccagtcgtaggtctaaatccccagcctccacctcgtccgtgaatgggaccccagggtcacagttgtcaactcctcggtccggaaaatccccaagtccctcacccacttcccctggttcgcttcggaaacaacgttccagccaacatggagggagtagcacatccctggcgtcgacaaaagtctgttcttctatggatgaaaacgatggccctggtgaagaggttagtgaagaaggtttccagatcccagccaccataaccgaacgctacaaagttgggaggacgatcggggacggtaatttcgccgttgtgaaggagtgtgtagaaaggtcaactgcacgcgaatacgccttaaagattatcaagaagagcaaatgcagaggaaaagaacatatgattcagaacgaagtctccatactccggagggtgaaacaccctaacatcgtcctgcttattgaggaaatggacgtgccgaccgaactgtatcttgtgatggaactggtgaagggaggcgacctgttcgacgccatcacgtctaccaacaagtatacagagcgtgatgcgtccggcatgctgtataatctcgccagcgcaattaagtacttacacagtcttaacattgttcatagggacatcaaacctgaaaacctactggtgtatgagcaccaggacggcagcaagagtctgaagctgggtgactttggattagctacaattgtggacggccctctctatacagtgtgtggtactccaacatacgttgctcccgaaatcatcgccgaaacaggctacggccttaaggtggatatctgggcggcaggggtgattacctacattctcctctgtgggttcccaccatttcgcggaagcggtgatgatcaggaggtactgttcgaccaaattctgatgggccaggtggattttccatctccgtactgggacaacgtaagtgattctgcaaaggagctcatcaccatgatgctcctcgtcgatgtggaccagagattctccgccgtgcaggtgctggaacacccatgggtgaatgacgacggcctgcccgagaacgagcatcagctcagcgtggccggaaagatcaagaagcatttcaacacaggtcccaagcccaattccactgctgcaggggtgtccgtaatcgctttggatcatggattcaccatcaaacgaagtggaagtctggattattaccagcagccaggcatgtattggatacgaccaccactgttaattcgtcgcggtaggtttagcgacgaggatgcgacgcggatgtag

SEQ ID NO: 149101 - DNA, 1092 bp, Artificial Sequence
  derived and/or modified sequence
atgagttttggtagggatatggagctggagcacttcgatgagcgtgacaaggctcagcgctattcgagaggcagccgagtgaatggtctgccctcgcctactcactcggcccattgtagcttctacaggacacgcactctccagaccctctcctctgagaaaaaggcaaagaaggttaggttttatcgtaacggcgacagatacttcaagggaatagtgtacgccatttctccagaccggttccgcagctttgaagccctgctcgccgacctgacgcgcaccctgtctgacaacgtaaacctgcctcagggagtcagaaccatttatacgatagatggtctgaagaagataagttccctggatcagcttgtcgagggcgagagttatgtgtgcggctcaatcgaaccattcaaaaagctggaatacactaagaacgtaaaccctaattggtcagtgaacgtcaagactaccagcgccagccgtgccgtctcatctctggccactgccaaaggttccccgagcgaggtcagagagaataaggatttcatcagaccaaaacttgtgactattatacgaagcggcgtgaaacccagaaaagccgtccgcatcctgctcaacaagaaaacggctcacagttttgaacaggtactgacagatatcacagacgccatcaagcttgatagtggcgttgtgaaaagactttacaccctcgacgggaaacaggtcatgtgcctgcaggatttcttcggggatgatgatatttttattgcatgtggacccgagaagttcaggtatcaagacgatttcttactggacgaatcggaatgccgtgtggtcaagtccaccagctacaccaagatcgcatccagttcaaggcggagtaccacaaaatcccctggaccaagtagacgctccaagtcgccagccagcacgtcctctgtgaatggcacacccggatctcagctgtctaccccgcgatccggcaaatcaccaagcccttcccccacatcacccggatctctcagaaaacagcgggacttgtaccggccactgagctcggacgaccttgattcagttggagacagcgtgtag

SEQ ID NO: 149102 - DNA, 1860 bp, Artificial Sequence
  derived and/or modified sequence
atgtccttcggacgggacatggagttagagcatttcgacgagcgtgacaaagcacaaaggtacagtaggggtagcagggtgaacggcctaccttcacccactcactcagctcattgttccttctacagaacccgtaccttgcagacattgagctccgagaaaaaagctaagaaagtacgattctataggaacggcgatcgatacttcaaagggatcgtgtacgccattagtcctgatcgcttccgaagcttcgaggctttgctggcggatctgacccggacgttgtccgataacgtgaatctgccgcagggcgtgcgcacaatatataccatcgatggcttgaagaagattagctccttggatcagctggtggagggcgagagttacgtgtgcgggagcatagagcccttcaagaagcttgaatataccaaaaatgtgaatcccaactggagcgttaacgtcaagacaacatccgcaagcagggcggtgtcttcactggccacagctaaaggtagtccttcggaggtccgagaaaataaggatttcattcgtccaaagctagttaccattataaggtcaggagtcaagccaaggaaggctgtccgtatcttgttgaataagaagactgcacattcattcgaacaggtgctgactgatatcaccgacgctataaaacttgacagtggagtcgtgaaaaggttatacacattggacgggaaacaggtcatgtgcctgcaggacttctttggcgatgacgacatctttattgcctgcggtcctgaaaaattcagataccaagacgactttctgctggacgagtccgaatgcagggtggtcaagtcaacctcctacactaagatcgcaagctcctctaggcgctccaccaccaagtcaccgggtccctccaggagaagcaaatcaccagctagcaccagctctgtcaacggtacccctggctcgcagctatccacgccacgatccggcaaatcaccaagccccagcccaacttcccccggttccctaaggaagcagaggtctagccagcatggcggaagctctacaagcctggcatccaccaaagtatgcagttcaatggacgagaatgatggcccaggtgaggaagtgtctgaggagggcttccagattcctgccacaataacggagcgctacaaagtgggccgaaccataggggacgggaatttcgcagtagtgaaggaatgcgtggagcgttcaactgctagggagtacgctcttaaaatcattaaaaagagtaagtgtagaggtaaagagcatatgatccaaaatgaagtgtcaatcctgcggagggtcaagcaccccaacatcgtgttactaatcgaagaaatggacgtgcccacggaactctatttggttatggagctggttaaaggtggggacctgttcgatgccattaccagtaccaacaagtacctgcattcccttaatattgtgcacagggacatcaagcccgaaaacctgctggtttatgagcaccaagatggaagcaaatctcttaagttgggcgacttcgggctggcaactatagttgatgggccactgtatactgtttgtggaacgcctacttacgtcgcaccggaaatcattgctgagacagggtatggactcaaggtagacatctgggccgcaggagtgattacatacattctgttgtgcggatttcctccgttcaggggatccggggacgatcaagaggttctctttgaccagattttgatggggcaagtggacttcccttcaccgtattgggataacgtgtcggactctgccaaggaactgattacaatgatggcaagtcagaagatgaacatctcttgtcagtag

SEQ ID NO: 149103 - DNA, 2190 bp, Artificial Sequence
  derived and/or modified sequence
atgagcttcggcagagacatggagctggagcacttcgacgagagagacaaggcccagagatacagcagaggcagcagagtgaacggcctgcccagccccacccacagcgcccactgcagcttctacagaaccagaaccctgcagaccctgagcagcgagaagaaggccaagaaggtgagattctacagaaacggcgacagatacttcaagggcatcgtgtacgccatcagccccgacagattcagaagcttcgaggccctgctggccgacctgaccagaaccctgagcgacaacgtgaacctgccccagggcgtgagaaccatctacaccatcgacggcctgaagaagatcagcagcctggaccagctggtggagggcgagagctacgtgtgcggcagcatcgagcccttcaagaagctggagtacaccaagaacgtgaaccccaactggagcgtgaacgtgaagaccaccagcgccagcagagccgtgagcagcctggccaccgccaagggcagccccagcgaggtgagagagaacaaggacttcatcagacccaagctggtgaccatcatcagaagcggcgtgaagcccagaaaggccgtgagaatcctgctgaacaagaagaccgcccacagcttcgagcaggtgctgaccgacatcaccgacgccatcaagctggacagcggcgtggtgaagagactgtacaccctggacggcaagcaggtgatgtgcctgcaggacttcttcggcgacgacgacatcttcatcgcctgcggccccgagaagttcagataccaggacgacttcctgctggacgagagcgagtgcagagtggtgaagagcaccagctacaccaagatcgccagcagcagcagaagaagcaccaccaagagccccggccccagcagaagaagcaagagccccgccagcaccagcagcgtgaacggcacccccggcagccagctgagcacccccagaagcggcaagagccccagccccagccccaccagccccggcagcctgagaaagcagagaagcagccagcacggcggcagcagcaccagcctggccagcaccaaggtgtgcagcagcatggacgagaacgacggccccggcgaggaggtgagcgaggagggcttccagatccccgccaccatcaccgagagatacaaggtgggcagaaccatcggcgacggcaacttcgccgtggtgaaggagtgcgtggagagaagcaccgccagagagtacgccctgaagatcatcaagaagagcaagtgcagaggcaaggagcacatgatccagaacgaggtgagcatcctgagaagagtgaagcaccccaacatcgtgctgctgatcgaggagatggacgtgcccaccgagctgtacctggtgatggagctggtgaagggcggcgacctgttcgacgccatcaccagcaccaacaagtacaccgagagagacgccagcggcatgctgtacaacctggccagcgccatcaagtacctgcacagcctgaacatcgtgcacagagacatcaagcccgagaacctgctggtgtacgagcaccaggacggcagcaagagcctgaagctgggcgacttcggcctggccaccatcgtggacggccccctgtacaccgtgtgcggcacccccacctacgtggcccccgagatcatcgccgagaccggctacggcctgaaggtggacatctgggccgccggcgtgatcacctacatcctgctgtgcggcttcccccccttcagaggcagcggcgacgaccaggaggtgctgttcgaccagatcctgatgggccaggtggacttccccagcccctactgggacaacgtgagcgacagcgccaaggagctgatcaccatgatgctgctggtggacgtggaccagagattcagcgccgtgcaggtgctggagcacccctgggtgaacgacgacggcctgcccgagaacgagcaccagctgagcgtggccggcaagatcaagaagcacttcaacaccggccccaagcccaacagcaccgccgccggcgtgagcgtgatcgccctggaccacggcttcaccatcaagagaagcggcagcctggactactaccagcagcccggcatgtactggatcagaccccccctgctgatcagaagaggcagattcagcgacgaggacgccaccagaatgtag

SEQ ID NO: 149104 - DNA, 1092 bp, Artificial Sequence
  derived and/or modified sequence
atgagcttcggcagagacatggagctggagcacttcgacgagagagacaaggcccagagatacagcagaggcagcagagtgaacggcctgcccagccccacccacagcgcccactgcagcttctacagaaccagaaccctgcagaccctgagcagcgagaagaaggccaagaaggtgagattctacagaaacggcgacagatacttcaagggcatcgtgtacgccatcagccccgacagattcagaagcttcgaggccctgctggccgacctgaccagaaccctgagcgacaacgtgaacctgccccagggcgtgagaaccatctacaccatcgacggcctgaagaagatcagcagcctggaccagctggtggagggcgagagctacgtgtgcggcagcatcgagcccttcaagaagctggagtacaccaagaacgtgaaccccaactggagcgtgaacgtgaagaccaccagcgccagcagagccgtgagcagcctggccaccgccaagggcagccccagcgaggtgagagagaacaaggacttcatcagacccaagctggtgaccatcatcagaagcggcgtgaagcccagaaaggccgtgagaatcctgctgaacaagaagaccgcccacagcttcgagcaggtgctgaccgacatcaccgacgccatcaagctggacagcggcgtggtgaagagactgtacaccctggacggcaagcaggtgatgtgcctgcaggacttcttcggcgacgacgacatcttcatcgcctgcggccccgagaagttcagataccaggacgacttcctgctggacgagagcgagtgcagagtggtgaagagcaccagctacaccaagatcgccagcagcagcagaagaagcaccaccaagagccccggccccagcagaagaagcaagagccccgccagcaccagcagcgtgaacggcacccccggcagccagctgagcacccccagaagcggcaagagccccagccccagccccaccagccccggcagcctgagaaagcagagagacctgtacagacccctgagcagcgacgacctggacagcgtgggcgacagcgtgtag

SEQ ID NO: 149105 - DNA, 1860 bp, Artificial Sequence
  derived and/or modified sequence
atgagcttcggcagagacatggagctggagcacttcgacgagagagacaaggcccagagatacagcagaggcagcagagtgaacggcctgcccagccccacccacagcgcccactgcagcttctacagaaccagaaccctgcagaccctgagcagcgagaagaaggccaagaaggtgagattctacagaaacggcgacagatacttcaagggcatcgtgtacgccatcagccccgacagattcagaagcttcgaggccctgctggccgacctgaccagaaccctgagcgacaacgtgaacctgccccagggcgtgagaaccatctacaccatcgacggcctgaagaagatcagcagcctggaccagctggtggagggcgagagctacgtgtgcggcagcatcgagcccttcaagaagctggagtacaccaagaacgtgaaccccaactggagcgtgaacgtgaagaccaccagcgccagcagagccgtgagcagcctggccaccgccaagggcagccccagcgaggtgagagagaacaaggacttcatcagacccaagctggtgaccatcatcagaagcggcgtgaagcccagaaaggccgtgagaatcctgctgaacaagaagaccgcccacagcttcgagcaggtgctgaccgacatcaccgacgccatcaagctggacagcggcgtggtgaagagactgtacaccctggacggcaagcaggtgatgtgcctgcaggacttcttcggcgacgacgacatcttcatcgcctgcggccccgagaagttcagataccaggacgacttcctgctggacgagagcgagtgcagagtggtgaagagcaccagctacaccaagatcgccagcagcagcagaagaagcaccaccaagagccccggccccagcagaagaagcaagagccccgccagcaccagcagcgtgaacggcacccccggcagccagctgagcacccccagaagcggcaagagccccagccccagccccaccagccccggcagcctgagaaagcagagaagcagccagcacggcggcagcagcaccagcctggccagcaccaaggtgtgcagcagcatggacgagaacgacggccccggcgaggaggtgagcgaggagggcttccagatccccgccaccatcaccgagagatacaaggtgggcagaaccatcggcgacggcaacttcgccgtggtgaaggagtgcgtggagagaagcaccgccagagagtacgccctgaagatcatcaagaagagcaagtgcagaggcaaggagcacatgatccagaacgaggtgagcatcctgagaagagtgaagcaccccaacatcgtgctgctgatcgaggagatggacgtgcccaccgagctgtacctggtgatggagctggtgaagggcggcgacctgttcgacgccatcaccagcaccaacaagtacctgcacagcctgaacatcgtgcacagagacatcaagcccgagaacctgctggtgtacgagcaccaggacggcagcaagagcctgaagctgggcgacttcggcctggccaccatcgtggacggccccctgtacaccgtgtgcggcacccccacctacgtggcccccgagatcatcgccgagaccggctacggcctgaaggtggacatctgggccgccggcgtgatcacctacatcctgctgtgcggcttcccccccttcagaggcagcggcgacgaccaggaggtgctgttcgaccagatcctgatgggccaggtggacttccccagcccctactgggacaacgtgagcgacagcgccaaggagctgatcaccatgatggccagccagaagatgaacatcagctgccagtag

SEQ ID NO: 149106 - DNA, 5703 bp, Artificial Sequence
  derived and/or modified sequence
gcacatccctgcactagtggccgcaaccgaggcgccgcgctccagcagctgctgccgcccagcccggccccgccgccgccccccagccctgcagccccgcagccccggccgcgcccagcccggcgaggacagcaccaggaggcggcccccagcgcggccacaaagacccccggcggcgtctctccgcggaccggtcctacttgaagtccatcatgtccttcggcagagacatggagctggagcacttcgacgagcgggataaggcgcagagatacagccgagggtcgcgggtgaacggcctgccgagcccgacgcacagcgcccactgcagcttctaccgcacccgcacgctgcagacgctcagctccgagaagaaggccaagaaagttcgtttctatcgaaacggagatcgatacttcaaagggattgtgtatgccatctccccagaccggttccgatcttttgaggccctgctggctgatttgacccgaactctgtcggataacgtgaatttgccccagggagtgagaacaatctacaccattgatgggctcaagaagatttccagcctggaccaactggtggaaggagagagttatgtatgtggctccatagagcccttcaagaaactggagtacaccaagaatgtgaaccccaactggtcggtgaacgtcaagaccacctcggcttctcgggcagtgtcttcactggccactgccaaaggaagcccttcagaggtgcgagagaataaggatttcattcggcccaagctggtcaccatcatcagaagtggcgtgaagccacggaaagctgtcaggattctgctgaacaagaaaacggctcattcctttgagcaggtcctcaccgatatcaccgatgccatcaagctggactcgggagtggtgaaacgcctgtacacgttggatgggaaacaggtgatgtgccttcaggacttttttggtgatgatgacatttttattgcatgtggaccggagaagttccgttaccaggatgatttcttgctagatgaaagtgaatgtcgagtggtaaagtccacttcttacaccaaaatagcttcatcatcccgcaggagcaccaccaagagcccaggaccgtccaggcgtagcaagtcccctgcctccaccagctcagttaatggaacccctggtagtcagctctctactccgcgctcaggcaagtcgccaagcccatcacccaccagcccaggaagcctgcggaagcagaggagctctcagcatggcggctcctctacgtcacttgcgtccaccaaagtctgcagctcgatggatgagaacgatggccctggagaagaagtgtcggaggaaggcttccagattccagctacaataacagaacgatataaagtcggaagaacaataggagatggaaattttgctgttgtcaaggaatgtgtagaaagatcgactgctagagagtatgctctgaaaattatcaagaaaagcaaatgtcgaggcaaagagcacatgatccagaatgaagtgtctattttaagaagagtgaagcatcccaatatcgttcttctgattgaggagatggatgtgccaactgaactgtatcttgtcatggaattagtaaaggggggagacctttttgatgccattacttccactaacaaatacaccgagagagacgccagtgggatgctgtacaacctagccagcgccatcaaatacctgcatagcctgaacatcgtccaccgtgatatcaagccagagaacctgctggtgtatgagcaccaagatggcagcaaatcactgaagctgggtgactttggactggccaccattgtagacggccccctgtacacagtctgtggcaccccaacatacgtggctccagaaatcattgcagagactggatacggcctcaaggtggacatctgggcagcaggtgtaatcacttatatcctgctgtgtggtttccctccattccgtggaagtggtgatgaccaggaggtgctttttgatcagattttgatggggcaggtggactttccttctccatactgggataatgtttccgattctgcaaaggagctcattaccatgatgctgttggtcgatgtagatcagcgattttctgctgttcaagtacttgagcatccctgggttaatgatgatggcctcccagaaaatgaacatcagctgtcagtagctggaaagataaagaagcatttcaacacaggccccaagccgaatagcacagcagctggagtttctgtcatagcactggaccacgggtttaccatcaagagatcagggtctttggactactaccagcaaccaggaatgtattggataagaccaccgctcttgataaggagaggcaggttttccgacgaagacgcaaccaggatgtgaggagccggtacaaggcgcagccagctcctcccgaactcaactcggaatcggaagactactccccaagctcctccgagactgttcgctcccctaactcgcccttttaataagacccttttactcaaagtcctagcttaaccctttgagactctgagatttttttcccccaaatttgtgtaaaacagtttcatctgatctatctagcgctcaatgcttgaatggcagaactgaaagtgttttcaggtatctttgtagcggtttccctttactgaataagatgacacgtggtgattgtgaagatggtaatttgctgctaatagagtcctcaaagggttaaggccaatttgcaatttttttttaaacttagaagcaatgaatgttttcatcagtcaagctaggatctgcagtatgtaatatagcacttgttaaccctctgagtgcatagaattttattgagaattcttgtttgggaatttttcaggcctttggatgtatacacacatgtttcttgattttactgcagatcaaggggtgttgttagatgctgaaatgtccagaaaagaaggacatttagaatgatatcttgtttgtccttttctgtgggtttagaacgtggcaggtttataacttcgacacacgcacggttctttcttcttcacaatcctattcagaaacagattttttttttcattagagatatgactgtcagttgcagtgagttctgcatcccaagtggagggaattgggtttgtggcaaagagcttgacccaggaaatagatggtgccccccaaattgtctccacatgaagatgtactgatgacgccccagaaatgctgcttccatatcagctgctgctagcgccagcgcagactctcagggagtcaccacagcttgtcttgtgcttggtgagtgagggtctctctactcagtgtcagacatctacaggaaagaaacaactggtggaaaagagcaataaattgcccggtgctctgcagggctggaatttcaaacagaaagagggaataagatcctgtgatttttctcacctgcttttccacgcactgtggtcatcactgtgcaatctacatctagtatgaaatccacacataggagagctggggcacaaggggactggaggcagttgctttgcaagatggctgaggagaaagcacactgggaacacaatccagaatgttctaacaataagttttcagtgaataaaccactggcaagacaattccatgtgcacctttaggttacctatatagtctcctaggaagatcaggatgaaagacctagatgatacccctgaggataaaacctccatcccctaaaatgattttttttaaataccactgtctttagctgtccaggaggtcagagtgttttttctgtctttgggccaagtcctgtctgagacctgtattttcactcttgttaccaaatctatctccctagtgcagtgtctccaggcctgagtttcttctggaacagattccattttagaatggggattcacaggttctgtgcatcaccacagtgctcagagaggattctcctggggtgtcttagaggcaggtgcccaactcaaatgtattcccaaggtttgctgggctctgggatccacgagacaaccagagagggatatctcatgaaatttgcatctggtggctgaacagtacctatgttctctgttttgaatatactttaatacctgagagtcttaaaatttgtgaacaacgtttctatagtcctttattttcaaatgcacattgatcttcacttgctgcatttttactcttcaaccctgaaactatggtctacattaatatggatttttaaatcacatgtcattacttttgcaacaccatcaccaaaattttttgctcttttacatttaggttcatctctgtggtctgtgttgtcctgacatgtaaaaagcatatcgtttattgaggtttttttcccccccttttagagcatccggaagtgataacacgcaaaatcacaaagtagcataaatcagtaaattagttgagttgtttttgggggggaggtgggggtagggggcacagaacaccagaaagagtgttggtgtgtaggtagattccatattaatgaggaacactgaactagttggaaattactgctttctctagaaatataaagcaaagcactattccaaggctatggagtagctctacagcctggcctcaactctaaaagtgtgaagaatgcaatgggcagagacctacctgcagtggactgtcattttcctttctttctctgaattactgctttttctgtgggcattaactatattgctacagcatctagtgtactgagcctgcggtgcatggctcaggccttttcccatcgacgtctagggggactctggaccgtgtgaagctagggggtgtttctcagcacactgcagaagggcagctcagaagaatgcagggcccattcagcatggggatcccagcacatcactgtagaatttgagtgatctatgctgaataaacagtggaatgtgaccagtcaagtagaaatcttgagtaatcagatggaatgcaatctttctaacattaagctaccaagatcctgaatgtcagagatgtactcagagggttaacagacaagcacaaggcatgctgactacattggtgtatccagattgctttgcttttagccagtgctttctaatttttttctcgacattcttgggatagttcaagtttgaaataattaagtggtggtgttctttaaggaatttctataaccaaattgatcttatttttgatttcacttatcatagaacaaatatgtatcattatggcagtgtatctatgtaattatcaatttaatcatcaccaccggtgtttccatattttttcccaagtatttaatatagctctcttatggtggtggcctggtgatggggaccgtctttcttttactgacacatgaccaatcatatggtattttcaagggaattttaagattcatcttttcagtttgatagtagactagttaaggaagaactctttcattacttgcatcgtgtaaatcatctctgtagacatgtgttcatattaatgaacacattttttctcaacattgtagcagaaatcattttattcgtcatgatcaatgaatatgtgatttgctccagatcgttagaaggaaaagtaagatttcagtcatcaaaaatgtttttaccgtagccctcatctaacttacacgtggtgcatattaaaataagcagagaaaaaaaaatgtgaataaactactgaaaac

SEQ ID NO: 149107 - DNA, 2101 bp, Artificial Sequence
  derived and/or modified sequence
gcacatccctgcactagtggccgcaaccgaggcgccgcgctccagcagctgctgccgcccagcccggccccgccgccgccccccagccctgcagccccgcagccccggccgcgcccagcccggcgaggacagcaccaggaggcggcccccagcgcggccacaaagacccccggcggcgtctctccgcggaccggtcctacttgaagtccatcatgtccttcggcagagacatggagctggagcacttcgacgagcgggataaggcgcagagatacagccgagggtcgcgggtgaacggcctgccgagcccgacgcacagcgcccactgcagcttctaccgcacccgcacgctgcagacgctcagctccgagaagaaggccaagaaagttcgtttctatcgaaacggagatcgatacttcaaagggattgtgtatgccatctccccagaccggttccgatcttttgaggccctgctggctgatttgacccgaactctgtcggataacgtgaatttgccccagggagtgagaacaatctacaccattgatgggctcaagaagatttccagcctggaccaactggtggaaggagagagttatgtatgtggctccatagagcccttcaagaaactggagtacaccaagaatgtgaaccccaactggtcggtgaacgtcaagaccacctcggcttctcgggcagtgtcttcactggccactgccaaaggaagcccttcagaggtgcgagagaataaggatttcattcggcccaagctggtcaccatcatcagaagtggcgtgaagccacggaaagctgtcaggattctgctgaacaagaaaacggctcattcctttgagcaggtcctcaccgatatcaccgatgccatcaagctggactcgggagtggtgaaacgcctgtacacgttggatgggaaacaggtgatgtgccttcaggacttttttggtgatgatgacatttttattgcatgtggaccggagaagttccgttaccaggatgatttcttgctagatgaaagtgaatgtcgagtggtaaagtccacttcttacaccaaaatagcttcatcatcccgcaggagcaccaccaagagcccaggaccgtccaggcgtagcaagtcccctgcctccaccagctcagttaatggaacccctggtagtcagctctctactccgcgctcaggcaagtcgccaagcccatcacccaccagcccaggaagcctgcggaagcagagggacctgtaccgccccctctcttcggatgacttggattcagtaggagactcagtgtaaaagaaacaatggagcaatgtatatggtttgtgattgggtgaaggtttcacatttctgaagcaaaagtcttacagcaaaatacacaaaagagttttgcataccttgaaatgataaaagaccaaatcatccaaaagtaaatatgtatgcattttgttttcgtgatgttcaaccttgaaattgagagatttttaaaaatatctcccacatggatttgattggggagagtttgaacacaaaatgctgagatttttgtacagggcctggctctagatgaatttcatacacggacccaatattgagtacaagaacacactaaccatgtggcaatatagagccagaatttctgcagatggagttttcttcttaattataagtagacatagagatataatttttctgtactttctgtaaagcatattaaaacggcactagcaggcatattttttctaaaggttatattgtttttaaaatttgaattgcttggtttttagaggtacttttattacaaaataataaaaatacttgggtagattttttttctccctagacagtagaaaaagctacttactgttttgtgggttagtacatccgagagaaaaagaaaaattatgacaacgacacatctcataaagactctgaagttaggctttaggaacttgccttgtttttgttgtcaagtaaattttattttttaaagttattttattagaaacagtataaatttagcttaagctatatgccaatatgaagaacttggccaatggcattgctatagattgtataattttttcttacaa

SEQ ID NO: 149108 - DNA, 2337 bp, Artificial Sequence
  derived and/or modified sequence
gcatttcaatgaggacgggccgaggcacatccctgcactagtggccgcaaccgaggcgccgcgctccagcagctgctgccgcccagcccggccccgccgccgccccccagccctgcagccccgcagccccggccgcgcccagcccggcgaggacagcaccaggaggcggcccccagcgcggccacaaagacccccggcggcgtctctccgcggaccggtcctacttgaagtccatcatgtccttcggcagagacatggagctggagcacttcgacgagcgggataaggcgcagagatacagccgagggtcgcgggtgaacggcctgccgagcccgacgcacagcgcccactgcagcttctaccgcacccgcacgctgcagacgctcagctccgagaagaaggccaagaaagttcgtttctatcgaaacggagatcgatacttcaaagggattgtgtatgccatctccccagaccggttccgatcttttgaggccctgctggctgatttgacccgaactctgtcggataacgtgaatttgccccagggagtgagaacaatctacaccattgatgggctcaagaagatttccagcctggaccaactggtggaaggagagagttatgtatgtggctccatagagcccttcaagaaactggagtacaccaagaatgtgaaccccaactggtcggtgaacgtcaagaccacctcggcttctcgggcagtgtcttcactggccactgccaaaggaagcccttcagaggtgcgagagaataaggatttcattcggcccaagctggtcaccatcatcagaagtggcgtgaagccacggaaagctgtcaggattctgctgaacaagaaaacggctcattcctttgagcaggtcctcaccgatatcaccgatgccatcaagctggactcgggagtggtgaaacgcctgtacacgttggatgggaaacaggtgatgtgccttcaggacttttttggtgatgatgacatttttattgcatgtggaccggagaagttccgttaccaggatgatttcttgctagatgaaagtgaatgtcgagtggtaaagtccacttcttacaccaaaatagcttcatcatcccgcaggagcaccaccaagagcccaggaccgtccaggcgtagcaagtcccctgcctccaccagctcagttaatggaacccctggtagtcagctctctactccgcgctcaggcaagtcgccaagcccatcacccaccagcccaggaagcctgcggaagcagaggagctctcagcatggcggctcctctacgtcacttgcgtccaccaaagtctgcagctcgatggatgagaacgatggccctggagaagaagtgtcggaggaaggcttccagattccagctacaataacagaacgatataaagtcggaagaacaataggagatggaaattttgctgttgtcaaggaatgtgtagaaagatcgactgctagagagtatgctctgaaaattatcaagaaaagcaaatgtcgaggcaaagagcacatgatccagaatgaagtgtctattttaagaagagtgaagcatcccaatatcgttcttctgattgaggagatggatgtgccaactgaactgtatcttgtcatggaattagtaaaggggggagacctttttgatgccattacttccactaacaaatacctgcatagcctgaacatcgtccaccgtgatatcaagccagagaacctgctggtgtatgagcaccaagatggcagcaaatcactgaagctgggtgactttggactggccaccattgtagacggccccctgtacacagtctgtggcaccccaacatacgtggctccagaaatcattgcagagactggatacggcctcaaggtggacatctgggcagcaggtgtaatcacttatatcctgctgtgtggtttccctccattccgtggaagtggtgatgaccaggaggtgctttttgatcagattttgatggggcaggtggactttccttctccatactgggataatgtttccgattctgcaaaggagctcattaccatgatggcctcccagaaaatgaacatcagctgtcagtagctggaaagataaagaagcatttcaacacaggccccaagccgaatagcacagcagctggagtttctgtcatagcagcccctgctagaccaccgctcttgataaggagaggcaggttttccgacgaagacgcaaccaggatgtgaggagccggtacaaggcgcagccagctcctcccgaactcaactcggaatcggaagactactccccaagctcctccgagactgttcgctcccctaactcg

SEQ ID NO: 149109 - protein, 784 aa, Artificial Sequence
  derived and/or modified sequence
MTSPAAAQSREIDCLSPEAQKLAEARLAAKRAARAEAREIRMKELERQQKEEDSERYSRRSRRNTSASDEDERMSVGSRGSLRVEERPEKDFTEKGSRNMPGLSAATLASLGGTSSRRGSGDTSISIDTEASIREIKDSLAEVEEKYKKAMVSNAQLDNEKTNFMYQVDTLKDMLLELEEQLAESRRQYEEKNKEFEREKHAHSILQFQFAEVKEALKQREEMLEKHGIILNSEIATNGETSDTLNNVGYQGPTKMTKEELNALKSTGDGTLGRASEVEVKNEIVANVGKREILHNTEKEQHTEDTVKDCVDIEVFPAGENTEDQKSSEDTAPFLGTLAGATYEEQVQSQILESSSLPENTVQVESNEVMGAPDDRTRTPLEPSNCWSDLDGGNHTENVGEAAVTQVEEQAGTVASCPLGHSDDTVYHDDKCMVEVPQELETSTGHSLEKEFTNQEAAEPKEVPAHSTEVGRDHNEEEGEETGLRDEKPIKTEVPGSPAGTEGNCQEATGPSTVDTQNEPLDMKEPDEEKSDQQGEALDSSQKKTKNKKKKNKKKKSPVPVETLKDVKKELTYQNTDLSEIKEEEQVKSTDRKSAVEAQNEVTENPKQKIAAESSENVDCPENPKIKLDGKLDQEGDDVQTAAEEVLADGDTLDFEDDTVQSSGPRAGGEELDEGVAKDNAKIDGATQSSPAEPKSEDADRCTLPEHESPSQDISDACEAESTERCEMSEHPSQTVRKALDSNSLENDDLSAPGREPGHFNPESREDTRGGNEKGKSKEDCTMS

SEQ ID NO: 149110 - DNA, 2355 bp, Artificial Sequence
  derived and/or modified sequence
atgacatcgccagctgctgcccagtctcgggagatagactgtctttcaccagaagcccagaaactggccgaagccaggctggctgccaaaagggctgcgcgggccgaggcacgcgagataagaatgaaggaactcgaaagacagcagaaggaggaggactccgagcgctattcccgtagaagtcgacgtaacacgtccgcctcggacgaggatgaacgtatgtccgtgggctcaagaggatctctgagggtggaggagcgacccgaaaaagactttaccgagaagggatccagaaacatgccgggactgagcgctgccacgttggcatcccttgggggaacctcttcccggagaggatccggtgacacctctatttcgatcgacactgaagcttcaatcagagaaataaaggatagcctggccgaggtcgaggagaaatataaaaaagccatggtatcaaatgctcagctcgacaacgaaaaaacaaactttatgtaccaggtggacacactgaaagatatgctgctagaactggaggagcagctcgcagaatcgcgccgccagtatgaagaaaaaaacaaggagttcgagcgcgagaaacacgcccattccatcttacaattccagttcgcagaggttaaagaggcgctgaaacagagagaagagatgttggagaaacacggaattatccttaattcagagatagccacaaacggggaaacgagtgacacattgaataatgtcggttatcagggacccactaagatgacgaaggaagagttgaatgcgctgaaatctactggcgatggtacgctggggcgcgcctcagaagttgaagtcaaaaacgagatcgtcgccaatgtaggcaaacgggaaattttgcacaatacagagaaggagcagcatactgaagatacagtcaaagactgcgtcgacatcgaggttttccccgccggcgaaaacacagaggatcagaagagtagtgaggacacggccccattcctcggcactcttgctggggccacatacgaggaacaggtgcagtctcagattctcgaaagtagcagcctccccgagaacacggtgcaggtggaaagcaatgaagtgatgggggcacctgacgacagaactcgtacccccttagagccttccaactgctggagtgacctagatggtgggaatcatacagaaaacgtgggcgaggccgcagttacacaggttgaggaacaggccggcactgtggcctcctgtccattaggacatagtgacgacacagtttatcatgatgacaaatgtatggttgaggtaccccaggagcttgaaacctcaacagggcacagtcttgaaaaggagttcactaaccaggaggcggcagaaccaaaggaagtccccgcccattcaaccgaagtgggacgggatcacaatgaagaagaaggagaagagacgggcctgagggatgagaaacctattaaaacagaagttcctggatcccccgcaggaaccgaaggcaactgtcaggaggccactggcccaagtacagtcgatacccagaacgagccgctggacatgaaagagccagacgaggagaaaagcgatcaacaaggcgaggcgctcgattcctcccagaagaagactaaaaataagaagaagaagaacaagaaaaaaaagtcccctgtgccagtagaaacgctcaaggatgtgaaaaaggaactgacatatcaaaacactgacctgtcagagattaaggaagaagagcaggtcaagagtactgatcggaaaagcgcggtagaggcgcagaacgaagtgaccgaaaacccaaagcagaagatcgctgctgagtccagtgagaatgtggattgtcctgagaaccctaagatcaagcttgatggaaagctcgatcaggagggagatgacgtacaaactgccgccgaagaggttttagctgacggcgatactcttgattttgaggatgacaccgtccagagcagtggccctagagcgggcggagaggagctagacgaaggcgtagctaaggacaatgctaaaatagatggagcgactcagtcctctcccgcagagccaaagtccgaagacgctgatcgttgtactctcccagagcacgagagtcccagtcaggacatttcggacgcctgcgaggcggagagcacagagcgttgcgagatgtccgagcacccaagccagactgtccgcaaagcgctggactctaactccctggaaaatgacgacttgtcagccccgggacgggagcccggtcactttaatcctgagtctagggaagatacacgaggagggaacgaaaagggtaagtcaaaggaggattgcacaatgtcctag

SEQ ID NO: 149111 - DNA, 2355 bp, Artificial Sequence
  derived and/or modified sequence
atgaccagccctgctgctgcccagagccgggagattgactgcctgagccctgaggcccagaagctggccgaggcccggctggccgccaagagagctgcccgggcagaggcccgggagatccgcatgaaggagctggagcggcagcagaaggaggaggacagcgagcgctacagcagaagaagcagaagaaacaccagcgccagtgatgaagatgagaggatgtctgtgggcagccggggcagcctgcgggtggaggagaggcctgagaaggacttcacagagaagggcagcaggaacatgcctggcctgtctgctgccaccctggccagcctgggcggcaccagcagcagaagaggcagcggggacaccagcatcagcattgacacagaggccagcatccgggagatcaaggacagcctggccgaggtggaggagaagtacaagaaggccatggtgtccaatgcccagctggacaatgagaagaccaacttcatgtaccaggtggacaccctgaaggacatgctgctggagctggaggagcagctggccgagagccggcggcagtatgaggagaagaacaaggagtttgagcgggagaagcacgcccacagcatcctgcagttccagtttgctgaggtgaaggaggccctgaagcagcgggaggagatgctggagaagcacggcatcatcctgaacagcgagatcgccaccaacggggagaccagtgacaccctgaacaacgtgggctaccagggccccaccaagatgaccaaggaggagctgaatgccctgaagagcactggagatggcaccctgggccgggccagcgaggtggaggtgaagaatgagatcgtggccaacgtgggcaagcgggagatcctgcacaacacagagaaggagcagcacacagaggacacagtgaaggactgtgtggacatcgaggtgtttcctgctggggagaacacagaggaccagaagagcagcgaggacacagcccccttcctgggcaccctggccggggccacctatgaggagcaggtgcagagccagatcctggagagcagcagcctgcctgaaaatacagtgcaggtggagagcaatgaggtgatgggcgccccagatgacaggaccaggacccccctggagcccagcaactgctggagcgacctggatggcggcaaccacacagaaaatgtgggggaggccgctgtgacccaggtggaggagcaggccggcaccgtggccagctgccccctgggccacagtgatgacacagtgtaccatgatgacaagtgcatggtggaggtgccccaggagctggagaccagcacaggccacagcctggagaaggagttcaccaaccaggaggccgctgagcccaaggaggtgcctgcccacagcacagaggtgggccgggaccacaatgaggaggagggggaggagaccggcctgagagatgagaagcccatcaagacagaggtgcccggcagccctgctggaacagagggcaactgccaggaggccaccggccccagcacagtggacacccagaatgagcccctggacatgaaggagccagatgaggagaagagtgaccagcagggcgaggccctggacagcagccagaagaagaccaagaacaagaagaagaagaacaagaagaagaagagccctgtgcctgtggagaccctgaaggatgtgaagaaggagctgacctaccagaacacagacctgtctgagatcaaggaggaggagcaggtgaagagcacagacaggaagtctgctgtggaggcccagaatgaggtgacagagaaccccaagcagaagattgctgctgagagcagtgaaaatgtggactgcccagagaaccccaagatcaagctggatggcaagctggaccaggagggagatgatgtgcagacagctgctgaggaggtgctggctgatggagacaccctggactttgaagatgacacagtgcagagcagcggccccagggctggaggagaggagctggatgaaggagtggccaaggacaatgccaagattgatggagccacccagagcagccctgctgagcccaagtcagaagatgctgaccgctgcaccctgcctgagcacgagagccccagccaggacatcagtgatgcctgtgaggccgagagcacagagcgctgtgagatgtctgagcaccccagccagacagtgaggaaggccctggacagcaacagcctggagaatgatgacctgagcgcccctggccgggagcccggccacttcaaccctgagagccgggaggacacccggggcggcaatgagaagggcaagagcaaagaagactgcaccatgtcctag

SEQ ID NO: 149112 - DNA, 4370 bp, Artificial Sequence
  derived and/or modified sequence
ccgagcccgactcagcccgcggccacctgcgccccgcccctgtcggccgcgcccgagcccagcgccgcgagccgctccccggcgggctggctcctggccccggaagcgcgagcgttcacttagcggcgagtggctccgtctccgcggacagagcgcgcgccccctggcccggcccgcgaggggctcccggcgcggtccccgagcatttcccgccgggtggagcgggccgagcccggcaggatgaccagccccgcggccgctcaaagccgggagatcgactgtttgagcccggaagcgcagaagctggcggaagcccggctcgctgcaaaacgggcggcccgcgcggaggctcgcgagatccgcatgaaggagctggagcggcagcagaaggaggaagacagtgagcgctactctcgtagatccagaagaaacacatcggcttctgatgaagacgagcgcatgtcagtgggtagtcgtggaagcctgagggtagaagagagaccagaaaaagattttactgagaaggggtctcgtaacatgccgggcctgtctgcagccacgctggcctctctgggtgggacttcctctcggagaggcagcggagacacctccatctccatcgacaccgaggcatccatcagggaaatcaaggactctctagcagaagttgaagagaaatataagaaggctatggtttccaatgctcagctagacaatgaaaagacaaacttcatgtaccaggttgataccctaaaagatatgttgctggagcttgaagaacagctggctgaatctaggcggcagtacgaagagaaaaacaaagaatttgaaagggaaaaacacgcccacagtatactgcaatttcagtttgctgaagtcaaggaggccctgaagcaaagagaggaaatgctcgagaaacatggaataatcctaaattcagaaatagctaccaatggagagacttccgacaccctcaataatgttggataccaaggtcctaccaagatgacaaaagaagagttaaatgccctcaagtcgacaggggatgggaccctaggaagagccagtgaagtggaggtgaaaaatgaaatcgtggcgaatgtggggaaaagagaaatcttgcacaatactgagaaagaacaacacacagaggacacagtgaaggactgtgtggacatagaggtattccctgctggtgagaataccgaggaccagaaatcctctgaagacactgccccattcctaggaaccttagcaggtgctacctatgaggaacaggttcaaagccaaattcttgagagcagttctctccctgaaaacacagtacaggttgagtcaaatgaggtcatgggtgcaccagatgacaggaccagaactccccttgagccatccaactgttggagtgacttagatggtgggaaccacacagagaatgtgggagaggcagcagtgactcaggttgaagagcaggcaggcacagtggcctcgtgtcctttagggcatagtgatgacacagtttatcatgatgacaaatgtatggtagaggtcccccaagagttagagacaagcacagggcatagtttagagaaagaattcaccaaccaggaagcagctgagcccaaggaggttccagcgcacagtacagaagtaggtagggatcacaacgaagaagagggtgaagaaacaggattaagggacgagaaaccaatcaagacagaagttcctggttctccagcaggaactgagggcaactgtcaggaagcgacaggtccaagtacagtagacactcaaaatgaacccttagatatgaaagagcccgatgaagaaaagagtgaccaacagggagaggcattggactcatcgcagaagaagacaaagaacaagaaaaagaaaaacaagaagaaaaaatccccagtacccgtagaaacccttaaagatgttaaaaaagagttaacgtatcagaacacagatttaagtgaaattaaggaagaagagcaggtaaagtctactgacagaaagtcagcagtggaagcccaaaacgaggtgactgaaaatccaaaacagaaaattgcagcagaaagcagtgaaaatgttgattgtccggagaatcctaaaattaagttggatggaaaacttgaccaagaaggtgatgatgtacaaacagcagctgaggaggtactagctgatggagacacattagattttgaggatgacaccgttcaatcatcaggcccgagggctggtggtgaagaattagatgaaggtgttgcaaaagataatgctaaaatagatggtgccactcaaagcagtcctgcagaaccaaagagcgaagacgcagatcgctgcaccctgcccgaacatgaaagtccctcacaggacattagtgatgcctgtgaagcagaaagtacagagaggtgtgagatgtcagaacatccaagtcagaccgtcaggaaagctttagacagcaatagcctagagaacgatgacttgtcggcaccaggaagagagccagggcacttcaatccagaaagcagagaagataccagaggagggaatgagaagggcaaaagcaaagaagactgtaccatgtcctaagctgaggcaggcggcaggcgcggtgcacaggaagtctcagtgtgaaggggtcttttctctccactgccaatgtaagtagaatgttctaaattcatagagaggcactgtatgacaattaccaggtgctctactgctttaagttatagactgttacttgtagatttccatgtaatcattgaggttatcacccagattagaaagacatatttgttatcagtgtacgttctaattgagagcattccagtagtatcaaacaataatgtctactgtttatagtccacttaataaaaatagaggcatttactatttgccttaggctgataggaatgtgggttttcttgaccaaatatatcagcatctaattgaaatgaccaaatagcattcttagacttctgtattatgaatataattgatatttaaattaatgtcttgttcacatatgtgtactttcatatttgattttaaaatgtacattataacctgtatggtattttatttaaaggagataaacagccaaatagcaaataggtcactgaatgataagatttgcaccttagaacaataatcattttaaggataacaagtaaatgtctgaaagcatgaggggctttatttgcctttacctcatatgagtctttgatcttgaaccgatacttttggatctcattgttgatatacctgaatttactttgtaagagattttaacttcacttcatgctgatgatgtatcaaattcattttatagaaagatttaaagtttttttctggaagtgatatatgtcaaattacatttcctactgcagtatttgagcagggacagtcattttttaaatgtttttggccgggcgtggtggctcatgcctgtaatctcagtacattgggaggccaaggcaggtggatcacctgaggtcaagagttcgaggccagcctggccaacatggtgaaaccctgtctctactaaaaatacaaaaaattggccgggcgtgatggtgggcgcctgtaatcccagccactccagaggctgaggcaggagaatcgcttgaacctgcgaggcagagattgcagtgagccaagatcaagccattgtactccagcctggacaacaagagcgaaactctgtctaaaaaaaaaaaaaaaaacacacacacacacaacacaatgttttcacgcctgtaaacctagcacattgggaagccaaggtgggaggattgcttgaggccaggagttcaaggctgcagtgagctatgattgcacactgtactctagcctgggagacagagtgagacactgtctctaaaaaaaaaaaaaaaaaaaaaaaaagtttttgaaccttaaaatactttgtttgaatttctaatcatcattcaaaagagcagtaaaaaatggttacttgttcttgtacaagctactaattagactatagtaggatattttaaagagctgaatcacttttggtattttggtataaatattttcatttgttatgtcccagtatattcttactggaaaattcttgttttgatctgcctgaagaaaatatctgttttctatataaaaaaattttttaaaataattgtaaagttagatttaaaattgtaaaatataaaatcacaaaggaatgtaccttatgaatgttgttgacattttatgaaattatgtggattcatattactgttacaagatagaattgaatgcaaaaagaccaaaacctcaataaaatttgaggaaaacgtgttattatgtaattgaaataaaaacattttataattgtgcaa

SEQ ID NO: 149113 - DNA, 2355 bp, Artificial Sequence
  derived and/or modified sequence
atgaccagccccgccgccgcccagagccgggagatcgactgcctgtcccctgaggcgcagaagctcgcagaggcccggctggccgccaagcgggccgcacgcgcagaagctcgggaaatccggatgaaggaactggagaggcagcagaaggaggaggacagcgagcggtactcacggcgcagccggagaaacacttctgcttccgacgaggacgaaaggatgtctgtgggctcacggggctcgctccgcgtcgaggaaaggcctgagaaggattttacagaaaaaggatcccggaatatgcccggactgtctgccgccaccttggcgagcctcggcggaacctcaagccggcggggctcaggggacacttcaataagtattgataccgaagcctcaatacgagagatcaaggactctctggcagaggtggaggagaagtataagaaagccatggtatctaatgcgcaacttgataacgagaagactaactttatgtaccaggtcgacaccctcaaagatatgttgctggaactcgaggaacagttggcagagagccgccgccagtacgaggagaagaacaaggagtttgagagggaaaaacatgctcattcaattttacaatttcagtttgcagaggtgaaggaggccctgaagcaaagggaagaaatgctggaaaagcatgggatcatcttgaatagcgagatcgctacaaacggagagacgtccgacacactgaacaatgtaggatatcaagggccaacaaaaatgacgaaagaggagcttaatgctctcaaatcaacaggagatggaacactgggacgtgcctccgaggtggaggtgaaaaacgagatcgtggctaatgtaggaaaacgggagatcctgcataataccgagaaggagcagcacactgaagataccgtcaaggattgcgtggatattgaagtgtttcccgcgggagagaatacggaggaccagaagtcaagtgaggataccgcaccgttccttggcacacttgccggcgccacctatgaagagcaggttcagtcacagattctggagagcagttctctgccagagaacactgtgcaagtggagagcaacgaggtaatgggggctcccgacgatcgtacacggacaccactggaaccatctaactgctggtccgatttggatggagggaatcataccgagaatgtgggggaggcagcagtgacccaggtagaggagcaagctggaacagtcgcttcctgcccactgggacactcagacgataccgtttaccacgatgataaatgtatggttgaggtgccacaggagcttgaaacctccacaggacacagtctggagaaggagttcaccaatcaagaagcagcagagcccaaggaggtgccggcgcattctaccgaggtgggcagagaccataacgaggaggagggtgaggagaccgggctgcgcgatgagaaacccatcaaaactgaggttcccggctctccagcaggcacggagggtaattgtcaggaagctacagggcccagcacagttgacacccagaacgagccactagatatgaaggagcccgatgaggagaaatccgatcagcagggcgaggcactagacagcagccagaagaagaccaagaacaaaaagaaaaagaataagaagaaaaaatcacccgtgccagtggaaactttaaaggatgtaaagaaggagttaacttatcagaataccgatctttctgaaatcaaagaggaagaacaggtgaaaagtactgacagaaagtccgcggtggaggcccaaaatgaggtgacagagaacccaaaacagaaaatcgcagccgagtccagcgaaaacgtggactgccccgaaaatcccaaaataaagcttgatgggaaactcgaccaagaaggcgatgacgtgcagactgccgccgaagaagtgctggctgacggagacaccctggacttcgaggacgacacagttcagagcagcggcccaagagccggtggggaggagttagatgagggcgtggctaaagacaatgctaagatagatggagccacgcaaagcagccctgccgagcccaaatcagaagatgcggaccgctgcacccttcccgagcacgagtcacccagtcaggacatctctgacgcctgcgaagccgagtcaactgaaaggtgtgaaatgtccgagcacccttcccaaacagttcgaaaagcactggattccaactcactggaaaacgacgatttgagcgcacccggcagggagccggggcactttaatccagaatcgcgggaagacacacgtggaggcaacgaaaagggtaagtccaaagaagactgtactatgagctag

SEQ ID NO: 149114 - DNA, 2355 bp, Artificial Sequence
  derived and/or modified sequence
atgacgtcgccagccgcagcccagtccagagagatcgattgtctgtctcccgaagcccagaaactggctgaagctagactggcggcaaagagagccgcaagggccgaagcgagggaaatcaggatgaaagagctggagaggcaacagaaggaggaagactccgagagatactcaaggcgaagtcggcgaaatacatctgcctcagatgaggacgagcgaatgagcgtcgggtctcggggttcgctccgcgtcgaagagcgtccagagaaagattttaccgaaaaggggagcagaaatatgccaggcctgtcagctgccacactagcctctctggggggaacaagctctcgacgcggtagcggggatacttccatcagtattgacactgaagcttccatcagagagattaaggacagcctcgctgaagtggaggaaaaatacaaaaaggctatggtgagtaacgcccagctagacaatgaaaaaactaactttatgtaccaagtggacacattaaaggacatgctcctggaactggaggagcagctggccgagtctcgcaggcagtacgaggagaaaaataaagagtttgagcgggaaaaacatgcacatagtatattgcagtttcagttcgctgaagtcaaggaagcactcaaacaacgggaggaaatgctggaaaagcacgggatcatactcaatagtgagattgctacaaatggggagacaagcgacacactgaacaatgtcggttaccagggacccactaagatgacaaaggaagagctcaacgctctgaaatctactggagacggcacactgggacgcgcttctgaggtggaggtgaaaaacgagattgttgctaatgtggggaagagagagattctgcataatacagagaaggaacagcacactgaggacacggtcaaagattgcgtggacattgaagtgttccccgctggggagaatacagaggaccaaaaatccagtgaggacacggctccctttctcgggacactggccggtgccacttacgaagagcaggtacagtctcagatcctggagagctctagcctaccagagaatacagtccaggtggagtcaaacgaggtgatgggggcacctgacgacagaactcgaacgccccttgaaccgtcgaattgctggtccgatctggacggcggaaatcataccgagaacgtaggggaggcagctgtgactcaagtggaggagcaggccggaactgtagccagctgccccctgggacactctgatgacaccgtgtatcacgacgacaagtgcatggtcgaagttccccaagagctggaaacgtcaaccggccacagcctggaaaaagaatttaccaaccaagaagccgctgagcccaaggaggtgccagctcacagcacagaggtgggccgtgaccacaacgaggaggaaggagaagaaacaggattgagagatgagaaacctataaagaccgaggtgcccggatcacccgcagggactgaaggcaactgccaggaggccaccggcccttcaaccgtggacacccagaacgagcccttggacatgaaagagcctgatgaggagaagagcgaccaacagggtgaagccctcgattcctcccagaaaaaaaccaagaacaaaaagaagaaaaacaagaagaaaaaatccccagtgcctgtggagactctgaaggacgtgaaaaaagaactaacatatcaaaacacagatctgagcgagatcaaagaggaggagcaggttaaaagcaccgacagaaagtcagcagtggaggcacagaacgaggtgacggaaaaccccaaacagaaaatcgcagccgaaagcagcgaaaatgttgactgtccagagaacccgaagataaaattggatggcaagttggaccaggagggagatgatgtgcagaccgccgcagaagaggtgcttgcggatggcgatacactggacttcgaagacgacacggtgcaaagtagcgggccacgggcaggcggagaagaactcgacgagggggtggccaaggacaatgctaaaatcgatggtgctacacagtcgagtccagccgagcctaaaagcgaggacgccgaccgctgcacactgcccgaacacgaaagcccatcacaggatatcagcgacgcctgtgaggccgagtcaaccgagaggtgcgagatgtccgaacacccgagccaaaccgtaaggaaggcactagactccaacagcttggaaaacgatgatctgtccgcccctggtcgtgagcccggacatttcaatcccgagagccgagaagacacgagagggggtaacgagaagggaaagtcaaaggaggattgtaccatgtcatag

SEQ ID NO: 149115 - DNA, 2355 bp, Artificial Sequence
  derived and/or modified sequence
atgaccagccccgccgccgcccagagcagagagatcgactgcctgagccccgaggcccagaagctggccgaggccagactggccgccaagagagccgccagagccgaggccagagagatcagaatgaaggagctggagagacagcagaaggaggaggacagcgagagatacagcagaagaagcagaagaaacaccagcgccagcgacgaggacgagagaatgagcgtgggcagcagaggcagcctgagagtggaggagagacccgagaaggacttcaccgagaagggcagcagaaacatgcccggcctgagcgccgccaccctggccagcctgggcggcaccagcagcagaagaggcagcggcgacaccagcatcagcatcgacaccgaggccagcatcagagagatcaaggacagcctggccgaggtggaggagaagtacaagaaggccatggtgagcaacgcccagctggacaacgagaagaccaacttcatgtaccaggtggacaccctgaaggacatgctgctggagctggaggagcagctggccgagagcagaagacagtacgaggagaagaacaaggagttcgagagagagaagcacgcccacagcatcctgcagttccagttcgccgaggtgaaggaggccctgaagcagagagaggagatgctggagaagcacggcatcatcctgaacagcgagatcgccaccaacggcgagaccagcgacaccctgaacaacgtgggctaccagggccccaccaagatgaccaaggaggagctgaacgccctgaagagcaccggcgacggcaccctgggcagagccagcgaggtggaggtgaagaacgagatcgtggccaacgtgggcaagagagagatcctgcacaacaccgagaaggagcagcacaccgaggacaccgtgaaggactgcgtggacatcgaggtgttccccgccggcgagaacaccgaggaccagaagagcagcgaggacaccgcccccttcctgggcaccctggccggcgccacctacgaggagcaggtgcagagccagatcctggagagcagcagcctgcccgagaacaccgtgcaggtggagagcaacgaggtgatgggcgcccccgacgacagaaccagaacccccctggagcccagcaactgctggagcgacctggacggcggcaaccacaccgagaacgtgggcgaggccgccgtgacccaggtggaggagcaggccggcaccgtggccagctgccccctgggccacagcgacgacaccgtgtaccacgacgacaagtgcatggtggaggtgccccaggagctggagaccagcaccggccacagcctggagaaggagttcaccaaccaggaggccgccgagcccaaggaggtgcccgcccacagcaccgaggtgggcagagaccacaacgaggaggagggcgaggagaccggcctgagagacgagaagcccatcaagaccgaggtgcccggcagccccgccggcaccgagggcaactgccaggaggccaccggccccagcaccgtggacacccagaacgagcccctggacatgaaggagcccgacgaggagaagagcgaccagcagggcgaggccctggacagcagccagaagaagaccaagaacaagaagaagaagaacaagaagaagaagagccccgtgcccgtggagaccctgaaggacgtgaagaaggagctgacctaccagaacaccgacctgagcgagatcaaggaggaggagcaggtgaagagcaccgacagaaagagcgccgtggaggcccagaacgaggtgaccgagaaccccaagcagaagatcgccgccgagagcagcgagaacgtggactgccccgagaaccccaagatcaagctggacggcaagctggaccaggagggcgacgacgtgcagaccgccgccgaggaggtgctggccgacggcgacaccctggacttcgaggacgacaccgtgcagagcagcggccccagagccggcggcgaggagctggacgagggcgtggccaaggacaacgccaagatcgacggcgccacccagagcagccccgccgagcccaagagcgaggacgccgacagatgcaccctgcccgagcacgagagccccagccaggacatcagcgacgcctgcgaggccgagagcaccgagagatgcgagatgagcgagcaccccagccagaccgtgagaaaggccctggacagcaacagcctggagaacgacgacctgagcgcccccggcagagagcccggccacttcaaccccgagagcagagaggacaccagaggcggcaacgagaagggcaagagcaaggaggactgcaccatgagctag

SEQ ID NO: 149116 - protein, 696 aa, Artificial Sequence
  derived and/or modified sequence
MKFAEHLSAHITPEWRKQYIQYEAFKDMLYSAQDQAPSVEVTDEDTVKRYFAKFEEKFFQTCEKELAKINTFYSEKLAEAQRRFATLQNELQSSLDAQKESTGVTTLRQRRKPVFHLSHEERVQHRNIKDLKLAFSEFYLSLILLQNYQNLNFTGFRKILKKHDKILETSRGADWRVAHVEVAPFYTCKKINQLISETEAVVTNELEDGDRQKAMKRLRVPPLGAAQPAPAWTTFRVGLFCGIFIVLNITLVLAAVFKLETDRSIWPLIRIYRGGFLLIEFLFLLGINTYGWRQAGVNHVLIFELNPRSNLSHQHLFEIAGFLGILWCLSLLACFFAPISVIPTYVYPLALYGFMVFFLINPTKTFYYKSRFWLLKLLFRVFTAPFHKVGFADFWLADQLNSLSVILMDLEYMICFYSLELKWDESKGLLPNNSEESGICHKYTYGVRAIVQCIPAWLRFIQCLRRYRDTKRAFPHLVNAGKYSTTFFMVTFAALYSTHKERGHSDTMVFFYLWIVFYIISSCYTLIWDLKMDWGLFDKNAGENTFLREEIVYPQKAYYYCAIIEDVILRFAWTIQISITSTTLLPHSGDIIATVFAPLEVFRRFVWNFFRLENEHLNNCGEFRAVRDISVAPLNADDQTLLEQMMDQDDGVRNRQKNRSWKYNQSISLRRPRLASQSKARDTKVLIEDTDDEANT

SEQ ID NO: 149117 - DNA, 2091 bp, Artificial Sequence
  derived and/or modified sequence
atgaagttcgccgagcacctgagcgcccacatcacccccgagtggagaaagcagtacatccagtacgaggccttcaaggacatgctgtacagcgcccaggaccaggcccccagcgtggaggtgaccgacgaggacaccgtgaagagatacttcgccaagttcgaggagaagttcttccagacctgcgagaaggagctggccaagatcaacaccttctacagcgagaagctggccgaggcccagagaagattcgccaccctgcagaacgagctgcagagcagcctggacgcccagaaggagagcaccggcgtgaccaccctgagacagagaagaaagcccgtgttccacctgagccacgaggagagagtgcagcacagaaacatcaaggacctgaagctggccttcagcgagttctacctgagcctgatcctgctgcagaactaccagaacctgaacttcaccggcttcagaaagatcctgaagaagcacgacaagatcctggagaccagcagaggcgccgactggagagtggcccacgtggaggtggcccccttctacacctgcaagaagatcaaccagctgatcagcgagaccgaggccgtggtgaccaacgagctggaggacggcgacagacagaaggccatgaagagactgagagtgccccccctgggcgccgcccagcccgcccccgcctggaccaccttcagagtgggcctgttctgcggcatcttcatcgtgctgaacatcaccctggtgctggccgccgtgttcaagctggagaccgacagaagcatctggcccctgatcagaatctacagaggcggcttcctgctgatcgagttcctgttcctgctgggcatcaacacctacggctggagacaggccggcgtgaaccacgtgctgatcttcgagctgaaccccagaagcaacctgagccaccagcacctgttcgagatcgccggcttcctgggcatcctgtggtgcctgagcctgctggcctgcttcttcgcccccatcagcgtgatccccacctacgtgtaccccctggccctgtacggcttcatggtgttcttcctgatcaaccccaccaagaccttctactacaagagcagattctggctgctgaagctgctgttcagagtgttcaccgcccccttccacaaggtgggcttcgccgacttctggctggccgaccagctgaacagcctgagcgtgatcctgatggacctggagtacatgatctgcttctacagcctggagctgaagtgggacgagagcaagggcctgctgcccaacaacagcgaggagagcggcatctgccacaagtacacctacggcgtgagagccatcgtgcagtgcatccccgcctggctgagattcatccagtgcctgagaagatacagagacaccaagagagccttcccccacctggtgaacgccggcaagtacagcaccaccttcttcatggtgaccttcgccgccctgtacagcacccacaaggagagaggccacagcgacaccatggtgttcttctacctgtggatcgtgttctacatcatcagcagctgctacaccctgatctgggacctgaagatggactggggcctgttcgacaagaacgccggcgagaacaccttcctgagagaggagatcgtgtacccccagaaggcctactactactgcgccatcatcgaggacgtgatcctgagattcgcctggaccatccagatcagcatcaccagcaccaccctgctgccccacagcggcgacatcatcgccaccgtgttcgcccccctggaggtgttcagaagattcgtgtggaacttcttcagactggagaacgagcacctgaacaactgcggcgagttcagagccgtgagagacatcagcgtggcccccctgaacgccgacgaccagaccctgctggagcagatgatggaccaggacgacggcgtgagaaacagacagaagaacagaagctggaagtacaaccagagcatcagcctgagaagacccagactggccagccagagcaaggccagagacaccaaggtgctgatcgaggacaccgacgacgaggccaacacctag

SEQ ID NO: 149118 - DNA, 2091 bp, Artificial Sequence
  derived and/or modified sequence
atgaagtttgccgagcatttgtcagcacacataacgcctgagtggcggaagcagtatatccagtacgaggcgtttaaagatatgttatacagcgcccaggatcaagccccgagcgtggaagtgactgacgaagatacagtgaaaaggtatttcgccaagtttgaagaaaaattcttccagacttgtgaaaaagaactggccaagatcaataccttctactctgagaaattagctgaggctcaaaggagatttgcaacactacagaatgagttgcagagctcactcgacgcccagaaggagagcacaggggtgaccaccctacggcagcgccgcaagcctgtttttcacctgtcccacgaggaaagagtgcaacatagaaatattaaagacctgaaactagcctttagtgagttctatctctcactgatcctcctgcagaattaccagaacctgaacttcacaggcttccggaagattctcaaaaagcatgacaaaattctggaaaccagtaggggggctgactggcgcgtcgcacacgtagaagtggcacccttttacacttgcaaaaagataaaccagctgatttctgagactgaggcagttgttactaatgagcttgaggacggcgatcgccaaaaagctatgaagcgactgcgggtgcccccactgggtgcggcccagcccgcccccgcgtggacaacctttcgagtgggcctcttttgtgggatctttatagtcttgaatattacgctcgtgcttgcggctgtgttcaagctggaaaccgatcggagcatttggcccttgatccgtatataccgcggtggtttcctgctgattgagtttctgtttctcttgggtatcaatacctatgggtggaggcaggctggtgtgaatcatgttttaatatttgaactgaatccacggagtaatctctcgcatcaacacctgttcgagattgcaggatttctgggcattctgtggtgtctctctctgctcgcctgtttttttgcccctatatcagtcatacccacatacgtgtacccattggctctctacggtttcatggttttcttccttatcaatccaacaaaaaccttttactataagagtagattctggctcctcaaacttctgttccgtgtattcaccgcaccctttcacaaagttggcttcgccgatttctggctggcggaccagctgaactctctttcagtgatactcatggaccttgaatatatgatctgtttctacagcttagagttgaaatgggatgagagcaaggggctgttgccgaacaacagcgaagagagcggaatctgccacaaatacacatatggtgttagggcgatcgtccagtgtatccctgcatggttaaggttcattcaatgtcttagacgttatcgggatacgaaacgtgccttccctcacctggttaacgccggcaagtacagcacaaccttcttcatggtaactttcgccgccctctacagtactcacaaggagagagggcactctgatacgatggtgttcttttacctgtggatagtcttttacattatttccagctgttatacattgatttgggatctaaagatggattggggactgtttgataagaacgcgggagagaacacattcttgagagaagagattgtgtatccacagaaggcctactattattgcgccattatcgaagatgtcatccttcgttttgcttggacaatccagatatcaataacaagcacaacattgctgccccactctggggatatcatcgccaccgtctttgcaccactggaggtttttcgccggttcgtttggaatttttttcgacttgagaatgaacacctgaacaactgcggagagttccgagcagtgagggatattagtgtggctcctctgaacgcggatgaccagacactgttggagcaaatgatggaccaagacgatggcgtgcgaaaccgccagaaaaaccggagctggaagtataatcagagcataagcctcaggagacctaggctcgcatcacagtcgaaggccagagatacgaaggttcttatagaggacactgacgatgaagcgaacacctag

SEQ ID NO: 149119 - DNA, 2091 bp, Artificial Sequence
  derived and/or modified sequence
atgaagtttgctgagcacctgagcgcccacatcaccccagagtggaggaagcagtacatccagtatgaggccttcaaggacatgctgtacagcgcccaggaccaggcccccagcgtggaggtgacagatgaggacacagtgaagcgctactttgccaagtttgaggagaagttcttccagacctgtgagaaggagctggccaagatcaacaccttctacagcgagaagctggccgaggcccagaggagatttgccaccctgcagaatgagctgcagagcagcctggatgcccagaaggagagcactggagtgaccaccctgcggcagaggaggaagcctgtgttccacctgagccatgaggagcgggtgcagcacaggaacatcaaggacctgaagctggccttcagcgagttctacctgagcctcatcctgctgcagaactaccagaacctgaacttcaccggcttcaggaagatcctgaagaagcatgacaagatcctggagaccagcagaggagctgactggagggtggcccacgtggaggtggcccccttctacacctgcaagaagatcaaccagctgatcagcgagacagaggccgtggtgaccaatgagctggaggatggagaccggcagaaggccatgaagaggctgcgggtgccccccctgggcgccgcccagcctgccccagcctggaccaccttccgggtgggcctcttctgtggcatcttcatcgtgctgaacatcaccctggtgctggccgctgtgttcaagctggagacagacaggagcatctggcccctcatccgcatctaccggggcggcttcctgctgattgagttcctgttcctgctgggcatcaacacctacggctggaggcaggccggcgtgaaccacgtgctgatctttgagctgaaccccaggagcaacctgagccaccagcacctgtttgaaattgctggcttcctgggcatcctgtggtgcctgagcctgctggcctgcttctttgcccccatcagcgtcatccccacctacgtgtaccccctggccctgtatggcttcatggtgttcttcctgatcaaccccaccaagaccttctactacaagagccgcttctggctgctgaagctgctcttccgggtcttcaccgcccccttccacaaggtgggctttgctgacttctggctggccgaccagctgaacagcctgagcgtcatcctgatggacctggagtacatgatctgcttctacagcctggagctgaagtgggatgagagcaagggcctgctgcccaacaacagcgaggagagcggcatctgccacaagtacacctatggagtgcgggccatcgtgcagtgcatcccagcctggctgcgcttcatccagtgcctgcggcgctacagagacaccaagagggccttcccccacctggtgaatgctgggaagtacagcaccaccttcttcatggtgacctttgctgccctgtacagcacccacaaggagcggggccacagcgacaccatggtgttcttctacctgtggatcgtgttctacatcatcagcagctgctacaccctcatctgggacctgaagatggactggggcctgtttgacaagaatgctggggagaacaccttcctgcgggaggagatcgtgtacccccagaaggcctactactactgtgccatcattgaagatgtgatcctgcgctttgcctggaccatccagatcagcatcaccagcaccaccctgctgccccacagcggggacatcatcgccaccgtgtttgcccccctggaggtgttcagaagatttgtgtggaacttcttccggctggagaatgagcacctgaacaactgtggggagttccgggctgtgcgggacatctctgtggcccccctgaatgctgatgaccagaccctgctggagcagatgatggaccaggatgatggagtgaggaaccggcagaagaacagatcctggaagtacaaccagagcatcagcctgcggcggccccggctggccagccagagcaaggcccgggacaccaaggtgctgattgaggacacagatgatgaggccaacacctag

SEQ ID NO: 149120 - DNA, 2091 bp, Artificial Sequence
  derived and/or modified sequence
atgaagttcgccgagcacctgagcgcccacatcacccccgagtggagaaagcagtacatacaatacgaagctttcaaggatatgttgtacagcgcgcaggatcaggcaccttcggttgaggtgacagatgaggacacggtcaaacgatactttgcaaagttcgaggaaaagttcttccagacctgtgaaaaggaattggcaaagataaacacgttctacagcgagaagttagctgaggcccagcggaggttcgctaccctgcagaatgagctgcagagcagcctcgacgcccagaaggagtctaccggggttacgacactgaggcaaagacgtaaaccagtctttcacttgtctcatgaggagagggttcagcacagaaatataaaggacctgaaactggccttctccgagttttacctgtcgcttatcctgctgcagaactaccagaaccttaacttcaccggcttccgcaagatccttaagaagcatgataaaattctcgagacgagcaggggagcagactggagagtggcgcacgtagaagtagcaccattctacacatgcaaaaaaatcaaccagcttataagtgaaaccgaagctgtggtgaccaatgagctggaggatggcgaccgccagaaagcaatgaaacgactgcgcgtgccacccttgggtgcagctcagcctgcccctgcatggactacattccgcgtgggtcttttctgtgggatcttcatcgtcctgaatataaccttggtgctcgcggccgtttttaaacttgagactgaccgctcaatttggcccctcattcgaatctatcgaggaggctttctcctaatcgagttcctgttccttttgggtattaacacatacggatggaggcaggcaggggtcaaccatgtgctcatcttcgagctcaatccgcgttcaaatttatctcaccaacacttgtttgagatcgccggcttcctgggtattctctggtgcctctcgctcttagcgtgctttttcgcgcctatatctgtgatccccacctatgtctatccactcgccctttacggctttatggttttcttcttaattaatccgacaaagactttttactataaaagtaggttttggttactcaagctgttgttccgcgtgtttacagccccctttcacaaggttgggttcgctgacttttggttggcggatcagcttaactctctcagcgtgattttgatggacctggaatatatgatctgtttctattctttggagctaaagtgggatgaaagtaagggtttgctgcctaacaactctgaggaaagcggaatctgccacaagtacacatatggtgttagagcgattgtgcagtgtatcccagcttggcttcgttttatccaatgtttgcggaggtatcgtgacacgaaacgggcctttccacacttggtgaatgctggcaagtacagtactacattctttatggtcaccttcgccgccttatactccacccataaggagaggggacactcggatacaatggtcttcttttatttgtggattgttttctacatcatcagcagctgctacaccctaatctgggatctgaagatggattggggcctcttcgacaaaaacgccggggagaacacctttttgcgggaagagattgtgtacccccagaaagcatactactactgcgctatcatcgaagacgtgatcttacggttcgcctggaccatccagattagcatcacctccaccaccctgttgccccactcaggcgatatcatcgcgacagtcttcgcccccctcgaggtgtttaggcgtttcgtgtggaacttctttagattggagaacgagcatcttaataactgtggagagtttcgtgcagtgcgcgatatatctgtggcccccctgaatgccgatgatcagactctgttggaacagatgatggaccaggatgatggggtgcgaaatcgtcagaagaaccggtcttggaagtacaatcagtctatctccctgaggagacctcggctggcctcccagagtaaggccagggacacaaaagtactgattgaagacaccgatgatgaggcgaatacctag

SEQ ID NO: 149121 - DNA, 2091 bp, Artificial Sequence
  derived and/or modified sequence
atgaagtttgctgagcacctttctgcccatattacacccgagtggaggaaacagtatattcagtatgaggctttcaaggatatgctgtattctgcgcaggaccaggcccctagtgtcgaagtcacagacgaggacacggtcaagcgatattttgccaagtttgaggagaagttcttccagacctgcgagaaagaactggccaagatcaataccttttattccgaaaagctagctgaagcccagaggcgctttgctaccttacagaatgaactgcagtcaagcctcgacgcacaaaaggagtctacaggagtcacaacactcaggcagaggagaaagccggtgtttcatttgtctcatgaggagcgcgtgcaacaccggaacataaaagatctcaaacttgctttcagcgaattttacctatcactcatattactccagaattatcagaacctgaactttaccggattccgcaaaatcttgaagaagcacgacaaaatcctggagacgtcacggggagccgactggagggtggctcacgtagaggtagccccattttacacgtgtaaaaaaatcaaccagctgatatcagaaacagaagcagttgtcaccaatgagctggaagatggcgaccgacagaaggcaatgaagagattacgggtcccgcctcttggagccgctcaaccggctcccgcttggaccacatttagggtcgggttattttgcggaatttttatcgtcctgaacatcaccttagtgctggctgcagtttttaaacttgagaccgatcgaagtatctggccactgattcggatctatagagggggattcctgctgatcgagttcttattcctgttagggatcaatacctatggttggagacaagcaggagtaaaccatgtgttgatcttcgaactgaatcctcgctccaatctgtcacaccagcacctatttgaaatcgctggttttctggggatcctgtggtgtctttccctgctggcgtgcttttttgctcccatttccgtgatccctacctacgtgtatcccctggcgctgtacggttttatggtgttttttttgattaaccccacaaaaaccttttattataaatctagattttggctgttaaagctgctttttcgtgttttcactgccccttttcataaagttgggtttgcagatttctggctggctgaccagctgaactcacttagcgtgatccttatggacctggaatacatgatctgtttctattctctggaactgaagtgggacgaatccaagggcctattaccgaataacagtgaggaatctggcatttgccacaaatatacctatggagtgcgggcaattgtacagtgtatcccagcctggttgagatttattcaatgtctccgccgataccgcgataccaaaagagcctttccacatcttgttaatgctggtaagtattctactaccttctttatggtgacgttcgccgctttgtattccacgcacaaagagaggggtcactccgatacaatggtgtttttttatttgtggattgtgttttacataatttcctcctgctacacactgatctgggatctgaaaatggactggggcttgttcgataagaacgccggagagaatacatttctgcgcgaagagatcgtatatccccagaaagcttactattactgtgcaatcatcgaggacgtgattttgcggttcgcctggactattcagatctccattacctccaccacgctgttgccgcactctggcgacattatagccaccgtctttgccccattagaggtcttcaggcggttcgtgtggaacttctttagactggagaatgaacacctcaacaactgcggagagtttcgggcagtgagagatatcagcgtagcccctctcaacgcggacgatcagacacttctggagcagatgatggatcaggatgatggcgtcaggaataggcagaaaaaccggtcatggaaatataaccaatcaatttcgctgagaagacccagactggcttcgcagagtaaggcccgtgataccaaggtgctgatagaagatacagatgatgaagcaaacacctag

SEQ ID NO: 149122 - DNA, 8474 bp, Artificial Sequence
  derived and/or modified sequence
gcggggaggggcggggctatggagaggaggaggaagatggcgggcgggctgctctgaagagacctcggcggcggcggaggaggagagaagcgcagcgccgcgccgcgccggggcccatgtggggaggagtcggagtcgctgttgccgccgccgcctgtagctgctggacccgagtgggagtgagggggaaacggcaggatgaagttcgccgagcacctctccgcgcacatcactcccgagtggaggaagcaatacatccagtatgaggctttcaaggatatgctgtattcagctcaggaccaggcaccttctgtggaagttacagatgaggacacagtaaagaggtattttgccaagtttgaagagaagtttttccaaacctgtgaaaaagaacttgccaaaatcaacacattttattcagagaagctcgcagaggctcagcgcaggtttgctacacttcagaatgagcttcagtcatcactggatgcacagaaagaaagcactggtgttactacgctgcgacaacgcagaaagccagtcttccacttgtcccatgaggaacgtgtccaacatagaaatattaaagaccttaaactggccttcagtgagttctacctcagtctaatcctgctgcagaactatcagaatctgaattttacagggtttcgaaaaatcctgaaaaagcatgacaagatcctggaaacatctcgtggagcagattggcgagtggctcacgtagaggtggccccattttatacatgcaagaaaatcaaccagcttatctctgaaactgaggctgtagtgaccaatgaacttgaagatggtgacagacaaaaggctatgaagcgtttacgtgtcccccctttgggagctgctcagcctgcaccagcatggactacttttagagttggcctattttgtggaatattcattgtactgaatattacccttgtgcttgccgctgtatttaaacttgaaacagatagaagtatatggcccttgataagaatctatcggggtggctttcttctgattgaattcctttttctactgggcatcaacacgtatggttggagacaggctggagtaaaccatgtactcatctttgaacttaatccgagaagcaatttgtctcatcaacatctctttgagattgctggattcctcgggatattgtggtgcctgagccttctggcatgcttctttgctccaattagtgtcatccccacatatgtgtatccacttgccctttatggatttatggttttcttccttatcaaccccaccaaaactttctactataaatcccggttttggctgcttaaactgctgtttcgagtatttacagcccccttccataaggtaggctttgctgatttctggctggcggatcagctgaacagcctgtcagtgatactgatggacctggaatatatgatctgcttctacagtttggagctcaaatgggatgaaagtaagggcctgttgccaaataattcagaagaatcaggaatttgccacaaatatacatatggtgtgcgggccattgttcagtgcattcctgcttggcttcgcttcatccagtgcctgcgccgatatcgagacacaaaaagggcctttcctcatttagttaatgctggcaaatactccacaactttcttcatggtgacgtttgcagccctttacagcactcacaaagaacgaggtcactcggacactatggtgttcttttacctgtggattgtcttttatatcatcagttcctgctataccctcatctgggatctcaagatggactggggtctcttcgataagaatgctggagagaacactttcctccgggaagagattgtatacccccaaaaagcctactactactgtgccataatagaggatgtgattctgcgctttgcttggactatccaaatctcgattacctctacaactttgttgcctcattctggggacatcattgctactgtctttgccccacttgaggttttccggcgatttgtgtggaacttcttccgcctggagaatgaacatctgaataactgtggtgaattccgtgctgtgcgggacatctctgtggcccccctgaacgcagatgatcagactctcctagaacagatgatggaccaggatgatggggtacgaaaccgccagaagaatcggtcatggaagtacaaccagagcatatccctgcgccggcctcgcctcgcttctcaatccaaggctcgtgacactaaggtattgatagaagacacagatgatgaagctaacacttgaattttctgaagtctagcttaacatctttggttttcctactctacaatcctttcctcgaccaacgcaacctctagtacctttccagccgaaaacaggagaaaacacataacacattttccgagctcttccggatcggatcctatggactccaaacaagctcactgtgtttcttttcttttcttctggtttaattttaattttctattttcaaaacaaatatttacttcatttgccaatcagaggatgttttaagaaacaaaacatagtatcttatggattgtttacaatcacaaggacatagatacctatcaggatgaagaacaggcattgcaaggaccctctgatgggacggtactgagatatctcggcttccgctcagcccggttttgactggttgaaaccggacattggtttttaaattttttgtcagtttatgtggagaatttttttctttccttcatacccagcgcaaaggcactggccgcacttgcaggaaaagtgcaacttaaagcagtaccttcattcatgaagctactttttaatttgatgtaacttttcttattttgggaagggttgctgggtgggtgggaaatatgatgtatttgttacacatagttttctcattatttatgaaacttaaccatacagaatgatataactcctgtgcaatgaaggtgataacagtaaaagaaggcaggggaaacttacgttggatgacatttatgagggtcagtcccacatacctctttcaggagacaacttgcaccagtttgaccttttcttttctttgtttttattttaagccaaagtttcattgctaacttcttaagttgctgctgctttagagtcctgagcatatctctcataacaaggaatcccacacttcacaccaccggctgaatttcatggaagaggttctgataatttttttaactttttaaggaacagatgtggaatacactggcccatatttcaaccttaacagctgaagctatgccttattatgcatccacatgtatggtccctgtagcgtgacctttactagctctgaatcagaagacagagctatttcagaggctctgtgtgccctcactagatagtttttcttctgggttcaaccactttagccagaatttgatcaaattaaaagtctgtcatggggaaactatatttttgagcacatggaacaaattatacttcctcattcatattatgttgatacaaaagaccttggcagccatttctcccagcagttttaaaggatgaacattggatttcatgccatcccatagaaaacctgttttaaaattttagggatctttacttggtcatacatgaaaagtacactgcttagaaattatagactattatgatctgtccacagtgcccattgtcacttctttgtctcatttcttccctttgttccttagtcatccaaataagcctgaaaaccataagagatattactttattgaatatggttggcattaaatttagcatttcattatctaacaaaattaatataaattccaggacatggtaaaatgtgttttaataacccccagacccaaatgaaaatttcaaagtcaataccagcagattcatgaaagtaaatttagtcctataattttcagcttaattataaacaaaggaacaaataagtggaagggcagctattaccattcgcttagtcaaaacattcggttactgccctttaatacactcctatcatcagcacttccaccatgtattacaagtcttgacccatccctgtcgtaactccagtaaaagttactgttactagaaaatttttatcaattaactgacaaatagtttctttttaaagtagtttcttccatctttattctgactagcttccaaaatgtgttccctttttgaatcgaggtttttttgttttgttttgttttctgaaaaaatcatacaactttgtgcttctattgcttttttgtgttttgttaagcatgtcccttggcccaaatggaagaggaaatgtttaattaatgctttttagtttaaataaattgaatcatttataataatcagtgttaacaatttagtgacccttggtaggttaaaggttgcattatttatacttgagatttttttcccctaactattctgttttttgtactttaaaactatgggggaaatatcactggtctgtcaagaaacagcagtaattattactgagttaaattgaaaagtccagtggaccaggcatttcttatataaataaaattggtggtactaatgtgtatccagagacatttgaattattaactttattctttattagtgaatctctatgatggcacacataaaatcttacagttgacttctgctgtttgaattccccagtgtttttacattaatgtatcctatggccagtttagtctttcttcaactgttacagttctaggccctaatcggtcttattctttcacatatgatgcaatgatagatgtaatccttttctgaagtgtttgtcggattggcatagtctattcaaaaataaggcttatgtaactttcagcttgctatgtgacagaagtttaaatgtgtatttaagtacacagctttatgttcctcttaaagctgtaaagagaaaagaggacttttcctcatcaagagagcttgggagacaaagcatacatttaatttttttctttcaaaaaaggcaatgtgcactttcctctcctaaattttatatgccctagcagttgcgaatgttgtgtccaccttacaatttgattggaggctcccatacactgaaactctcaatagaattcttaaaaatgaacatcagctgggcgcagtggctcacgtctgtaatcccagcactttgggaggccaaggtgggcagatcacgagctcaggagttcgagaccagcctgaccaacatggtgaaaccccgtctctactaaaaatacaaaaattagctgggcgtggtggcgcatgcctgtaatcccagctactcaggagactgaggcaggagaattgcttaaacctgggaagcagaggttgcagtgagactagatcatgccactgcactccactgccactgcctgggcaacagagcaagactccatctcaaaaacaaacaaaaaaaatcacagactcattttaaaggagcagcaacctaaccaaatacaaacttcatttgattttaggtttagaaattctagttttattttggagaatcactcagtttttaatatcaattaaaatagtcctcaaaggaatgaagaggaagtctaaataaatgaataaaactcatttttcattttatggtagtatagaaagcattgatgtgtgtagagaaattaaaagacaagagtggtttactgtctatgcacaaatgagtgcctatatttaaggctgcctataccattacagtggcgtaattggtgatttcatagcatacagagaaacaatgaaatcaaagattaaatcattaggttatgatggtcatttgtaagattggaaagtagtcaaaaacccatgtgcaactttttttcagcactctaccattaggctccttaggcaagctgcttaacttccgtcagaagcaaaggtgtgggagaacaccattcacctcagtagtaacttataaaaaccgtttaaagaaggaaaatgggccccagcccctaggatccctgacttcctgatattctaaacatgagagttctgtgactttaactgagctctttaccagaagtaacgtgttgatgtatattatctttccaccatgctttgaccaaagtacattcacagtaactagagaaagcagatcatccatttctggataggtgaactacggcaaggtaagaacagaaaaaagtaaagtagtattgagtcatgcaggtatcagattaacagacattcattgaagataagtgaaataactttggagatagcagagaagagcaagaagatgttggacgttggcagtaagccgcagcaaggcagttaggaaagtacgtgagcctgatgacgcgaaggtgatgcctccatctgtccgcttagtggttattaaattgctgggaaagacctgcctttattttcctatcatcttttccccattactttgcattattcaggaaataattatttattcccaaatgcagttttctaagcagtgaccacaaaaatttcttattctaaggaaaataattaagaaaataaccctatctgtggcattgttttaaaatgtgggatacaaatctggtaagcagatttcaggtcattattgttttcttttaatggtttacatgaaattttcctctcaaaaaacaagtacctcttactgtataacatttgagtttttaaaattgagatagcttctgagagaaaaaaagaaagttgaatttgtagctctctcaactacaaaatcaccacacttttctcaaatctaataggaattcagtgtcattacagatacggtctctagtgaccaggtgaagacaattgaagctttggtagaacttctgcaaaagttaggtaaagaagaataaatccaatttatcagctttgttcatattctttttctgagtgatctaaatttttcttgcttgtgatcattagctaagacaaggagtgttaaaggttttctaaatgcaaacacatacgtttctgcatttcagaagtcagtcttgatagtaaatcctacaaactctcaactttctgcattgtattttaagtctatacaatgttagagcacatggtaatgtgggacagagttgattatatgatagcatgagaaatttgcactggttggtgttacaaaccaatgatctaaccagcatactctccaaatatgaaaaagtaaaaacatctcattaggtttggaagagcctaaggtagtccatacaggaagtttgcctgagaacagagaggagcctgttgattggcatggctcatgatgcctttcttgtatgaattatcaaaactgatactgagttgcccctagaaaacagccttccagaatatgtttgcttatttatggtggaagaggaagtgagaacaagatgagagtttcccttaaagtgaggagaatcattatacaactttgcaactgaagtatgtttccttgtagcaaacctttggtttattttatcgtcaaatcaaagccaccctcagttttttgtatggtgccatcaacctaaggaggacaatcaaataacctattgtttgccttggattcagtatatctactaagtacacagtctcgtataccttcaaaccagttacttgactaaacttccaccatattaccttagttcttcctatgccctttcctctgtgccaccacaaatcagagggaaagactgcagtacttctagaaagttgtggacttctaagaaagagccaggcttccatctcactatcccttgatcattatctctgaagtccctacctgcacttccctgattgccctgtagcaacaccagcatggtgggaattggagggaaagattgtggaaaatccctaaagggtcattgttcatgacgttattttgaattgtaaaattgtgagccactcacatttcaattacaaaaagaacagaactcttaatcacgttgtgaagattaatttcttgccattttctggattagcacagaagcttgtatcaatgaagagtatttaggaggggaatagggggaaaattgtatttttctgttcaaactctctccttctatttgtgtttccttcacccctctccctccaccacactgtgttggtcaaatgatactattctatgaaaccctgagctatagttgtcaaaagtaactatggattgtgattagtcctctgtgggtgcttccttccctcttttttctccctcactctctttctcagtctccactctggtaaatggaaaaggtgatgtcgaagaattgatgcttgcttggactcatgttgtatctgtgactatgctattagctgtctcctttttccttcctatatgggtagaattcttatgacttatgaagttcccttcttgataagtaggttaaatgcacaatgtggtactgttttatagtttctagatggttgtataaagcaaaaagttaatgtggttatgtgtttttaaagaaaataagtgattggtcactaaactctgtccttttttcattattacaatttctctctgttttccaaca

SEQ ID NO: 149123 - protein, 243 aa, Artificial Sequence
  derived and/or modified sequence
MAKVEQVLSLEPQHELKFRGPFTDVVTTNLKLGNPTDRNVCFKVKTTAPRRYCVRPNSGIIDAGASINVSVMLQPFDYDPNEKSKHKFMVQSMFAPTDTSDMEAVWKEAKPEDLMDSKLRCVFELPAENDKPHDVEINKIISTTASKTETPIVSKSLSSSLDDTEVKKVMEECKRLQGEVQRLREENKQFKEEDGLRMRKTVQSNSPISALAPTGKEEGLSTRLLALVVLFFIVGVIIGKIAL

SEQ ID NO: 149124 - DNA, 732 bp, Artificial Sequence
  derived and/or modified sequence
atggccaaggtggagcaggtgctgagcctggagccccagcacgagctgaagttcagaggccccttcaccgacgtggtgaccaccaacctgaagctgggcaaccccaccgacagaaacgtgtgcttcaaggtgaagaccaccgcccccagaagatactgcgtgagacccaacagcggcatcatcgacgccggcgccagcatcaacgtgagcgtgatgctgcagcccttcgactacgaccccaacgagaagagcaagcacaagttcatggtgcagagcatgttcgcccccaccgacaccagcgacatggaggccgtgtggaaggaggccaagcccgaggacctgatggacagcaagctgagatgcgtgttcgagctgcccgccgagaacgacaagccccacgacgtggagatcaacaagatcatcagcaccaccgccagcaagaccgagacccccatcgtgagcaagagcctgagcagcagcctggacgacaccgaggtgaagaaggtgatggaggagtgcaagagactgcagggcgaggtgcagagactgagagaggagaacaagcagttcaaggaggaggacggcctgagaatgagaaagaccgtgcagagcaacagccccatcagcgccctggcccccaccggcaaggaggagggcctgagcaccagactgctggccctggtggtgctgttcttcatcgtgggcgtgatcatcggcaagatcgccctgtag

SEQ ID NO: 149125 - DNA, 732 bp, Artificial Sequence
  derived and/or modified sequence
atggccaaggtggagcaggttcttagcctggaacctcagcacgaactgaaatttaggggaccctttacagacgtggtaaccactaacttaaagctgggaaaccccacagataggaacgtctgcttcaaagtaaagactaccgcaccccgacgatactgcgtccgtcccaactcgggaattatcgatgccggcgcaagcattaatgtcagtgtcatgctgcagccttttgactacgatccaaatgaaaagtcgaaacacaagtttatggtgcaatctatgttcgctccaaccgacacaagcgatatggaggccgtctggaaggaagcgaaacctgaggatctgatggatagcaagctccggtgtgtgttcgagttacctgcagagaacgataaaccgcacgacgtggaaataaacaagatcataagtaccacagcatccaagacagagactccaattgtctccaagtcactctcttccagcctggacgatacagaagtgaagaaagtgatggaagagtgcaagaggctgcagggggaggttcagcggctccgggaagaaaacaaacagtttaaagaagaggacgggctgcgcatgaggaagacggttcagagcaacagtccaatctctgctctggcccctactggtaaggaggagggcctgtccaccagattgctcgccctcgtggtgctcttttttatagtaggggtaattattggcaagatcgctctttag

SEQ ID NO: 149126 - DNA, 732 bp, Artificial Sequence
  derived and/or modified sequence
atggccaaggtggagcaggtgctgagcctggagccccagcacgagctgaagttccggggccccttcacagatgtggtgaccaccaacctgaagctgggcaaccccacagacagaaatgtgtgcttcaaggtgaagaccacagccccccggcgctactgtgtgcggcccaacagcggcatcattgatgctggggccagcatcaacgtgtctgtgatgctgcagccctttgattatgaccccaatgagaagagcaagcacaagttcatggtgcagagcatgtttgcccccacagacaccagtgacatggaggccgtgtggaaggaggccaagccagaggacctgatggacagcaagctgcgctgtgtgtttgagctgcctgcagaaaatgacaagccccatgatgtggagatcaacaagatcatcagcaccacagccagcaagacagagacccccatcgtgtccaagagcctgagcagcagcctggatgacacagaggtgaagaaggtgatggaggagtgcaagaggctgcagggcgaggtgcagaggctgcgggaggagaacaagcagttcaaggaggaggatggcctgaggatgaggaagacagtgcagagcaacagccccatcagcgccctggcccccaccgggaaggaggagggcctgagcacccggctgctggccctggtggtgctcttcttcatcgtgggcgtcatcatcggcaagatcgccctgtag

SEQ ID NO: 149127 - DNA, 732 bp, Artificial Sequence
  derived and/or modified sequence
atggccaaggtggagcaggtgctgagcctggagccccagcacgagcttaaatttcggggaccattcacagatgtagtaactactaatctgaaactcggaaatccaacggataggaatgtctgcttcaaggtgaaaacgacagccccgaggagatactgtgtccgaccaaacagcggtattatcgacgctggtgcttcaataaatgtatccgtgatgctgcagccatttgactatgatcccaatgagaagtcaaaacataaattcatggtgcagtctatgttcgcccccaccgacaccagcgatatggaagcagtgtggaaggaggctaagccagaggacctgatggattctaaactacgttgtgtgttcgagctcccagccgaaaacgataagccccacgatgtcgaaatcaataaaattatatcgacgaccgcttccaagacagagacacctatcgttagtaagtcactttcttcttcactggatgacaccgaggtgaaaaaggtaatggaggaatgtaaaagactgcagggggaggtgcagcggctgcgcgaggaaaacaaacagtttaaggaggaggacggtctaaggatgcggaagaccgtgcagagcaatagccctatttccgccttggctcctaccgggaaggaagaaggactcagtactcgacttctcgcattggtggttctcttttttattgtcggcgtcataattgggaaaatcgcactgtag

SEQ ID NO: 149128 - DNA, 732 bp, Artificial Sequence
  derived and/or modified sequence
atggcaaaagtcgagcaggtgctgtctttagagcctcagcacgagttaaagttccgcggtccttttacggacgtggtcaccacaaatctgaaattgggcaacccaacggaccgcaatgtgtgttttaaagtcaagacgacagctccacgcagatactgcgtgcggcctaatagcggaatcatagacgcaggtgcctccattaatgtgagtgttatgctgcagccatttgactatgaccccaacgaaaagagtaagcataaattcatggtacagagtatgttcgccccaaccgatactagtgatatggaggccgtatggaaggaggcaaaacccgaggacttgatggattcaaaactgcgctgcgtgtttgaacttccggcagaaaatgataaaccccacgacgtggagatcaacaaaatcatatctaccacggcatctaagacggaaacaccaattgtaagcaagagtctgtcctcctcattagacgatacggaggtaaagaaggtcatggaggaatgtaagcggttgcagggggaggtgcagaggctcagagaagaaaacaagcaatttaaggaggaagacggcttgagaatgagaaagaccgtccagtccaacagccctataagtgctctggcccctactggtaaagaggaaggcctaagcactaggcttctggctctcgtggtgttgtttttcatagtgggtgtgatcatcggcaaaattgccctctag

SEQ ID NO: 149129 - DNA, 7936 bp, Artificial Sequence
  derived and/or modified sequence
ccccgcccctggagccggcggcgcagggcgcagcttcccgccgccagagcgggccagcctgctgcgtgcgtgcgtgtgtacgactctgcgtgcgtgcgtgcgtgcgtgcgtgccgtcagctcgccgggcaccgcggcctcgccctcgccctccgcccctgcgcctgcaccgcgtagaccgacccccccccagcgcgcccacccggtagaggacccccgcccgtgccccgaccggtccccgcctttttgtaaaacttaaagcgggcgcagcattaacgcttcccgccccggtgacctctcaggggtctccccgccaaaggtgctccgccgctaaggaacatggcgaaggtggagcaggtcctgagcctcgagccgcagcacgagctcaaattccgaggtcccttcaccgatgttgtcaccaccaacctaaagcttggcaacccgacagaccgaaatgtgtgttttaaggtgaagactacagcaccacgtaggtactgtgtgaggcccaacagcggaatcatcgatgcaggggcctcaattaatgtatctgtgatgttacagcctttcgattatgatcccaatgagaaaagtaaacacaagtttatggttcagtctatgtttgctccaactgacacttcagatatggaagcagtatggaaggaggcaaaaccggaagaccttatggattcaaaacttagatgtgtgtttgaattgccagcagagaatgataaaccacatgatgtagaaataaataaaattatatccacaactgcatcaaagacagaaacaccaatagtgtctaagtctctgagttcttctttggatgacaccgaagttaagaaggttatggaagaatgtaagaggctgcaaggtgaagttcagaggctacgggaggagaacaagcagttcaaggaagaagatggactgcggatgaggaagacagtgcagagcaacagccccatttcagcattagccccaactgggaaggaagaaggccttagcacccggctcttggctctggtggttttgttctttatcgttggtgtaattattgggaagattgccttgtagaggtagcatgcacaggatggtaaattggattggtggatccaccatatcatgggatttaaatttatcataaccatgtgtaaaaagaaattaatgtatgatgacatctcacaggtcttgcctttaaattacccctccctgcacacacatacacagatacacacacacaaatataatgtaacgatcttttagaaagttaaaaatgtatagtaactgattgagggggaaaagaatgatctttattaatgacaagggaaaccatgagtaatgccacaatggcatattgtaaatgtcattttaaacattggtaggccttggtacatgatgctggattacctctcttaaaatgacacccttcctcgcctgttggtgctggcccttggggagctggagcccagcatgctggggagtgcggtcagctccacacagtagtccccacgtggcccactcccggcccaggctgctttccgtgtcttcagttctgtccaagccatcagctccttgggactgatgaacagagtcagaagcccaaaggaattgcactgtggcagcatcagacgtactcgtcataagtgagaggcgtgtgttgactgattgacccagcgctttggaaataaatggcagtgctttgttcacttaaagggaccaagctaaatttgtattggttcatgtagtgaagtcaaactgttattcagagatgtttaatgcatatttaacttatttaatgtatttcatctcatgttttcttattgtcacaagagtacagttaatgctgcgtgctgctgaactctgttgggtgaactggtattgctgctggagggctgtgggctcctctgtctctggagagtctggtcatgtggaggtggggtttattgggatgctggagaagagctgccaggaagtgttttttctgggtcagtaaataacaactgtcatagggagggaaattctcagtagtgacagtcaactctaggttaccttttttaatgaagagtagtcagtcttctagattgttcttataccacctctcaaccattactcacacttccagcgcccaggtccaagtctgagcctgacctccccttggggacctagcctggagtcaggacaaatggatcgggctgcagagggttagaagcgagggcaccagcagttgtgggtggggagcaagggaagagagaaactcttcagcgaatccttctagtactagttgagagtttgactgtgaattaattttatgccataaaagaccaacccagttctgtttgactatgtagcatcttgaaaagaaaaattataataaagccccaaaattaagaattcttttgtcattttgtcacatttgctctatggggggaattattattttatcatttttattattttgccattggaaggttaactttaaaatgagccctatcactgagaaatacgtgtttcatgatttaactctgtgtgtgtgtgtgtgtgtgtgtgtgtgtgtgtgtgtattttttttttggttgtcttcagctgacagtatgaaaaatgaaactgctgaaaaagctgagcacctggtcacccttggccttccattgctttggccttcagtaaaaagcagcctcccttctaggtcagggaaccatgccattgagactagtaacgggcgttctgggcacagtcccactgtgcacaggtttgagaggacaagttcatcagaaggaaggcagtccttagaagtcacatacgttgagccacgttgctcctaagcctggctctgtcaagctgggtcaggggccttgaaactggagaagtggaagtctatggttggtctgagtaagtaacttcctgtcttcatgaaaaaagttgactttgaatcccaggtactcacagaaatggtgaacagacttagttgttacccaggcacccatggattgtgttgagtgtgcagacagggaggccaccccaataggaattcgtctccaggatttttcccatgtgtcccccagtacttataaaagggagtgaaaagaccgagctgtaaggcatgtgccttctgccacctgactttccgtgaggggactaaaatttactaattgtagttgctgcagccagttaagtcctgtagcttccaggccctcatgtctttgataggagagtgcttaggtggtccccaacagtgcctaggggtacagtacagtcccattacactagagcagggctctatttatttttaaaggatatggccgtgtgttttgataaaactttattcacaaaaacagccgggtcatgggatttggcttgtgagtctgtaacagttcttaaaaagaatatctgagaaactactctgttttagacctttgaaggtgatttagagttttgtgtacatctaggagaaggtgttcagcttctcagaggatgtggacattttggttgcagctaaaaatcagtctctgaagtctctctcccttctagaggttaggacttggtgaacatgtttgtgggccttttgactgagtggcagaaggaaactgctcaggaagagaaacaggtgactgatgggaaggttgattattttctcagtcatcctggcagccaaaaatgtgccaggaaaagaaagaatgtggagcacgcgtggctcctggaggacttggagatgcatgcacatttagggtgttttccctagaattacataatgaaaaaaagaataaggcaaagaggaggtgaatatggggcctgtcacaacggcctgccctgccccaagagggttaagagtcagataatcgggacgaaactggcatggaaagagcgagcctagggaggatgccgctgggcagtgtgcatgggggagctgctgccaggctgccctccagtctgctcctgtggttactggctccacagcacctcagagagggcggccctggcttcagaaatgccagccatagtgctcacaaatgcagaagagatggaagcggtgacagaatcctgaaagtttttattgattgaagttttaaattggtaacttaagcttccttggcacgatacaaaatacctcttaaagacagcaggcttttttatttgtaggtgtgaggaactggctttaacttttttctcctcctagtttgcatgttttccttctctcgtcttctgaactgctggcaccagcagtaatacatactgataaaatcaaaattgatttttaccagtggccagtttatggctagagagacgacttatacctccataacacagaagggggaaaaatgaagaacctccagtgatccgtgaaaacctaaacgctttcaaacaaatcccaggaacagaattgctatcgaaagatatcattgcccagtttgcaggctatgttgagtcagatagaactgaatgtagtgagagctcagagctacagagcctttcagatgaatttgaaaacagactctgtgtgtgtgtgcatgtgtgcatgtgtgcatgtgtggcatatgtgccgtatgtcagtagcttgacagttttcaaatcgtgcctatatttttttgcatacacaaatttttgtgtttgcaaactcagaatccatgccaaaatacaatgttatatgtcattttcagctccttctctaaaggaatggcccatttctcattgtagtttgagaaatacatgtatgaagagataggggtcttgggcttcccagtgtcactttgaacacctgaataacatttaactcctgagaccttctcggtgtagaggccactgcttccccctgctggagatggcatttcattgaagggcctctcgtggctttccctgcccccggctgtctggcctgaagaaggagaaagaaccaaactgaactatgaaaagttaccactctgaggagacctctcttaattaacacttggggccatgtttgctgttgttgagaaggagtgttctcaaagatgagctggaatggaattgtatttagaaaggcccctgcaaagtatatagatggatgactctagttcatgacatacaaatcccataaggccaacgaccactcttctggaacaccaagagcagctctgagatcatgctggccctacgcgaattgagtttctgtggcctaattggatttggagaacgccttccctggccccttttcctcagacagatctgctctgataggaaccttttcaagaaagttactgttgtttcaatgccactccttacctgtatagaacatttccaatacattcgctcattgaacttaatccttgcaactgtgactggggggtagatggctctgtttgcatacgaagaaataaaggctccaggaggttaaatcgggcaactttttagaactaaatcagtctctgtaaggcctacattgctaagataccatttcagctctgaaaatctgcttcagggaagtgagtggatgaggccttcctgcctcagctactctgcccgtctgtacatcttttgtgtctgcctccgtaccttattcagttattttcacactaaagtaagtagaattaagactgtagttcagatgctttttctttttctgttggaaactgaacacactacagacagtgaaaaaaggtacatattccattttctcattgcctgaagatctctgctgatgctcctggagaatgactttgggggctttagaaagaatattgccagtccgtctcggcaaggagatgatgggagcgctttatatggaggctttacatgacttgtaaattaaatgtgaatgagggcagttgattaaaattggtattacagaagggccctgctgaggtttgaaaacagctgagctgctgatgtctcaggcctttccctgaattagcactgcggttctccaggatatcagcaaagagggcaagtaatagaagcccctgataaggagcgtcagccgacaggcaagcttgggaggctgtgggaatgggtctgcccccagcttcacagacctcttcctccagcctctgaatcccattagccacagcctagaacattagctgagctgcacaagctcacccacccctgtgccagggggccctgacctccctccatgccatgtttttggctgtatctacggcacttaacaataggggctttttattttcattacagagatattttgaaaaatttaaaagacatgaactcacataaacagttatggatgatagttaaaagagaaacgggtggaggtggatgagaggttgtcttcatgaatataattacttgagatttttttttcttaatggaattagtttattagaaaatgtctgtgttaaatccgtagaaaaggaagaaaagtgtagcaacaaaaatgtagccattatctaacttgccataaatatttgcagttatgataccttggaatgttgccacgatatggattgctttgattaaaagatgtcagttgaataaaacagtactgtgggagaatcgctttctgctgctagataaatgctgatgtttatttttaaaccaggaaacattgatcctgtaacaatgcccgattacaattgctttattacaccccagggctgatggagatgtaatcacttggctaatggatgtgggtgcaggacagatgctcgcttgctggcctgctttcctgcttgcattctgatgagctgcaggagtgcgcctggccttctgcaggtggagctgctgtcagagcttcgtttcactgatacccaaagccatgtctgactgaaataaaacaggttccctttttttttccctttggaaaatgccaactaagggagactaatcagatatcttaacacaatttcatccaggcttagtgctaacaagattgcggggctttttagggtttaagaagatgagaaatgagtgtgcacgtttcacacgttgacttgccggtttttccatgtcatacaaaaaagtcctggctgtttctccgaactggctgcctgcattcccgtctttcttttgtttttaagaaatagactgaattcagctgttaatcctctagtacagtatccatgttaaaatgtttttccattgcatcttttatgtgaattcaaaggtcagaatttattgtctgtgatattgagaccatgtgtacaagaactactttttgcttttcatcattcactccttagcaaacgtttcgtaagtaccctctgtctgtttgctactatatgaggtgctgcgaaattagtgggcgtggctttttatatttttcattcgtgtgtagcctaagtaaggtgactcaagatgatacaccgagagaaaaatgcaaaatatatttggttctcatttctgttgctgtcgtttcctttttaaagacgatttatcaactgctgccatttggaacttcctataagaaactaaaaatgatctatttcagtgttcctttcgcctttcctctgctttctgaataaatggtttcagtaacccatgctgttctctccctattctacgtctttctccctatgttgaaaaaagattcccacagtttctgatgtgtgtgtttatagtcttcaatgtatgttaacatgttaggaactgagtatcttaagagatgtcttagaatgctttagttttcataatttgtcctttatgtatttttcattgtatttgctgttttgacatggaagtaatttaaaaagttggtgcaggaaaggactctttactgttgcacattttggttttctgatatgtaataaattcatggcttggcagctgacatgatgtttcccagagagaaggagatgtatttctgcagggtccagaccaaaagagccatttacagcatgttctcccatgttccattatcagcctgatgaaacctgccctgccaaggcataaacttttgtactagctgtctccatattatgttcaataaattctgtgctctgaatatatttaaa

SEQ ID NO: 149130 - protein, 668 aa, Artificial Sequence
  derived and/or modified sequence
MAANMYRVGDYVYFENSSSNPYLVRRIEELNKTANGNVEAKVVCLFRRRDISSSLNSLADSNAREFEEESKQPGVSEQQRHQLKHRELFLSRQFESLPATHIRGKCSVTLLNETDILSQYLEKEDCFFYSLVFDPVQKTLLADQGEIRVGCKYQAEIPDRLVEGESDNRNQQKMEMKVWDPDNPLTDRQIDQFLVVARAVGTFARALDCSSSIRQPSLHMSAAAASRDITLFHAMDTLQRNGYDLAKAMSTLVPQGGPVLCRDEMEEWSASEAMLFEEALEKYGKDFNDIRQDFLPWKSLASIVQFYYMWKTTDRYIQQKRLKAAEADSKLKQVYIPTYTKPNPNQIISVGSKPGMNGAGFQKGLTCESCHTTQSAQWYAWGPPNMQCRLCASCWIYWKKYGGLKTPTQLEGATRGTTEPHSRGHLSRPEAQSLSPYTTSANRAKLLAKNRQTFLLQTTKLTRLARRMCRDLLQPRRAARRPYAPINANAIKAECSIRLPKAAKTPLKIHPLVRLPLATIVKDLVAQAPLKPKTPRGTKTPINRNQLSQNRGLGGIMVKRAYETMAGAGVPFSANGRPLASGIRSSSQPAAKRQKLNPADAPNPVVFVATKDTRALRKALTHLEMRRAARRPNLPLKVKPTLIAVRPPVPLPAPSHPASTNEPIVLED

SEQ ID NO: 149131 - protein, 495 aa, Artificial Sequence
  derived and/or modified sequence
MEMKVWDPDNPLTDRQIDQFLVVARAVGTFARALDCSSSIRQPSLHMSAAAASRDITLFHAMDTLQRNGYDLAKAMSTLVPQGGPVLCRDEMEEWSASEAMLFEEALEKYGKDFNDIRQDFLPWKSLASIVQFYYMWKTTDRYIQQKRLKAAEADSKLKQVYIPTYTKPNPNQIISVGSKPGMNGAGFQKGLTCESCHTTQSAQWYAWGPPNMQCRLCASCWIYWKKYGGLKTPTQLEGATRGTTEPHSRGHLSRPEAQSLSPYTTSANRAKLLAKNRQTFLLQTTKLTRLARRMCRDLLQPRRAARRPYAPINANAIKAECSIRLPKAAKTPLKIHPLVRLPLATIVKDLVAQAPLKPKTPRGTKTPINRNQLSQNRGLGGIMVKRAYETMAGAGVPFSANGRPLASGIRSSSQPAAKRQKLNPADAPNPVVFVATKDTRALRKALTHLEMRRAARRPNLPLKVKPTLIAVRPPVPLPAPSHPASTNEPIVLED

SEQ ID NO: 149132 - DNA, 2007 bp, Artificial Sequence
  derived and/or modified sequence
atggctgctaacatgtaccgcgttggggactacgtatacttcgagaacagctcctctaatccatatctagtaagacgcatagaagaattgaataagactgccaacgggaacgtggaagcaaaggtcgtttgtctattccggcgcagggatatcagttcctcgttgaatagtttagccgattctaatgcaagggaattcgaagaggagagcaagcagcctggtgtaagcgaacagcagcggcaccagctgaagcaccgcgagctgtttctctctcggcagtttgaatcccttcccgctactcatatcaggggaaaatgcagcgtaacattgctgaatgaaactgacatcctatcccagtatctggagaaggaggactgttttttctactccctggtcttcgacccagtgcagaagacactgctagctgaccagggagaaatcagggtcggctgcaaataccaggccgagattccggatcgattggtggaaggggagtctgacaatcgcaaccagcagaagatggagatgaaggtgtgggacccagacaaccctttaaccgacagacagatagaccagtttctcgttgtagccagggcggtgggaacttttgcacgtgcgcttgactgttcttcctccatccggcagccctcccttcacatgagcgctgccgcggcatctagggacattacactgtttcacgcgatggacacactgcagaggaatggatacgaccttgctaaagccatgtctactctggtaccgcaggggggccccgtactgtgccgcgatgagatggaagagtggtccgccagcgaggccatgctgttcgaggaggccctcgagaaatacggaaaagactttaacgacattaggcaagacttcttaccctggaagtcactggcgagcatcgtgcagttctattacatgtggaagaccactgacagatatattcaacaaaaacggttaaaggctgccgaggccgattcaaagctgaaacaggtgtatatccccacctacacaaagcctaatccaaaccagattatttctgtggggtctaagcccgggatgaatggtgccgggttccaaaaagggctcacatgcgaatcctgccataccactcaatcagcccaatggtacgcttgggggcctcctaacatgcaatgtagactatgtgcaagttgttggatttattggaagaagtacggggggctcaagacaccaactcaactggagggcgctacccggggcaccactgaaccccatagtaggggacacctctcaaggcccgaggctcaaagcctctccccgtacaccacctccgctaatcgagccaagctcctcgcgaagaatagacagacctttcttctccaaacgacaaaattaactagattggcccgccgcatgtgtcgcgacctacttcagccgaggagagcggcacggagaccatacgcccctattaatgcaaacgcgataaaggccgagtgctcgatacgcctgccgaaagcggctaaaacaccacttaagattcacccactcgtccgcctgccgctggctaccattgtgaaagatctcgttgctcaggctcctctgaagccgaaaacaccaaggggaacaaaaacaccaataaaccggaaccagcttagccaaaacagggggttaggcggcatcatggtgaagagggcatatgaaaccatggcgggtgctggcgtcccttttagcgccaatggccgtcccctcgccagcggtatcagatcaagcagccaaccagcagccaagaggcagaaactaaatccagccgatgcaccaaaccccgttgtgtttgtcgctaccaaagacacaagggctctacggaaggccctcacccatttggagatgcgaagggcagcaagacggcccaatttgccactgaaggttaaacccacactgattgctgttcgccctcctgtgccgcttccagccccctcccaccctgcttcaacgaacgaacccatcgtcctcgaggactag

SEQ ID NO: 149133 - DNA, 1488 bp, Artificial Sequence
  derived and/or modified sequence
atggagatgaaagtgtgggacccagataacccccttaccgatcgacaaatcgatcagtttcttgtggtggccagggctgttggtacattcgcgcgggccctggactgctcttcgtccatcaggcagccttcactccacatgtcggcggcagccgcctcgcgggatatcaccctgtttcatgcaatggacaccttacaacgcaacgggtatgacttggctaaggcaatgtccacattggtgcctcagggggggcccgtgctgtgccgcgatgagatggaagagtggagtgcaagtgaggcgatgctgttcgaagaagccctggagaagtacggcaaggattttaatgatataaggcaggacttcctgccttggaaatcacttgccagcattgtgcagttttattatatgtggaaaaccacagacaggtatatccaacagaagagactgaaggcagctgaagctgattccaagttaaaacaagtttatattccaacctacacaaagccgaatccaaatcagatcataagcgtaggatccaagccagggatgaacggagcaggcttccagaaagggttgacgtgcgaaagctgtcataccacacaaagtgcccagtggtacgcttggggaccccccaatatgcaatgcaggctgtgcgctagttgttggatctactggaaaaagtatggaggactaaagacccctacccagctcgagggagcaactcgcggcactactgagccacactcacgggggcatctctctaggcctgaagcacagtcactgtccccttatacaacgagcgcgaaccgcgccaagttgttggcaaaaaatcgacagacgttcctgctgcagaccacaaagctgacgcggctagcccgcaggatgtgtcgcgacctactccaaccaagaagagcggcaaggcggccttatgcacctataaatgcgaacgctataaaagcagaatgctctattagattgccaaaggccgcaaagactcctctcaagatacatcctctggtgagattgccgttggcaaccattgttaaggatctcgtcgcccaggctccactaaaaccaaagactcctcggggcaccaaaacgcccatcaacagaaaccagttgtcgcagaatcgtgggctgggagggattatggtgaaacgcgcctacgaaacaatggccggggctggcgtaccatttagtgctaacgggcggcccttggcctctggtattagaagctcatcccagcccgccgctaaaaggcagaagctgaaccccgcggatgcccctaatcccgtagtatttgttgctaccaaggatactagagcccttcgtaaagccctgacacatttagagatgcggcgggctgctaggaggccgaatctccctctgaaagtgaagcccacactgatcgctgtaaggccccccgttcctcttcctgcacctagtcacccagcttccaccaacgagcccatagttctcgaggattag

SEQ ID NO: 149134 - DNA, 1488 bp, Artificial Sequence
  derived and/or modified sequence
atggagatgaaagtatgggacccagacaatcccctgaccgacagacagatcgatcaatttctcgtggttgccagggcggtgggaacatttgcccgcgccctggactgcagttcttcaatccgccaacccagtcttcatatgtctgcagccgccgcctcgcgagacattacgctattccacgctatggacacactgcagcggaacggatacgacctcgcaaaagccatgtcaacactagttccccagggaggtccagttttgtgccgcgatgaaatggaagaatggagtgcaagtgaggcgatgctgttcgaggaagccctcgagaaatatggaaaggactttaacgacatccgacaggacttcctgccctggaaatccctcgcctccattgtgcagttctactatatgtggaagaccaccgatcgctacatccagcagaagaggctcaaggccgcagaagccgattccaaactgaagcaggtttacattccaacctacactaaacctaatcctaaccagattatctcagtaggatctaaaccaggaatgaatggcgccggcttccagaagggcctcacctgcgaatcctgtcataccacacaaagtgcccaatggtatgcttgggggcctcccaacatgcaatgtcggttgtgtgcgtcttgttggatttactggaaaaaatatggcggactgaaaacacctacacaactagagggggccacacggggaactacagagccccatagccgcgggcatctttcacgccccgaggcccagagcttatcaccctacacaaccagcgccaaccgagccaaactgctagccaaaaacaggcagacgttcctactgcagacaactaagctgacgcggctcgccagacgaatgtgtagggacctactgcagcccagaagagccgctcgaagaccttatgcacctatcaacgcgaatgctatcaaagctgagtgcagtatcagattgcccaaggccgctaaaactcctttaaaaattcatcctctagtccgccttcctcttgctaccattgtgaaggacctggttgcacaggcccctttaaaaccgaaaactcccaggggcaccaagactcctatcaataggaaccagctcagtcaaaataggggactgggcggcatcatggttaaaagggcttacgagacaatggcaggggcgggcgtcccattcagcgcaaacggtagacccctggccagtggtattcggagctcaagccagccagcagcaaaaaggcagaaactgaatccagctgatgccccaaaccctgtcgtctttgttgctacaaaagatacccgggccctcagaaaggcattgactcacttggagatgagacgagcagctaggaggcccaatttgccacttaaggtcaagccgacccttatcgcggtgaggccccccgtgccactccccgccccaagccacccagcctcaactaacgagcctatcgtcctggaagactag

SEQ ID NO: 149135 - DNA, 3058 bp, Artificial Sequence
  derived and/or modified sequence
cgaaggtgttccggaaggaggcgaaccctgaggcgggcccggcaagccttccctgcggccggcagagcccaacgactagtgggactccgcgggggcgggggtagctggagcctggctctggcctggcaggagccgagctcgttccggaagaagccgagcggacgggggccagcctcagcgtcccgggagtgaggcgatagctgcggcggcgacagcgcgggccgggatgaaccgcgacggctgaggcagcggaggtgccggctgcgcgggccccagtgagactccctcgaagcggcagcccaccgttcggggctttgcctcgagccgagccctgcccccgcgagcctcccggacccctttgtgcggccggaggcggcggcgggaacggccatggcggccaacatgtaccgggtgggagattacgtctattttgagaactcttccagcaatccttacctggttagacggattgaggagctcaacaagactgcaaatggaaatgtggaggcaaaggttgtctgtcttttccggcgcagggacatttctagtagcctcaacagcctggctgatagtaatgccagggagtttgaagaggaatcaaagcagccaggggtgtctgagcagcagcgccatcaactgaagcaccgggaactttttctttctcggcaatttgaatcattaccagccacccacatacgggggaaatgcagtgtgaccctcttgaatgagacagatatcttgagccagtacctggaaaaggaggactgctttttttactcactggtgtttgaccccgtgcagaagacacttctcgctgatcagggcgagattagagttggttgcaaataccaagctgagatcccagatcgcctagtagagggagaatctgataatcggaaccagcagaagatggagatgaaggtctgggacccagacaaccctctcacagaccggcagatcgaccagtttcttgtggtggcccgagctgtgggaacctttgcaagagccctagattgtagcagctccattcggcagccaagcttgcacatgagtgcagctgctgcctcccgagatatcactctgtttcacgccatggataccttgcaaaggaacggctacgacctggctaaggccatgtcgaccctggtaccccagggaggcccggtgctgtgtcgggatgagatggaggaatggtcagcctcagaggccatgctatttgaggaggccctagagaagtatgggaaggacttcaatgatattcgccaggattttctaccctggaagtcacttgccagcatagtccagttttattacatgtggaaaaccacagaccggtatattcagcagaaaaggttgaaagctgctgaagcagacagcaaactgaaacaggtctacattcccacctacactaagccaaaccctaaccagatcatttctgtgggttcaaaacctggcatgaatggggctggatttcagaagggcctgacttgtgagagttgccacaccacacagtctgctcagtggtatgcctggggcccacctaacatgcagtgccgcctctgtgcttcctgttggatctactggaagaagtatgggggactgaagaccccaactcagcttgagggggccactcggggcaccacggagccacactcaaggggtcatttatccagacctgaagctcaaagtctctctccttacacaaccagcgccaacagggccaagctactggctaagaacagacaaactttcctgcttcagaccacaaagctgacccgtcttgccagacgcatgtgcagggacctattacagccaaggagggccgcccgacggccttatgctcctatcaatgccaatgccatcaaagcagagtgctccattcgacttcctaaggccgccaagactccattgaagattcaccctctggtgcggctgcccctggcaactatcgtcaaagatctggtggcccaggcacccctgaaaccaaaaacacctcggggtaccaagacaccgatcaacagaaaccagctgtcccagaaccggggactggggggcattatggtgaaacgggcctatgagactatggcaggggcaggggttcctttctctgccaatggaaggcctctggcttcagggattcgttcaagctcacagccagcagccaagcgtcagaaactaaacccagctgatgcccccaatcctgtggtgtttgtggccacaaaggataccagggccctacggaaggctctgacccatctggaaatgcggcgagctgctcgccgacccaacttgcccctgaaggtgaagccaacgctgattgcagtgcggccccctgtccctctacctgcaccctcacatcctgccagcaccaatgagcctattgtcctggaggactgagcacctgtggggaagggaggtgggctgagaggtagagggtggatgcccagggcacccaaacctcccttccctttcgtgtcgaagggagtgaggagtgaattaaggaagagagcaagtgagtgtgtgtccctggaggggttgggcgccctctggtgttaccacctcgagacttgtctcatgcctccatgcttgccgatggaggacagactgcaggaacttggcccatgtgggaacctagcctgttttggggggtaggacccacagatgtcttggacagttttggggggagggttttttaattttttaaaaattttgcctccctttgtgaaaggggatggggaggggaagagtaaacagataacaggtggtggtacctggttgggggaggggggcgtgcactgccatgtctttttttttttttttttttttttttttcctaattgggggtttctctttctgtccggtgtccggactttcctaattggagtttgaggcccctaagctggcatcaaccccaggccacgctcgctctttccttccctcccctccccctctgccttttgtacgccagttctcagaaataaagatcttttgtccgtttttttaacctcggattctgtaattggttcttatagtaacaaataaaaagctgttttcttca

SEQ ID NO: 149136 - DNA, 2577 bp, Artificial Sequence
  derived and/or modified sequence
gcacaaccccccccttctccctgaggttgggaacaatacaccaatgagcctggggctgaggttcttctgctccctcccactttggttggcgcctagccaggggagtttgaagaggaatcaaagcagccaggggtgtctgagcagcagcgccatcaactgaagcaccgggaactttttctttctcggcaatttgaatcattaccagccacccacatacgggggaaatgcagtgtgaccctcttgaatgagacagatatcttgagccagtacctggaaaaggaggactgctttttttactcactggtgtttgaccccgtgcagaagacacttctcgctgatcagggcgagattagagttggttgcaaataccaagctgagatcccagatcgcctagtagagggagaatctgataatcggaaccagcagaagatggagatgaaggtctgggacccagacaaccctctcacagaccggcagatcgaccagtttcttgtggtggcccgagctgtgggaacctttgcaagagccctagattgtagcagctccattcggcagccaagcttgcacatgagtgcagctgctgcctcccgagatatcactctgtttcacgccatggataccttgcaaaggaacggctacgacctggctaaggccatgtcgaccctggtaccccagggaggcccggtgctgtgtcgggatgagatggaggaatggtcagcctcagaggccatgctatttgaggaggccctagagaagtatgggaaggacttcaatgatattcgccaggattttctaccctggaagtcacttgccagcatagtccagttttattacatgtggaaaaccacagaccggtatattcagcagaaaaggttgaaagctgctgaagcagacagcaaactgaaacaggtctacattcccacctacactaagccaaaccctaaccagatcatttctgtgggttcaaaacctggcatgaatggggctggatttcagaagggcctgacttgtgagagttgccacaccacacagtctgctcagtggtatgcctggggcccacctaacatgcagtgccgcctctgtgcttcctgttggatctactggaagaagtatgggggactgaagaccccaactcagcttgagggggccactcggggcaccacggagccacactcaaggggtcatttatccagacctgaagctcaaagtctctctccttacacaaccagcgccaacagggccaagctactggctaagaacagacaaactttcctgcttcagaccacaaagctgacccgtcttgccagacgcatgtgcagggacctattacagccaaggagggccgcccgacggccttatgctcctatcaatgccaatgccatcaaagcagagtgctccattcgacttcctaaggccgccaagactccattgaagattcaccctctggtgcggctgcccctggcaactatcgtcaaagatctggtggcccaggcacccctgaaaccaaaaacacctcggggtaccaagacaccgatcaacagaaaccagctgtcccagaaccggggactggggggcattatggtgaaacgggcctatgagactatggcaggggcaggggttcctttctctgccaatggaaggcctctggcttcagggattcgttcaagctcacagccagcagccaagcgtcagaaactaaacccagctgatgcccccaatcctgtggtgtttgtggccacaaaggataccagggccctacggaaggctctgacccatctggaaatgcggcgagctgctcgccgacccaacttgcccctgaaggtgaagccaacgctgattgcagtgcggccccctgtccctctacctgcaccctcacatcctgccagcaccaatgagcctattgtcctggaggactgagcacctgtggggaagggaggtgggctgagaggtagagggtggatgcccagggcacccaaacctcccttccctttcgtgtcgaagggagtgaggagtgaattaaggaagagagcaagtgagtgtgtgtccctggaggggttgggcgccctctggtgttaccacctcgagacttgtctcatgcctccatgcttgccgatggaggacagactgcaggaacttggcccatgtgggaacctagcctgttttggggggtaggacccacagatgtcttggacagttttggggggagggttttttaattttttaaaaattttgcctccctttgtgaaaggggatggggaggggaagagtaaacagataacaggtggtggtacctggttgggggaggggggcgtgcactgccatgtctttttttttttttttttttttttttttcctaattgggggtttctctttctgtccggtgtccggactttcctaattggagtttgaggcccctaagctggcatcaaccccaggccacgctcgctctttccttccctcccctccccctctgccttttgtacgccagttctcagaaataaagatcttttgtccgtttttttaacctcggattctgtaattggttcttatagtaacaaataaaaagctgttttcttc

SEQ ID NO: 149137 - DNA, 2265 bp, Artificial Sequence
  derived and/or modified sequence
gagagggtgcggggaaccgcgacgcggcagggctccgagactcccagagagaagctgcgggcagccccgacggcactttcggggctgcgtcaggggctccccggggcacggagtggccttcggaaccggttccgaaggagctgacagggtagggagggaacgcgaggggctggggcgacggctttgccaccgcgggggagccgcccggaggtttcctcttcccaggcgttattgtgcgcctcgattcgaaaagattacgtctattttgagaactcttccagcaatccttacctggttagacggattgaggagctcaacaagactgcaaatggaaatgtggaggcaaaggttgtctgtcttttccggcgcagggacatttctagtagcctcaacagcctggctgatagtaatgccagggagtttgaagaggaatcaaagcagccaggggtgtctgagcagcagcgccatcaactgaagcaccgggaactttttctttctcggcaatttgaatcattaccagccacccacatacgggggaaatgcagtgtgaccctcttgaatgagacagatatcttgagccagtacctggaaaaggaggactgctttttttactcactggtgtttgaccccgtgcagaagacacttctcgctgatcagggcgagattagagttggttgcaaataccaagctgagatcccagatcgcctagtagagggagaatctgataatcggaaccagcagaagatggagatgaaggtctgggacccagacaaccctctcacagaccggcagatcgaccagtttcttgtggtggcccgagctgtgggaacctttgcaagagccctagattgtagcagctccattcggcagccaagcttgcacatgagtgcagctgctgcctcccgagatatcactctgtttcacgccatggataccttgcaaaggaacggctacgacctggctaaggccatgtcgaccctggtaccccagggaggcccggtgctgtgtcgggatgagatggaggaatggtcagcctcagaggccatgctatttgaggaggccctagagaagtatgggaaggacttcaatgatattcgccaggattttctaccctggaagtcacttgccagcatagtccagttttattacatgtggaaaaccacagaccggtatattcagcagaaaaggttgaaagctgctgaagcagacagcaaactgaaacaggtctacattcccacctacactaagccaaaccctaaccagatcatttctgtgggttcaaaacctggcatgaatggggctggatttcagaagggcctgacttgtgagagttgccacaccacacagtctgctcagtggtatgcctggggcccacctaacatgcagtgccgcctctgtgcttcctgttggatctactggaagaagtatgggggactgaagaccccaactcagcttgagggggccactcggggcaccacggagccacactcaaggggtcatttatccagacctgaagctcaaagtctctctccttacacaaccagcgccaacagggccaagctactggctaagaacagacaaactttcctgcttcagaccacaaagctgacccgtcttgccagacgcatgtgcagggacctattacagccaaggagggccgcccgacggccttatgctcctatcaatgccaatgccatcaaagcagagtgctccattcgacttcctaaggccgccaagactccattgaagattcaccctctggtgcggctgcccctggcaactatcgtcaaagatctggtggcccaggcacccctgaaaccaaaaacacctcggggtaccaagacaccgatcaacagaaaccagctgtcccagaaccggggactggggggcattatggtgaaacgggcctatgagactatggcaggggcaggggttcctttctctgccaatggaaggcctctggcttcagggattcgttcaagctcacagccagcagccaagcgtcagaaactaaacccagctgatgcccccaatcctgtggtgtttgtggccacaaaggataccagggccctacggaaggctctgacccatctggaaatgcggcgagctgctcgccgacccaacttgcccctgaaggtgaagccaacgctgattgcagtgcggccccctgtccctctacctgcaccctcacatcctgccagcaccaatgagcctattgtcctggaggactgagcacctgtggggaagggaggtgggctgagaggt

SEQ ID NO: 149138 - DNA, 2007 bp, Artificial Sequence
  derived and/or modified sequence
atggccgccaacatgtacagagtgggggactatgtgtactttgagaacagcagcagcaacccctacctggtgagaagaattgaggagctgaacaagacagccaatggaaatgtggaggccaaggtggtgtgcctcttcagaagaagagacatcagcagcagcctgaacagcctggccgacagcaatgcccgggagtttgaggaggagagcaagcagcccggggtgtctgagcagcagaggcaccagctgaagcaccgggagctgttcctgagccggcagtttgagagcctgcctgccacccacatccggggcaaatgttctgtgaccctgctgaatgaaacagacatcctgagccagtacctggagaaggaggactgcttcttctacagcctggtgtttgatcctgtgcagaagaccctgctggccgaccagggcgagatccgggtgggctgcaagtaccaggccgagatcccagaccggctggtggagggggagagtgacaacagaaaccagcagaagatggagatgaaggtgtgggaccctgacaaccccctgacagaccggcagattgaccagttcctggtggtggcccgggctgtgggcacctttgcccgggccctggactgcagcagcagcatccggcagcccagcctgcacatgtctgctgctgctgccagccgggacatcaccctcttccacgccatggacaccctgcagagaaatggctatgacctggccaaggccatgagcaccctggtgccccagggcggccctgtgctgtgcagagatgagatggaggagtggagcgccagcgaggccatgctgtttgaggaggccctggagaagtatggcaaggacttcaatgacatccggcaggacttcctgccctggaagagcctggccagcatcgtgcagttctactacatgtggaagaccacagaccgctacatccagcagaagaggctgaaggctgctgaggccgacagcaagctgaagcaggtgtacatccccacctacaccaagcccaaccccaaccagatcatctctgtgggcagcaagccaggcatgaatggagctggcttccagaagggcctgacctgtgagagctgccacaccacccagagcgcccagtggtacgcctggggcccccccaacatgcagtgccgcctgtgtgccagctgctggatctactggaagaagtatggaggcctgaagacccccacccagctggagggcgccacccggggcaccacagagccccacagccggggccacctgagcaggcctgaggcccagagcctgagcccctacaccaccagcgccaacagagccaagctgctggccaagaaccggcagaccttcctgctgcagaccaccaagctgacccggctggcccggaggatgtgccgggacctgctgcagccccggcgggccgcccggcggccctatgcccccatcaatgccaatgccatcaaggccgagtgcagcatccggctgcccaaggccgccaagacccccctgaagatccaccccctggtgcggctgcccctggccaccatcgtgaaggacctggtggcccaggcccccctgaagcccaagaccccccggggcaccaagacccccatcaacagaaaccagctgagccagaacagaggcctgggcggcatcatggtgaagagggcctatgagaccatggccggggccggcgtgcccttcagcgccaacggccggcccctggccagcggcatccgcagcagcagccagcctgctgccaagaggcagaagctgaacccagcagatgcccccaaccctgtggtgtttgtggccaccaaggacacccgggccctgaggaaggccctgacccacctggagatgaggcgggccgcccggcggcccaacctgcccctgaaggtgaagcccaccctgattgctgtgcggccccctgtgcccctgcctgcccccagccacccagccagcaccaatgagcccatcgtgctggaggactag

SEQ ID NO: 149139 - DNA, 1488 bp, Artificial Sequence
  derived and/or modified sequence
atggagatgaaggtgtgggaccctgacaaccccctgacagaccggcagattgaccagttcctggtggtggcccgggctgtgggcacctttgcccgggccctggactgcagcagcagcatccggcagcccagcctgcacatgtctgctgctgctgccagccgggacatcaccctcttccacgccatggacaccctgcagagaaatggctatgacctggccaaggccatgagcaccctggtgccccagggcggccctgtgctgtgcagagatgagatggaggagtggagcgccagcgaggccatgctgtttgaggaggccctggagaagtatggcaaggacttcaatgacatccggcaggacttcctgccctggaagagcctggccagcatcgtgcagttctactacatgtggaagaccacagaccgctacatccagcagaagaggctgaaggctgctgaggccgacagcaagctgaagcaggtgtacatccccacctacaccaagcccaaccccaaccagatcatctctgtgggcagcaagccaggcatgaatggagctggcttccagaagggcctgacctgtgagagctgccacaccacccagagcgcccagtggtacgcctggggcccccccaacatgcagtgccgcctgtgtgccagctgctggatctactggaagaagtatggaggcctgaagacccccacccagctggagggcgccacccggggcaccacagagccccacagccggggccacctgagcaggcctgaggcccagagcctgagcccctacaccaccagcgccaacagagccaagctgctggccaagaaccggcagaccttcctgctgcagaccaccaagctgacccggctggcccggaggatgtgccgggacctgctgcagcccaggagagctgcccggcggccctatgcccccatcaatgccaatgccatcaaggcagaatgttccatccggctgcccaaggccgccaagacccccctgaagatccaccccctggtgcggctgcccctggccaccatcgtgaaggacctggtggcccaggcccccctgaagcccaagaccccccggggcaccaagacccccatcaacagaaaccagctgagccagaacagaggcctgggcggcatcatggtgaagagggcctatgagaccatggccggggccggcgtgcccttcagcgccaacggccggcccctggccagcggcatccgcagcagcagccagcctgctgccaagaggcagaagctgaacccagcagatgcccccaaccctgtggtgtttgtggccaccaaggacacccgggccctgaggaaggccctgacccacctggagatgagaagagctgcccggcggcccaacctgcccctgaaggtgaagcccaccctgattgctgtgcggccccctgtgcccctgcctgcccccagccacccagccagcaccaatgagcccatcgtgctggaggactag

SEQ ID NO: 149140 - DNA, 2007 bp, Artificial Sequence
  derived and/or modified sequence
atggccgccaacatgtaccgggtgggcgactacgtgtacttcgagaattcatcaagcaacccctatctggtacggagaatcgaagagttgaacaagacagcgaatgggaacgtggaagcaaaggtcgtatgtctgttcagacgcagagatatctccagcagtcttaattctttggccgactccaacgcacgcgagttcgaggaggagtctaagcagcctggggtcagcgagcagcaaaggcaccagctaaagcacagggagctgttcctttcgcgccagttcgagtcactgcccgcgacgcacattcgaggtaagtgtagtgtcaccttgctcaacgagactgatattctgtcccaatacctggagaaggaggattgttttttttacagcctggtgtttgatccggtacagaagaccctgctggcagatcagggggaaatcagagtggggtgcaaatatcaggccgaaatacccgaccgcttagtggagggtgagtccgataacagaaaccagcagaaaatggagatgaaggtctgggaccccgacaatcccctgactgataggcaaattgaccaatttctcgttgtggcgagagcggtcggtacttttgcaagagccctcgactgttcttcttctattcgtcagccaagtctacatatgtcagcagctgcagcatcacgagacatcactctctttcatgctatggacacacttcagcgcaatggctacgacctggccaaggctatgtccactcttgtccctcaaggcggtcctgtgctttgtcgcgacgaaatggaagaatggtcggcttcagaggctatgctttttgaggaggcactcgagaaatacgggaaagactttaatgacatccgccaagacttccttccttggaagagcctggctagcatcgttcagttctactatatgtggaaaactaccgatcggtacattcaacagaagcgcctcaaggctgccgaagctgactccaagctcaagcaggtgtatatccctacttacactaagccaaatcccaaccagatcattagcgttggatccaaacccgggatgaacggtgccggcttccagaaaggattgacctgcgagagctgccatactacgcagagtgctcaatggtacgcctgggggccccccaacatgcagtgtcggctctgcgccagttgctggatttactggaaaaagtatggcggcctgaagacacccacccaattggagggggcaacacgcggcaccacggagcctcactctcgaggccatctgtccagacctgaggcccagagtctgtccccttacacgacttcggcgaaccgagccaagcttctggccaagaatcggcaaacattcctgctgcagactaccaagctgacacggctggctcggcgcatgtgtagggatctgctgcagccccgccgcgcagccagaaggccttatgcgcctatcaacgccaatgccataaaggccgaatgtagcatcagactgcccaaagctgcaaagacccctctgaaaatccacccccttgttcgccttcctttagctacgatcgtgaaggacttagtggctcaagccccgcttaaacccaaaacaccccgcggcacaaaaactccaattaatagaaatcaactgtcgcagaacaggggcctgggggggatcatggtcaagcgtgcatatgaaactatggcaggtgctggcgtgccctttagtgccaacggaagacccctggcgtcaggcataagaagctcctcgcagcctgctgctaagagacagaaattaaatcctgccgatgccccaaaccctgtcgtgttcgtcgcaactaaggatactcgcgcactgaggaaggccctgacacaccttgagatgcggcgtgcggccagacggcccaacctacccttgaaagtgaaaccgacccttattgccgtcagacctcccgttcccttgcctgccccttcccaccccgccagcactaatgagcccattgtactggaagattag

SEQ ID NO: 149141 - DNA, 1488 bp, Artificial Sequence
  derived and/or modified sequence
atggagatgaaggtgtgggaccccgacaaccccctgaccgaccggcaaattgaccagtttctggtggtggccagagctgtgggcacctttgcccgcgcactggattgttcatcatcaatcaggcagcctagcctgcatatgagcgccgcagctgccagccgcgatatcaccctgttccacgcaatggacactctgcagcgcaatggatatgacctcgccaaggcaatgagtactcttgtgcctcaaggcggcccagtattatgtcgggatgagatggaggagtggagcgcttcagaggctatgctatttgaggaggcgctggagaagtacgggaaggattttaacgacatacgccaagatttccttccctggaagagcctggcatctatcgtgcagttctactacatgtggaaaaccaccgatcgctatatccagcagaagaggctgaaggctgccgaggcagacagcaaactcaagcaagtttatatccccacgtacactaagccaaacccaaaccaaattataagcgtgggcagtaagccaggaatgaatggcgccggttttcagaaagggctgacatgcgaatcatgccacacaacgcagagtgcccagtggtatgcatggggtccgcccaacatgcaatgccggctgtgtgctagctgttggatatactggaagaagtacggcgggctgaagacccctactcagctggaaggggcaactcgaggcaccaccgaaccacacagccgcgggcatttgagcagacctgaagcccagagcctgtccccttacactacctctgcaaatagagctaagcttttggccaagaatcgccaaacgtttttgctgcagaccaccaaattgaccagattagctcgccgcatgtgccgagatcttttgcagccaagacgggcggctagaagaccttacgcacccattaacgccaacgcaatcaaggccgaatgctccatacggctgccgaaagccgctaagacaccactgaagattcaccctctggtgcggctgccactcgctacgatcgtgaaggatctcgtcgcacaggctccacttaagcccaagaccccaagaggcacaaagacaccaatcaaccgaaaccaactgtcacagaatcggggactgggcggcattatggtcaagagagcgtacgagaccatggctggggctggagttcctttttccgccaatggaaggccactggcttcaggaatccggagttcgtcccaacccgcagcgaaaagacagaaactgaacccagccgatgcgccgaatccagtcgtgttcgtggcaacaaaggacacgagggcccttaggaaagccctgacacacctggagatgcgccgggccgctaggcgacctaacctgcctctcaaggtgaaaccaaccctgattgctgtgcggccacctgtacctttgccggccccgtcgcatccagcgtcaacaaacgaaccaatcgttctggaagattag

SEQ ID NO: 149142 - DNA, 1488 bp, Artificial Sequence
  derived and/or modified sequence
atggagatgaaggtgtgggaccccgacaaccccctgaccgaccggcaaattgatcaattcctggtggtggcccgcgccgttggtacttttgccagagccttagattgctccagcagcataagacagccttccttacatatgtcagccgccgccgcctcacgagacataacactgtttcacgcgatggacaccctgcagagaaatggttacgaccttgctaaggctatgagtacactggtgccacagggaggccccgttttgtgtagggacgagatggaggagtggtcagcttcagaagcgatgctgtttgaagaggcgctggagaagtacggaaaggatttcaacgatatcaggcaagacttcttgccctggaagtccctggcctctatagtgcagttctattatatgtggaagaccactgaccgctacattcagcagaagcggctcaaggccgctgaagctgatagcaaattgaagcaagtctatattccaacatacacgaagcccaatcctaaccaaatcatttccgtgggctcaaaaccaggcatgaatggggctggatttcagaagggcctcacctgtgagtcttgccacactacccaatctgcccagtggtacgcttggggacctcccaatatgcagtgtcgtttgtgcgcttcatgctggatatactggaagaagtatgggggattgaagacccccacgcaactggaaggcgccactagaggaaccaccgagcctcattccaggggccacctctcccggcctgaagcgcaatccctctctccctacaccactagtgccaatagagcaaagctgctcgcaaagaatcggcagactttcctgttgcagacaacaaagctgacccggctcgccaggaggatgtgccgcgatctgctgcagcctagaagagctgcccgacggccttatgcacctattaatgcaaacgcgattaaagcagagtgtagtattaggttgccaaaggccgcaaagacccctcttaagatacacccactggtcaggctgccccttgcaaccattgtgaaggacctagtggctcaagcacccctgaaaccaaagacccctaggggtacaaaaactcctatcaaccgcaaccagctatctcagaaccgtggcttgggaggtatcatggttaaacgggcctacgaaacaatggccggcgcaggggtcccattctcagccaatggacgccccctagccagcggcatcagatcaagcagccagcctgccgccaagcgccaaaaattgaatcccgcagatgctcccaatcccgttgtctttgttgcaaccaaggatacaagggcactcagaaaggctctaacccacttggagatgcggagagccgccaggcgacccaacctcccactgaaggtcaagcccacacttattgcagtgcgaccgcctgttccactgcccgctcccagtcatccagcctccaccaacgagcctatcgtgctcgaggattag

SEQ ID NO: 149143 - DNA, 2007 bp, Artificial Sequence
  derived and/or modified sequence
atggccgcaaatatgtatagagttggagactacgtgtattttgagaattcttcctctaatccctaccttgtgaggagaattgaagagctcaataaaacagccaatggaaatgtggaggctaaagttgtgtgtctcttcagaagaagagatatcagcagctcacttaattctttggccgattcaaacgctcgagaattcgaagaggagtccaagcagccaggcgttagtgaacagcagcgacatcagctgaagcaccgggagctgttcttgtcaaggcagttcgagtcactgcccgcaacccatatccgcggtaagtgcagcgtgaccctgcttaacgaaaccgatattttatctcagtacttggaaaaggaagattgtttcttttatagcctggtctttgaccccgtccagaaaaccttgctcgccgaccagggagaaatcagggtgggctgcaaatatcaggctgagatacctgacaggctagtggaaggtgagtccgataacaggaatcagcagaaaatggagatgaaggtttgggacccggataaccccctgacagatcggcagatcgatcagtttctggtggttgccagggctgttggaacattcgccagggcgcttgattgttcttcttctatccggcaaccgagcctgcatatgtctgcagctgccgcatcgcgagacataacactgtttcacgctatggacactcttcagagaaatgggtacgatctggcaaaagccatgagcaccctagtccctcagggcggtcccgtcctgtgtcgggacgagatggaggaatggtccgcctctgaagccatgctgttcgaagaggccctggaaaagtacggaaaagacttcaacgacattagacaagattttctaccttggaagtcccttgcatctatagtccaattctattacatgtggaagacaactgaccggtatatccaacagaaacggttgaaggccgcagaagccgacagtaagctaaagcaggtgtacattcccacttatactaagcccaatcccaaccaaattatctctgtgggtagcaagccagggatgaatggagcagggtttcagaagggactgacctgtgaatcctgccatactacccagtccgcacaatggtatgcatggggcccacccaacatgcaatgtcgactctgcgccagctgctggatctactggaaaaagtacggcggtctaaaaactcctacccagctcgaaggggcaacacgaggaactaccgaaccccactcaagaggacacctgagccggccagaggcccagtctttgtccccctacacgacttctgcaaaccgggctaagctgctagctaaaaaccgacagacttttttgctgcagaccactaagctcactcgactggccaggcgaatgtgcagagacctgttgcagcccaggcgggctgccaggcgcccatatgccccaattaatgccaacgccataaaggcagagtgcagtataagactgcctaaagcagcgaagactcccttaaaaatccaccccctggtgagattgccgttagcgaccatcgtgaaagacctggtggcccaggctcccctaaaaccaaagacacctcgaggaacaaagactccaataaatcgtaaccaacttagccagaatcgaggtctgggcggaattatggtgaaaagagcgtatgagactatggccggtgccggtgttcctttctctgcaaacgggagacccctggccagtggaatcagatcgtcctctcagcccgcagcaaaacggcaaaagctcaatccagcagacgctcctaatcctgtggtgtttgttgccaccaaagacacgcgggcactcaggaaggccctcactcatcttgaaatgcggcgtgccgctcgcagaccgaacttgcccttgaaagtcaagccgaccctcatcgccgtgcggccacccgtgccactacccgcacccagccaccccgcttcgacaaacgaacctattgtgcttgaagattag

SEQ ID NO: 149144 - DNA, 1488 bp, Artificial Sequence
  derived and/or modified sequence
atggagatgaaggtatgggaccctgacaatcctctgacagaccgtcagattgatcagtttctggtggtagccagagccgtggggactttcgccagggccctggattgttcgtccagtatccggcagcccagccttcatatgtccgctgccgctgcttctcgcgacatcaccctgttccacgcaatggacacccttcagaggaacgggtacgacctggccaaagcgatgagtacattagttcctcaaggaggacctgtgctgtgtagagatgaaatggaggaatggtctgcatctgaggctatgctgttcgaggaggcccttgagaagtatggcaaagattttaacgacatcagacaggattttttaccatggaaaagcctggctagtattgtgcagttttattatatgtggaaaaccacagacagatatattcagcagaagcggctgaaggccgctgaggcggattcaaaacttaaacaggtgtacatacccacttatacgaagcccaaccctaaccagataatcagcgtcggaagcaagccagggatgaacggggcaggcttccagaagggtctcacctgtgaaagttgtcacacaacccagtcagctcagtggtatgcgtgggggccacccaacatgcagtgtaggctttgcgcatcctgttggatctattggaaaaaatatggcggactgaagacacccacacagttggagggtgcaactagaggcacgaccgagcctcacagcaggggacacctgtcacgccctgaagcacaaagtctgagcccgtataccacttccgccaaccgcgcaaagctcctggcgaaaaataggcagacattccttctgcagaccacaaaactgacacggctggctagaaggatgtgtagagatctcctgcaaccacggagagcagcccgtcgaccttacgcccctatcaacgcgaatgcgattaaagccgaatgtagcatccgcctacctaaagctgccaagacccccttgaagattcaccctctggtgagactgccactggccaccattgttaaggatctggtggcccaggcgccacttaagcctaagacaccaagaggcaccaaaacccctataaatcgcaaccagttatcccagaatagaggcctcggcggtattatggtcaaacgagcctatgagaccatggccggagccggtgtacctttcagcgcaaatgggaggccactcgccagcgggatcagatcctcctcacagccagccgctaaacgccaaaagctgaatcctgcagacgctcccaatcctgtagtttttgtggccaccaaagataccagagcgctgaggaaggcccttacgcatctggagatgcgacgggcagcccgtcggccaaatctgccactgaaggtgaagcccacactgattgcggttaggcccccagtgcctttgcccgctccatcacaccctgcttccactaacgagccgatagttctggaagattag

SEQ ID NO: 149145 - DNA, 1488 bp, Artificial Sequence
  derived and/or modified sequence
atggagatgaaagtttgggatcccgataacccactcacggatcgccaaattgatcagtttctggtggtcgctcgcgcagtcggaacattcgccagggcacttgattgtagcagctctatccggcagcctagcttgcatatgtccgcagctgccgcatcccgagatattaccctgtttcacgcaatggacaccctccagcggaatgggtatgacttggccaaggcgatgagcactctcgtcccccagggtggccctgtgctctgtcgggatgagatggaagaatggtcagccagtgaagctatgctctttgaggaagccctggagaaatatggcaaagacttcaacgacattagacaggattttctaccatggaagagcctggcttcaattgtgcagttctactatatgtggaagaccaccgatcgatatattcagcagaaaaggctgaaagccgctgaagccgactccaaactgaagcaggtctatatacccacttatacgaagcccaaccctaaccagattatttccgtgggcagtaagcctggcatgaatggagccggtttccagaagggcttgacctgcgagtcttgccacactacccagtccgcccaatggtacgcctgggggcctccaaatatgcagtgtagactttgcgcgtcctgctggatctattggaagaagtatggaggattgaaaacccccactcaactggagggcgcaacccggggaaccactgaaccccacagcagaggccacctcagtcgcccagaggcccaatctttgtctccatatacaactagcgctaatcgtgctaaactgttggcaaaaaataggcagactttcctgcttcagactacaaaactgactcgcctggcccgaaggatgtgccgagacctcctgcagccccgtcgtgcagctagacgcccatatgctccaataaatgccaacgccataaaagctgagtgttcaatccgattgcctaaggcggctaaaacacccttgaaaatccacccccttgttaggttgcccctcgctactatcgtcaaggatttggttgctcaggctccgcttaagcccaagacaccccgaggaaccaagacaccaatcaaccggaatcagctcagtcaaaacaggggccttggcggaataatggttaaaagggcttatgaaaccatggccggagccggagtcccatttagcgccaacggacgacccctggcctcaggcatccgatcttcgtctcagccagccgctaagagacaaaaattgaaccccgctgatgctcctaaccccgtagtgttcgtcgccacaaaagatactagggccctgcggaaggctctgacacacctagaaatgcgcagggccgctagacgtcctaacctgccacttaaggttaagcctactttgattgccgtgcggccaccagtgcctctcccagcaccctcccatcctgccagcacgaatgagcctatcgttctggaggactag

SEQ ID NO: 149146 - DNA, 2007 bp, Artificial Sequence
  derived and/or modified sequence
atggccgccaacatgtacagagtgggcgactacgtgtacttcgagaacagcagcagcaacccctacctggtgagaagaatcgaggagctgaacaagaccgccaacggcaacgtggaggccaaggtggtgtgcctgttcagaagaagagacatcagcagcagcctgaacagcctggccgacagcaacgccagagagttcgaggaggagagcaagcagcccggcgtgagcgagcagcagagacaccagctgaagcacagagagctgttcctgagcagacagttcgagagcctgcccgccacccacatcagaggcaagtgcagcgtgaccctgctgaacgagaccgacatcctgagccagtacctggagaaggaggactgcttcttctacagcctggtgttcgaccccgtgcagaagaccctgctggccgaccagggcgagatcagagtgggctgcaagtaccaggccgagatccccgacagactggtggagggcgagagcgacaacagaaaccagcagaagatggagatgaaggtgtgggaccccgacaaccccctgaccgacagacagatcgaccagttcctggtggtggccagagccgtgggcaccttcgccagagccctggactgcagcagcagcatcagacagcccagcctgcacatgagcgccgccgccgccagcagagacatcaccctgttccacgccatggacaccctgcagagaaacggctacgacctggccaaggccatgagcaccctggtgccccagggcggccccgtgctgtgcagagacgagatggaggagtggagcgccagcgaggccatgctgttcgaggaggccctggagaagtacggcaaggacttcaacgacatcagacaggacttcctgccctggaagagcctggccagcatcgtgcagttctactacatgtggaagaccaccgacagatacatccagcagaagagactgaaggccgccgaggccgacagcaagctgaagcaggtgtacatccccacctacaccaagcccaaccccaaccagatcatcagcgtgggcagcaagcccggcatgaacggcgccggcttccagaagggcctgacctgcgagagctgccacaccacccagagcgcccagtggtacgcctggggcccccccaacatgcagtgcagactgtgcgccagctgctggatctactggaagaagtacggcggcctgaagacccccacccagctggagggcgccaccagaggcaccaccgagccccacagcagaggccacctgagcagacccgaggcccagagcctgagcccctacaccaccagcgccaacagagccaagctgctggccaagaacagacagaccttcctgctgcagaccaccaagctgaccagactggccagaagaatgtgcagagacctgctgcagcccagaagagccgccagaagaccctacgcccccatcaacgccaacgccatcaaggccgagtgcagcatcagactgcccaaggccgccaagacccccctgaagatccaccccctggtgagactgcccctggccaccatcgtgaaggacctggtggcccaggcccccctgaagcccaagacccccagaggcaccaagacccccatcaacagaaaccagctgagccagaacagaggcctgggcggcatcatggtgaagagagcctacgagaccatggccggcgccggcgtgcccttcagcgccaacggcagacccctggccagcggcatcagaagcagcagccagcccgccgccaagagacagaagctgaaccccgccgacgcccccaaccccgtggtgttcgtggccaccaaggacaccagagccctgagaaaggccctgacccacctggagatgagaagagccgccagaagacccaacctgcccctgaaggtgaagcccaccctgatcgccgtgagaccccccgtgcccctgcccgcccccagccaccccgccagcaccaacgagcccatcgtgctggaggactag

SEQ ID NO: 149147 - DNA, 1488 bp, Artificial Sequence
  derived and/or modified sequence
atggagatgaaggtgtgggaccccgacaaccccctgaccgacagacagatcgaccagttcctggtggtggccagagccgtgggcaccttcgccagagccctggactgcagcagcagcatcagacagcccagcctgcacatgagcgccgccgccgccagcagagacatcaccctgttccacgccatggacaccctgcagagaaacggctacgacctggccaaggccatgagcaccctggtgccccagggcggccccgtgctgtgcagagacgagatggaggagtggagcgccagcgaggccatgctgttcgaggaggccctggagaagtacggcaaggacttcaacgacatcagacaggacttcctgccctggaagagcctggccagcatcgtgcagttctactacatgtggaagaccaccgacagatacatccagcagaagagactgaaggccgccgaggccgacagcaagctgaagcaggtgtacatccccacctacaccaagcccaaccccaaccagatcatcagcgtgggcagcaagcccggcatgaacggcgccggcttccagaagggcctgacctgcgagagctgccacaccacccagagcgcccagtggtacgcctggggcccccccaacatgcagtgcagactgtgcgccagctgctggatctactggaagaagtacggcggcctgaagacccccacccagctggagggcgccaccagaggcaccaccgagccccacagcagaggccacctgagcagacccgaggcccagagcctgagcccctacaccaccagcgccaacagagccaagctgctggccaagaacagacagaccttcctgctgcagaccaccaagctgaccagactggccagaagaatgtgcagagacctgctgcagcccagaagagccgccagaagaccctacgcccccatcaacgccaacgccatcaaggccgagtgcagcatcagactgcccaaggccgccaagacccccctgaagatccaccccctggtgagactgcccctggccaccatcgtgaaggacctggtggcccaggcccccctgaagcccaagacccccagaggcaccaagacccccatcaacagaaaccagctgagccagaacagaggcctgggcggcatcatggtgaagagagcctacgagaccatggccggcgccggcgtgcccttcagcgccaacggcagacccctggccagcggcatcagaagcagcagccagcccgccgccaagagacagaagctgaaccccgccgacgcccccaaccccgtggtgttcgtggccaccaaggacaccagagccctgagaaaggccctgacccacctggagatgagaagagccgccagaagacccaacctgcccctgaaggtgaagcccaccctgatcgccgtgagaccccccgtgcccctgcccgcccccagccaccccgccagcaccaacgagcccatcgtgctggaggactag

SEQ ID NO: 149148 - protein, 115 aa, Artificial Sequence
  derived and/or modified sequence
MSSPSSPFREQSFLCAAGDAGEESRVQVLKNEVRRGSPVLLGWVEQAYADKCVCGPSAPPAPTPPSLSQRVMCNDLFKVNPFQLQQFRADPSTASLLLCPGGLDHKLNLRGKAWG

SEQ ID NO: 149149 - DNA, 348 bp, Artificial Sequence
  derived and/or modified sequence
atgagcagccccagcagccccttcagagagcagagcttcctgtgcgccgccggcgacgccggcgaggagagcagagtgcaggtgctgaagaacgaggtgagaagaggcagccccgtgctgctgggctgggtggagcaggcctacgccgacaagtgcgtgtgcggccccagcgccccccccgcccccaccccccccagcctgagccagagagtgatgtgcaacgacctgttcaaggtgaaccccttccagctgcagcagttcagagccgaccccagcaccgccagcctgctgctgtgccccggcggcctggaccacaagctgaacctgagaggcaaggcctggggctag

SEQ ID NO: 149150 - DNA, 348 bp, Artificial Sequence
  derived and/or modified sequence
atgtcttcaccttctagccccttcagggagcagtcctttttgtgtgctgccggcgacgctggcgaggaatccagagtacaggtcttgaagaatgaggtgcggcgcgggagccccgtgctgttaggatgggtggagcaagcttacgcagacaagtgtgtgtgcggtccatccgcaccccccgctcccacgccaccgtcactttctcagcgcgtgatgtgtaacgatttattcaaggtgaacccttttcaactccagcagttcagagcggaccccagcaccgctagcctccttttatgcccgggtgggttggatcacaaactgaatcttcggggaaaagcctgggggtag

SEQ ID NO: 149151 - DNA, 348 bp, Artificial Sequence
  derived and/or modified sequence
atgagctctccctccagtccttttcgcgaacaaagtttcctgtgtgcggccggcgatgcaggggaggagagccgggtgcaggtgttgaaaaatgaggtcaggcgtggctctccggtattactaggctgggttgaacaggcttacgccgataaatgcgtctgtgggccaagcgctcccccggccccaacgcccccaagtctgtctcagcgcgtcatgtgcaacgatctctttaaggtgaatcccttccaactgcagcagtttcgggctgaccccagcacagcctcactcctactctgccctggcggcctcgatcacaaactgaatttaagggggaaggcctggggctag

SEQ ID NO: 149152 - DNA, 348 bp, Artificial Sequence
  derived and/or modified sequence
atgagcagccccagcagccccttccgggagcagagcttcctgtgtgccgctggagatgctggggaggagagccgggtgcaggtgctgaagaatgaggtgcggcggggcagccctgtgctgctgggctgggtggagcaggcctatgctgacaagtgtgtgtgtggccccagcgcccccccagcccccaccccacccagcctgagccagagggtgatgtgcaatgacctcttcaaggtgaaccccttccagctgcagcagttccgggctgaccccagcacagccagcctgctgctgtgccctgggggcctggaccacaagctgaacctgcggggcaaggcctggggctag

SEQ ID NO: 149153 - DNA, 348 bp, Artificial Sequence
  derived and/or modified sequence
atgagcagccccagcagccccttccgggagcagagcttcctgtgcgcagctggcgatgcaggagaggaatccagagtccaggttctgaagaatgaggtgcggagggggtcaccagttctgctgggctgggttgagcaagcatacgccgataagtgtgtatgcggtcccagtgccccgccagcccccactccaccctccctttcacagcgggtgatgtgtaacgatttattcaaagttaatcccttccagctgcaacagttcagggctgatcccagtaccgcctccctcctcctctgtccaggaggcttggatcacaaacttaatctaaggggaaaagcctggggttag

SEQ ID NO: 149154 - DNA, 348 bp, Artificial Sequence
  derived and/or modified sequence
atgagcagccccagcagccccttccgggagcagagcttcctgtgcgcagctggggatgccggtgaagaaagcagggttcaagtcctgaagaatgaggtgcgccgagggagcccagtgctccttgggtgggttgagcaggcgtacgctgacaaatgtgtgtgtgggccatccgcgccacccgcccctacccccccctctttgtctcagagagtcatgtgtaacgacctgtttaaggttaacccctttcagctgcagcagttccgggctgatccgagtaccgcaagtctactgctctgccctgggggcctggaccacaaactgaacctcagggggaaggcatgggggtag

SEQ ID NO: 149155 - DNA, 348 bp, Artificial Sequence
  derived and/or modified sequence
atgtcatcgcctagtagcccatttcgtgagcagtcgttcttgtgtgctgcgggtgatgccggtgaagaatcccgcgtacaggtattgaagaacgaggttcgccgtgggtcgcccgtgctcctgggctgggtagagcaagcctacgccgacaaatgtgtctgtgggccttcagccccacctgcccctacccctccaagtctgtcccagcgcgtgatgtgcaatgatcttttcaaagtcaacccgttccaattgcagcagttccgcgctgatccgagtacggcctctctcctgctttgcccgggaggtttagatcataagctaaacttacgcggtaaggcctggggatag

SEQ ID NO: 149156 - DNA, 348 bp, Artificial Sequence
  derived and/or modified sequence
atgagttcgcctagctcaccttttcgggagcaaagtttcctctgcgccgcaggcgatgctggagaagaaagtcgcgtccaggtgctcaagaatgaggtgcgcaggggatctcctgtcctgctgggctgggtggaacaggcctacgcagataagtgtgtctgcggaccctctgcaccgccagcccctacccccccaagcctcagtcaaagggtcatgtgtaatgacctgttcaaggtcaatccctttcagttacagcagtttagggcagacccaagtaccgcaagtcttttactgtgtccgggtggcctggaccacaagttgaatctccgcggtaaagcctggggctag

SEQ ID NO: 149157 - DNA, 345 bp, Artificial Sequence
  derived and/or modified sequence
atgtcatctccatcttcacccttcagagagcagtcctttctctgtgcagctggagacgctggtgaggagagccgggtccaggttcttaagaatgaggtgcggaggggctctccggtgctgctgggctgggttgagcaagcctacgcagacaagtgtgtgtgtggaccatccgcacctccagcccccaccccaccctctttgtctcagcgtgttatgtgcaatgacctatttaaggtaaacccattccaactacagcagttcagggctgatccaagcactgcctccctcctgctctgtccaggtggtctggaccataaactcaacttgagagggaaggcttggggt

SEQ ID NO: 149158 - protein, 699 aa, Artificial Sequence
  derived and/or modified sequence
MADAGIRRVVPSDLYPLVLGFLRDNQLSEVANKFAKATGATQQDANASSLLDIYSFWLKSAKVPERKLQANGPVAKKAKKKASSSDSEDSSEEEEEVQGPPAKKAAVPAKRVGLPPGKAAAKASESSSSEESSDDDDEEDQKKQPVQKGVKPQAKAAKAPPKKAKSSDSDSDSSSEDEPPKNQKPKITPVTVKAQTKAPPKPARAAPKIANGKAASSSSSSSSSSSSDDSEEEKAAATPKKTVPKKQVVAKAPVKAATTPTRKSSSSEDSSSDEEEEQKKPMKNKPGPYSSVPPPSAPPPKKSLGTQPPKKAVEKQQPVESSEDSSDESDSSSEEEKKPPTKAVVSKATTKPPPAKKAAESSSDSSDSDSSEDDEAPSKPAGTTKNSSNKPAVTTKSPAVKPAAAPKQPVGGGQKLLTRKADSSSSEEESSSSEEEKTKKMVATTKPKATAKAALSLPAKQAPQGSRDSSSDSDSSSSEEEEEKTSKSAVKKKPQKVAGGAAPSKPASAKKGKAESSNSSSSDDSSEEEEEKLKGKGSPRPQAPKANGTSALTAQNGKAAKNSEEEEEEKKKAAVVVSKSGSLKKRKQNEAAKEAETPQAKKIKLQTPNTFPKRKKGEKRASSPFRRVREEEIEVDSRVADNSFDAKRGAAGDWGERANQVLKFTKGKSFRHEKTKKKRGSYRGGSISVQVNSIKFDSE

SEQ ID NO: 149159 - DNA, 2100 bp, Artificial Sequence
  derived and/or modified sequence
atggccgacgccggcatcagaagagtggtgcccagcgacctgtaccccctggtgctgggcttcctgagagacaaccagctgagcgaggtggccaacaagttcgccaaggccaccggcgccacccagcaggacgccaacgccagcagcctgctggacatctacagcttctggctgaagagcgccaaggtgcccgagagaaagctgcaggccaacggccccgtggccaagaaggccaagaagaaggccagcagcagcgacagcgaggacagcagcgaggaggaggaggaggtgcagggcccccccgccaagaaggccgccgtgcccgccaagagagtgggcctgccccccggcaaggccgccgccaaggccagcgagagcagcagcagcgaggagagcagcgacgacgacgacgaggaggaccagaagaagcagcccgtgcagaagggcgtgaagccccaggccaaggccgccaaggccccccccaagaaggccaagagcagcgacagcgacagcgacagcagcagcgaggacgagccccccaagaaccagaagcccaagatcacccccgtgaccgtgaaggcccagaccaaggccccccccaagcccgccagagccgcccccaagatcgccaacggcaaggccgccagcagcagcagcagcagcagcagcagcagcagcagcgacgacagcgaggaggagaaggccgccgccacccccaagaagaccgtgcccaagaagcaggtggtggccaaggcccccgtgaaggccgccaccacccccaccagaaagagcagcagcagcgaggacagcagcagcgacgaggaggaggagcagaagaagcccatgaagaacaagcccggcccctacagcagcgtgcccccccccagcgcccccccccccaagaagagcctgggcacccagccccccaagaaggccgtggagaagcagcagcccgtggagagcagcgaggacagcagcgacgagagcgacagcagcagcgaggaggagaagaagccccccaccaaggccgtggtgagcaaggccaccaccaagcccccccccgccaagaaggccgccgagagcagcagcgacagcagcgacagcgacagcagcgaggacgacgaggcccccagcaagcccgccggcaccaccaagaacagcagcaacaagcccgccgtgaccaccaagagccccgccgtgaagcccgccgccgcccccaagcagcccgtgggcggcggccagaagctgctgaccagaaaggccgacagcagcagcagcgaggaggagagcagcagcagcgaggaggagaagaccaagaagatggtggccaccaccaagcccaaggccaccgccaaggccgccctgagcctgcccgccaagcaggccccccagggcagcagagacagcagcagcgacagcgacagcagcagcagcgaggaggaggaggagaagaccagcaagagcgccgtgaagaagaagccccagaaggtggccggcggcgccgcccccagcaagcccgccagcgccaagaagggcaaggccgagagcagcaacagcagcagcagcgacgacagcagcgaggaggaggaggagaagctgaagggcaagggcagccccagaccccaggcccccaaggccaacggcaccagcgccctgaccgcccagaacggcaaggccgccaagaacagcgaggaggaggaggaggagaagaagaaggccgccgtggtggtgagcaagagcggcagcctgaagaagagaaagcagaacgaggccgccaaggaggccgagaccccccaggccaagaagatcaagctgcagacccccaacaccttccccaagagaaagaagggcgagaagagagccagcagccccttcagaagagtgagagaggaggagatcgaggtggacagcagagtggccgacaacagcttcgacgccaagagaggcgccgccggcgactggggcgagagagccaaccaggtgctgaagttcaccaagggcaagagcttcagacacgagaagaccaagaagaagagaggcagctacagaggcggcagcatcagcgtgcaggtgaacagcatcaagttcgacagcgagtag

SEQ ID NO: 149160 - DNA, 2100 bp, Artificial Sequence
  derived and/or modified sequence
atggccgacgccggtataagacgggtcgtgccgagtgatctgtatccgctagtccttgggtttctccgcgataaccagctcagcgaagtggctaacaagtttgccaaggccacaggcgccacgcagcaggacgctaacgctagctccctcctagacatttacagcttctggctcaagtcggctaaagtacctgagcgtaagctgcaagctaacggccccgttgctaagaaggctaaaaaaaaagctagctcaagcgactcagaagactcatcagaggaagaagaggaggtgcaagggccccccgccaaaaaggctgcggtgccagccaaacgggttggcttaccaccagggaaggccgctgccaaggccagcgagtcctcctcaagtgaagagagttccgatgatgatgacgaggaggaccagaaaaagcagccagtgcaaaagggagttaagcctcaagcaaaggctgccaaagcccctcctaagaaagctaagtcaagcgatagtgattcagattcttctagtgaggacgaacctcctaagaatcagaagccaaaaattacaccagttactgtgaaggcacagacgaaggctccccctaaaccggctagagcagctccaaagatcgccaacgggaaggctgcaagtagtagctcctcctccagtagttcgagcagtagtgatgattccgaggaggaaaaagcagccgccacacccaaaaagactgtgcctaaaaagcaggtcgtggctaaggcaccagttaaagccgccaccactcctacgcggaagtccagtagctccgaagacagctcaagcgatgaagaagaggagcagaagaagcccatgaagaacaagccaggcccctatagttcagtccccccacccagcgcgccaccccctaagaagagcttgggaacgcagcctcccaaaaaagcggtcgagaaacaacagccagtggagagctctgaagactcatccgacgagagcgatagtagttctgaggaggagaaaaagcccccaactaaggccgtggtgtccaaggctacaaccaagcctcccccagctaagaaggccgcagaatcttctagcgacagtagcgactctgacagcagcgaagatgatgaggcacccagcaagcctgcaggcactacaaaaaacagcagtaacaagcccgcagttactaccaaaagcccagccgtaaagcctgctgctgcccccaagcaaccggtgggtggtggccagaagcttctaaccaggaaagccgatagcagtagctccgaggaggagagcagcagtagcgaagaggaaaagactaagaagatggtcgctaccaccaaaccgaaggccacagccaaggctgcactttccctgccagccaagcaggctccccaaggcagccgtgactcgtcttctgactcggatagtagctcctctgaggaagaagaggagaagacctcaaaatccgcagtgaagaaaaagccacaaaaggttgccggaggcgccgctccatctaagccagcgagtgcaaaaaagggaaaggccgagagttccaattctagttccagtgacgattctagcgaggaggaggaagaaaagctgaagggcaaggggtctcccagaccccaagcaccaaaagcaaatggtacctctgccctgaccgcacagaacggtaaggcagcgaaaaatagcgaagaggaagaggaggaaaagaagaaggcggctgtggttgtgtcaaagagcggaagcctgaagaagaggaaacagaatgaggctgctaaggaggcagagacaccgcaggccaaaaagataaaattacagaccccaaacactttccctaaaagaaaaaagggtgaaaaacgggcgagctcacccttcagaagggtgcgtgaggaggaaatcgaagttgattccagggtggccgacaactcattcgacgccaaacgcggcgctgcgggagattggggggaaagagccaaccaggtcctaaaatttaccaaaggtaagtctttccgtcatgagaaaaccaagaaaaagcgcggatcctaccggggggggagcatatctgtgcaagttaactctataaaatttgacagcgaatag

SEQ ID NO: 149161 - DNA, 3748 bp, Artificial Sequence
  derived and/or modified sequence
ttcctgagtcgtgctgcgtcgacaacggtagtgacgcgtattgcctggaggatggcggacgccggcattcgccgcgtggttcccagcgacctgtatcccctcgtgctcggcttcctgcgcgataaccaactctcagaggtggccaataagttcgccaaagcgacaggagctacacagcaggatgccaatgcctcttccctcttagacatctatagcttctggctcaagtctgccaaggtcccagagcgaaagttacaggcaaatggaccagtggctaagaaagctaagaagaaggcctcatccagtgacagtgaggacagcagcgaggaggaggaggaagttcaagggcctccagcaaagaaggctgctgtacctgccaagcgagtcggtctgcctcctgggaaggctgcagccaaagcatcagagagtagcagcagtgaagagtccagtgatgatgatgatgaggaggaccaaaagaaacagcctgtccagaagggagttaagccccaagccaaggcagccaaagctcctcctaagaaggccaagagctctgattctgattctgactcaagctccgaggatgagccaccaaagaaccagaagccaaagataacacctgtgacagttaaagctcagactaaagcccctcccaaaccagctcgagcagcacctaaaatagccaatggtaaagcagccagtagcagcagtagcagcagcagcagcagtagcagtgatgactcagaggaggagaaggcagcagccacccccaagaagactgtacctaaaaagcaagttgtggccaaggccccagtgaaagcagctaccacccctacccggaagagttctagcagtgaggattcctccagtgacgaggaagaggagcaaaaaaaacccatgaaaaataaaccaggtccctacagttcagtccccccgccttctgctcccccaccaaagaagtctctgggaacccagcctcccaagaaggctgtggagaagcagcagcctgtggaaagcagtgaagacagcagtgatgagtctgattcaagttctgaagaagagaagaaacccccaactaaggcagtagtctctaaagcaaccactaaaccacctccagcaaagaaagcagcagagagctcttcagacagctcagactctgacagctctgaggatgatgaagctccttctaagccagctggtaccaccaagaattcttcaaataagccagctgtcaccaccaagtcacctgcagtgaagccagctgcagcccccaagcaacctgtgggcggtggccagaagcttctgacgagaaaggctgacagcagctccagtgaggaagagagcagctccagtgaggaggagaagacaaagaagatggtggccaccactaagcccaaggcgactgccaaagcagctctatctctgcctgccaagcaggctcctcagggtagtagggacagcagctctgattcagacagctccagcagtgaggaggaggaagagaagacatctaagtctgcagttaagaagaagccacagaaggtagcaggaggtgcagccccttccaagccagcctctgcaaagaaaggaaaggctgagagcagcaacagttcttcttctgatgactccagtgaggaagaggaagagaagctcaagggcaagggctctccaagaccacaagcccccaaggccaatggcacctctgcactgactgcccagaatggaaaagcagctaagaacagtgaggaggaggaagaagaaaagaaaaaggcggcagtggtagtttccaaatcaggttcattaaagaagcggaagcagaatgaggctgccaaggaggcagagactcctcaggccaagaagataaagcttcagacccctaacacatttccaaaaaggaagaaaggagaaaaaagggcatcatccccattccgaagggtcagggaggaggaaattgaggtggattcacgagttgcggacaactcctttgatgccaagcgaggtgcagccggagactggggagagcgagccaatcaggttttgaagttcaccaaaggcaagtcctttcggcatgagaaaaccaagaagaagcggggcagctaccggggaggctcaatctctgtccaggtcaattctattaagtttgacagcgagtgacctgaggccatcttcggtgaagcaagggtgatgatcggagactacttactttctccagtggacctgggaaccctcaggtctctaggtgagggtcttgatgaggacagaagtttagagtaggtcctaagactttacagtgtaacatcctctctggtccttttctgtgttcctagttttgtacagacttgtttttgagtgttgagtagcagggacaaaataagggaatgttattttttaagaaaattcattttcattgttgtctccttccttttctgtgaaagtcctcatactgagaaatttgtatattttatattaaatcacttactattgatttttgttgtgattttcaaaggtggattcccacagataaaatcttggctattgcccaaaacatagtaaagggtcacgtgtgactttttataataggaagaaaattctgcctttgtgagtgcacatgtccacatttcatccctccttccctcaaaaccctagagaggggcattaaagaattgttgatgtatatgcaatgtctgttaagcatgcactatgtatttcatcctcatttattgggtctgggactgaagtttttagccagcatggacctaacctactttttgggataaaattctctgttttgttacaggcaaaattctggtatggcgtgaatgccatgggtcattctgaatatatttttttctgtaattttatcattacacgatgtttgcaatacgtgctttgttttttaatttgaaagcaaacttttctactgttgaaagacattttttgacaacttgacccttcctagtattgagttctaagttgaggactgcatcttctcgttttttacagtatagagaacaaaatgacatgagtttgaaaaatacatatcacttggtattgctgtcttggttgcagtggtgatacagaattggtttcattaattcctacatggttgagaatcactgatcaagaaagtggggggaaaaaaaacaaacgttaaaacctcaatcctcagtaggaaggtagattacattaggtgaaattataggtaatctatgtatgtgctaatggggttggaaagaaccttacagagcatattacctgataaactggagtgggtttgggagaacaaactaataggattattgtgtctcctagttggtacctgggagcaattgacatgcccccttcagaaccttaactgttagtagcagtggctgtaacaacacaaaccagtgaccagagataacagcttttaggccaagctggcctgacggtatggctgcaggaagtgactgagcagtagcggtactcagccagaccaagacggagagggaagagtccacagctttctggaagctaaggcattctggtggtagaaaagtgtgccccaagccttcatggacgagttataggtcttaagattagtctcctcttgtttggattccatacttgctaaataacctgataataacctggttttccatgtaactgcctctaggaagaaaatgtactgttcatgctgacacagatatttcagtctgcatggtaaaagttctaaatcttactacaaaataataaactggctggtttataa

SEQ ID NO: 149162 - DNA, 2100 bp, Artificial Sequence
  derived and/or modified sequence
atggctgatgctggcatcagaagagtggtgcccagcgacctgtaccccctggtgctgggcttcctgcgggacaaccagctgtctgaggtggccaacaagtttgccaaggccaccggggccacccagcaggatgccaatgccagcagcctgctggacatctacagcttctggctgaagagcgccaaggtgcctgagaggaagctgcaggccaatggacctgtggccaagaaggccaagaagaaggccagcagcagtgacagcgaggacagcagcgaggaggaggaggaggtgcagggccccccagccaagaaggctgctgtgcctgccaagagggtgggcctgcccccaggcaaggccgccgccaaggccagcgagagcagcagcagcgaggagagcagtgatgatgatgatgaggaggaccagaagaagcagcctgtgcagaagggcgtgaagccccaggccaaggccgccaaggccccacccaagaaggccaagagcagtgacagcgacagcgacagcagcagtgaagatgagccccccaagaaccagaagcccaagatcacccctgtgacagtgaaggcccagaccaaggccccacccaagccagcccgggccgcccccaagatcgccaacgggaaggccgccagcagcagcagcagcagcagcagcagcagcagcagtgatgacagcgaggaggagaaggccgccgccacccccaagaagacagtgcccaagaagcaggtggtggccaaggcccctgtgaaggccgccaccacccccaccaggaagagcagcagcagcgaggacagcagcagtgatgaggaggaggagcagaagaagcccatgaagaacaagccaggcccctacagctctgtgcccccacccagcgcccccccacccaagaagagcctgggcacccagccccccaagaaggctgtggagaagcagcagcctgtggagagcagcgaggacagcagtgatgaaagtgacagcagcagcgaggaggagaagaagccacccaccaaggctgtggtgtccaaggccaccaccaagcccccaccagccaagaaggctgctgagagcagcagtgacagcagtgacagcgacagcagtgaagatgatgaggcccccagcaagccagctggcaccaccaagaacagcagcaacaagccagctgtgaccaccaagagccctgctgtgaagccagctgctgcccccaagcagcctgtgggcggcggccagaagctgctgaccaggaaggctgacagcagcagcagcgaggaggagagcagcagcagcgaggaggagaagaccaagaagatggtggccaccaccaagcccaaggccacagccaaggccgccctgagcctgcctgccaagcaggccccccagggcagccgggacagcagcagtgacagcgacagcagcagcagcgaggaggaggaggagaagaccagcaagtctgctgtgaagaagaagccccagaaggtggccggcggggccgcccccagcaagccagccagcgccaagaagggcaaggccgagagcagcaacagcagcagcagtgatgacagcagcgaggaggaggaggagaagctgaagggcaagggcagcccccggccccaggcccccaaggccaacggcaccagcgccctgacagcccagaatggcaaggccgccaagaacagcgaggaggaggaggaggagaagaagaaggctgctgtggtggtgtccaagagcggcagcctgaagaagaggaagcagaatgaagctgccaaggaggccgagaccccccaggccaagaagatcaagctgcagacccccaacaccttccccaagaggaagaagggggagaagagggccagcagccccttccggcgggtgcgggaggaggagattgaggtggacagccgggtggccgacaacagctttgatgccaagagaggagctgctggggactggggcgagcgggccaaccaggtgctgaagttcaccaagggcaagagcttcagacatgagaagaccaagaagaagaggggcagctaccggggcggcagcatctctgtgcaggtgaacagcatcaagtttgacagcgagtag

SEQ ID NO: 149163 - DNA, 2100 bp, Artificial Sequence
  derived and/or modified sequence
atggccgacgccggcatccggcgggtggtgcccagcgacctgtacccactcgtcctcggcttccttcgcgacaaccagctaagtgaggtcgcaaacaagtttgctaaagctaccggagcgacccaacaggatgctaatgcatcctctttactagatatctacagcttttggctgaagagcgccaaggtccctgaaagaaaactacaggccaacggccctgtcgccaagaaagccaaaaaaaaggcaagcagttccgactcagaggacagttctgaagaggaagaggaagtgcaggggccgccggcaaaaaaggccgcagtgccggcaaaaagggttggactgccgcctggcaaggctgcggcgaaggccagtgagtcatccagctcagaggaatcttctgacgacgacgatgaggaggaccaaaagaagcagcccgtgcagaaaggcgtcaaacctcaggctaaggctgcaaaggcccctccgaagaaggccaaatcgagcgactccgactctgatagctctagcgaggatgaaccgcctaaaaatcagaaacctaagatcacacccgttactgtgaaagcccagactaaggcccctcctaagccagcacgtgccgcgcctaagatagccaatggcaaggccgcttcctcaagctcctcaagcagttcatcgtcatcaagcgatgactctgaggaggagaaggccgcggctaccccaaaaaaaaccgtaccaaagaaacaggtggtagcaaaggccccggtgaaagcagcaacgacacccactaggaaatcatcctcctctgaagactctagcagcgatgaagaggaggaacaaaagaagccaatgaaaaacaaacccggtccttacagttcggtgcccccaccgtcagcaccaccaccaaaaaaaagcttagggactcagcccccaaaaaaggctgtcgagaaacagcagccagtggaaagcagtgaagattcctcagacgaatctgacagttccagtgaggaagagaaaaaaccacctacaaaggccgtcgtgtctaaggccacaactaagcctccccccgcaaaaaaggccgcggagagtagttctgacagctcggattccgactcaagcgaagatgacgaggcgccctctaagcctgccggcacgacaaagaatagcagcaataaacccgctgttaccaccaaaagccctgcggttaaacccgcagccgcccccaagcagccagttgggggggggcagaaattgcttacacgtaaagccgatagttctagcagcgaggaagaatcctcatccagcgaggaggaaaaaaccaaaaagatggtcgctaccaccaagccaaaggctaccgctaaggccgccctgagtctgcctgctaagcaggcaccccagggatctcgcgattcaagtagcgacagtgatagctcctcttccgaggaggaagaagaaaagacctcaaagagcgctgtaaagaaaaagccccaaaaggtcgcaggcggagcagccccctcaaagcctgcatccgccaagaaggggaaggccgaaagtagcaacagcagtagctccgatgattctagtgaggaggaagaggagaaattgaaggggaaaggctcacctagacctcaggcccctaaggctaacggaacaagtgccctgaccgctcagaatgggaaggctgctaagaattccgaagaggaagaagaggaaaaaaagaaggctgcagtggtcgtcagcaagtccggtagccttaagaagaggaagcagaatgaggccgcaaaggaagccgagaccccccaggccaaaaagatcaagttacagacacccaatacctttcccaaacggaagaaaggcgaaaaacgcgcctcaagcccatttaggcgggtgcgagaggaagaaatcgaagttgactctcgggtggccgacaactcctttgacgccaaacgaggcgcagccggtgactggggagaacgagctaatcaggtccttaaatttacaaaaggcaaatctttcaggcatgaaaagacaaagaagaagaggggtagttaccgaggcgggagcatctcggttcaggtcaatagtatcaaattcgacagcgaatag

SEQ ID NO: 149164 - DNA, 2100 bp, Artificial Sequence
  derived and/or modified sequence
atggctgatgctggcattcgcagggtggtgccctctgacctgtacccattggtgctgggcttcctacgcgacaaccagctctccgaggtggccaataaatttgccaaagccacgggtgccactcaacaggacgccaatgcctcttccttgctggacatttacagcttttggctcaaaagtgccaaagtcccggaaagaaagctacaggccaacggcccagtggcaaagaaggctaaaaaaaaggcgtcgagctctgactcagaagattcttccgaagaagaggaggaggtgcagggaccaccagcaaaaaaagctgccgtgccagcgaaacgtgtcggtctccccccagggaaggcggcagcaaaggccagtgaatcctcgagtagtgaggagtcctccgatgacgacgacgaggaggatcagaaaaagcagccagttcagaaaggggtgaagcctcaggcaaaggctgctaaagctcctccaaagaaggccaaatccagtgatagcgacagtgactccagttctgaagatgagccgcctaagaaccagaaacctaagataacacctgtaactgtgaaagctcaaactaaagctcctcccaagcctgctcgagctgcgcctaagatagctaatggaaaggccgcaagctcttctagcagtagcagttccagctcctccagcgatgattcggaggaagaaaaagcagcagcaacacctaagaaaactgtaccgaagaagcaggtggtggcaaaggcgcctgtgaaagcggctaccactccaactcggaagtccagctcaagcgaggactcgagttccgacgaggaagaagagcagaagaaacctatgaaaaacaagcccggtccttactcaagcgtgccacctccatctgccccaccaccaaaaaaaagcctgggaactcaaccaccaaagaaagcagtagaaaaacagcaaccagtggagtcctcagaggatagcagcgatgaaagtgactcgtccagcgaagaagagaagaaacctccaactaaagccgtcgtcagcaaggccacaacaaaaccaccccctgctaagaaggcggctgagagttcgagtgactccagcgactcggactctagcgaggatgacgaagctcccagcaaacctgcaggcaccacaaaaaattcgtccaataagccagctgtaactactaaatctcccgcagttaagcccgctgcagcccctaagcagcccgtgggaggcggtcagaaactgctcacaagaaaagctgatagctcatccagcgaggaggagtcttctagctctgaagaggagaagactaagaaaatggtagcgacgacaaagcccaaagcaactgctaaagccgctctttccctgcctgcgaagcaggcgcctcagggctctagagattcatcctcagactctgactcctcttcttccgaggaagaggaggagaagaccagtaagagcgctgtgaagaagaagccgcagaaggtggccggaggggctgccccaagtaaaccagcgagcgccaaaaagggaaaagcagagtcttccaattcttcatcctccgatgactcctcggaagaggaggaggagaaactgaagggcaagggcagtcccaggccccaagcacctaaagcgaacgggacctctgccttaacagcacagaatggtaaggctgccaaaaacagtgaggaagaggaggaagaaaaaaagaaagcagctgtcgttgttagcaagtccgggtcattaaaaaaaagaaaacagaacgaagccgcaaaagaggctgaaacaccccaagcaaaaaaaattaaactgcagactccgaacacttttcccaaacgtaagaagggagaaaagagagccagctccccttttcgccgagtccgggaggaggagattgaagtggacagtcgagtcgcagacaactcattcgatgcgaaacgcggagcagcaggggattggggggagcgcgctaaccaggtattaaagttcacgaaggggaaatctttcagacacgagaaaactaagaaaaagagggggtcataccgcggtgggtccattagcgtgcaagtgaattcgattaagttcgactcagaatag

SEQ ID NO: 149165 - protein, 1256 aa, Artificial Sequence
  derived and/or modified sequence
MSKVIQKKNHWTSRVHECTVKRGPQGELGVTVLGGAEHGEFPYVGAVAAVEAAGLPGGGEGPRLGEGELLLEVQGVRVSGLPRYDVLGVIDSCKEAVTFKAVRQGGRLNKDLRHFLNQRFQKGSPDHELQQTIRDNLYRHAVPCTTRSPREGEVPGVDYNFLTVKEFLDLEQSGTLLEVGTYEGNYYGTPKPPSQPVSGKVITTDALHSLQSGSKQSTPKRTKSYNDMQNAGIVHAENEEEDDVPEMNSSFTADSGEQEEHTLQETALPPVNSSIIAAPITDPSQKFPQYLPLSAEDNLGPLPENWEMAYTENGEVYFIDHNTKTTSWLDPRCLNKQQKPLEECEDDEGVHTEELDSELELPAGWEKIEDPVYGIYYVDHINRKTQYENPVLEAKRKKQLEQQQQQQQQQQQQQQQQQQQQTEEWTEDHSALVPPVIPNHPPSNPEPAREVPLQGKPFFTRNPSELKGKFIHTKLRKSSRGFGFTVVGGDEPDEFLQIKSLVLDGPAALDGKMETGDVIVSVNDTCVLGHTHAQVVKIFQSIPIGASVDLELCRGYPLPFDPDDPNTSLVTSVAILDKEPIIVNGQETYDSPASHSSKTGKVNGMKDARPSSPADVASNSSHGYPNDTVSLASSIATQPELITVHIVKGPMGFGFTIADSPGGGGQRVKQIVDSPRCRGLKEGDLIVEVNKKNVQALTHNQVVDMLVECPKGSEVTLLVQRGGLPVPKKSPKSQPLERKDSQNSSQHSVSSHRSLHTASPSHSTQVLPEFPPAEAQAPDQTDSSGQKKPDPFKIWAQSRSMYENRPMSPSPASGLSKGEREREINSTNFGECPIPDYQEQDIFLWRKETGFGFRILGGNEPGEPIYIGHIVPLGAADTDGRLRSGDELICVDGTPVIGKSHQLVVQLMQQAAKQGHVNLTVRRKVVFAVPKTENEVPSPASSHHSSNQPASLTEEKRTPQGSQNSLNTVSSGSGSTSGIGSGGGGGSGVVSTVVQPYDVEIRRGENEGFGFVIVSSVSRPEAGTTFAGNACVAMPHKIGRIIEGSPADRCGKLKVGDRILAVNGCSITNKSHSDIVNLIKEAGNTVTLRIIPGDESSNATLLTNAEKIATITTTHTPSQQGTQETRNTTKPKQESQFEFKAPQATQEQDFYTVELERGAKGFGFSLRGGREYNMDLYVLRLAEDGPAERCGKMRIGDEILEINGETTKNMKHSRAIELIKNGGRRVRLFLKRGDGSVPEYGGSNYENIPSFPGMTP

SEQ ID NO: 149166 - DNA, 3771 bp, Artificial Sequence
  derived and/or modified sequence
atgagcaaagtaatccaaaagaaaaaccactggacctctcgggtacacgagtgcacagtcaagcgagggccccaaggtgagctcggcgtcacagtgctggggggagctgaacatggcgaattcccgtacgtaggtgcagtagcagccgtggaggctgcaggattgccgggtggaggggaagggccgcgactgggggaaggcgagcttttgctggaggtgcagggcgtcagagtgtcaggattaccccgctacgatgtccttggagtgatcgacagctgtaaagaagctgttacatttaaagcagtacggcagggcggccggctgaataaagatttgcgacatttcctgaatcagcggtttcagaaagggagcccagaccatgagctacaacagactatccgggataacctataccgccacgctgtcccatgcactactcggtcaccccgagagggcgaggtacctggcgtggactataattttcttaccgttaaagagttcctggacctcgaacagagcggcactctgctggaagtgggaacatacgaggggaactactacgggacgcctaaacccccgagccagcccgtatctggcaaagtcatcacgacagacgctctccacagccttcagagtggctctaaacagagtacccctaaacggacaaaaagctataatgatatgcagaacgcagggattgttcacgccgagaatgaggaggaggacgatgtgcctgagatgaactcgtccttcactgctgacagcggcgagcaggaagagcacactttgcaagagaccgcgctgcctcccgtcaatagttccatcattgccgcccccatcactgacccttcccaaaaattcccccagtacctgccactgtcggccgaagacaacctgggtcccttgcctgagaactgggagatggcttataccgagaacggagaagtctatttcatcgaccacaacaccaagactacttcttggttggacccacgctgcttgaacaagcagcaaaaaccgcttgaagaatgcgaagacgatgaaggcgtacataccgaagaattagatagtgaactagagctgcctgctggatgggagaagatagaggaccccgtgtacggaatctattacgtggatcatataaatcgaaagactcagtatgagaatcccgtgttggaagctaaaaggaagaagcagctggagcagcagcagcaacagcagcagcaacagcaacagcagcagcagcagcagcagcaacagcagacagaagaatggacagaagaccactctgccttggtgccccccgtgattcccaaccacccaccgtctaatccagaacccgcaagagaggttccgttacagggtaagcctttttttacccggaaccctagcgaactcaaagggaaatttattcacactaagctgcgaaaatctagtaggggattcggcttcaccgttgtgggaggagacgagccggatgagtttttacagattaagtcactggtactggacgggccagccgctcttgacggcaaaatggagaccggcgacgtgatcgtgagcgtcaacgacacatgcgtgttgggacatactcatgctcaggtggtgaagattttccaaagcatcccaataggggcctctgttgatctggaactctgtcgcggttacccactacccttcgatcctgatgaccctaacacttccctcgttacaagcgtggctatcctggataaggaaccaatcattgtgaatggccaagaaacttatgatagtccagcaagtcattcgtcaaaaaccggtaaagtgaacggtatgaaagacgcaagaccaagctcccccgcagacgtggcctccaattcctcacatggttacccaaacgataccgtttcactggcttcctcaatcgctacacaacccgagttgatcacggttcacatcgtcaagggtcctatgggattcgggtttactatcgctgattcaccaggaggtggggggcaacgcgtgaaacagattgtggattcccctcggtgccggggcttgaaggagggagacctcatcgtggaggtgaataaaaagaatgtacaggcgctcactcataaccaggtggttgatatgctggttgagtgcccaaagggttctgaagttacattgctggtacaaaggggcggcctgccagtgccaaagaaatcacccaagagccagccactggaacggaaggattcgcaaaatagttctcagcactcagtgtcctcccacaggagcctccacaccgcatctcccagtcacagcacccaggtgctgcccgagttcccacctgccgaggctcaggcaccagatcagactgactccagtggtcagaagaaacccgaccccttcaagatctgggcacagagtaggtccatgtacgagaaccggcctatgtcacccagccctgcttctggactgtccaagggcgaacgcgaaagggaaatcaacagcactaatttcggagagtgcccgatacctgactaccaggagcaggacattttcctgtggagaaaagaaacgggttttggattccgcattctgggtggcaatgagcccggcgaaccaatttacatcggacacatcgttccactgggggcagccgataccgatggccgcttgagaagtggcgatgagctcatttgtgtggacggcactcctgtcattggcaagagccatcagctcgtcgtgcagctgatgcagcaggcagcaaaacaaggacatgtgaatcttactgtgaggagaaaggttgtgttcgctgtgcctaagacggagaatgaggtgccttccccagcctcatcacatcattctagtaaccaaccggcctcactaacagaggaaaaacgcacgccccagggatcacaaaactcattgaacactgtgtcctccggttccgggagcacaagtggtattgggtctggaggaggtggcgggtcaggcgtggtctctacagtggtccagccgtatgatgtcgagattagaagaggcgaaaatgagggttttggatttgtaattgtcagttctgtgagtcgtcccgaggcagggaccacattcgccgggaacgcatgcgttgccatgcctcacaaaatcgggcggattatagaggggagcccggctgaccgctgcggtaaactaaaggtgggggatcgtattctcgcggtgaacggctgctccatcaccaataagagccattctgacattgtgaacttaatcaaggaagccgggaacaccgtgaccctccgaatcatccccggtgacgagtccagcaatgccaccttattgactaatgcagaaaaaatagccactattacaactactcataccccatcccagcagggcactcaggaaacacggaacaccacaaaacctaagcaagagtctcaatttgagtttaaagcgccccaggcaactcaggaacaggatttttacactgtcgaacttgagcggggtgcaaaaggtttcggcttttccttgagggggggccgggagtataacatggatctgtacgtgttgcgtttggcagaagatggtcctgccgagagatgtggcaagatgagaattggggatgagatcttggaaattaacggcgaaaccaccaagaacatgaaacattcacgggcaatcgagttgatcaaaaacggaggtcgccgggtgcggttgtttttgaagcggggagatggatcagttccagagtacggcgggtcaaactatgagaatatcccaagctttcccggtatgaccccctag

SEQ ID NO: 149167 - DNA, 3771 bp, Artificial Sequence
  derived and/or modified sequence
atgagcaaggtgatccagaagaagaaccactggaccagccgggtgcatgaatgtactgtgaagaggggcccccagggcgagctgggcgtgacagtgctgggcggcgctgagcacggggagttcccctacgtgggcgctgtggccgctgtggaggccgccggcctgcccggcggcggggagggcccccggctgggggagggggagctgctgctggaggtgcagggcgtgcgggtgtctggcctgcccaggtatgatgtgctgggcgtcatcgacagctgcaaggaggccgtgaccttcaaggctgtgcggcagggcggccgcctgaacaaggacctgcggcacttcctgaaccagcgcttccagaagggcagcccagaccacgagctgcagcagaccatccgggacaacctgtacagacatgctgtgccctgcaccaccaggagcccccgggagggggaggtgcctggggtggactacaacttcctgactgtgaaggagttcctggacctggagcagagcggcaccctgctggaggtgggcacctatgagggcaactactacggcacccccaagccacccagccagcctgtgtctgggaaggtgatcaccacagatgccctgcacagcctgcagagcggcagcaagcagagcacccccaagaggaccaagagctacaatgacatgcagaatgccggcatcgtgcatgctgaaaatgaggaggaggatgatgtgcctgagatgaacagcagcttcaccgctgacagcggggagcaggaggagcacaccctgcaggagacagccctgccccctgtgaacagcagcatcatcgccgcccccatcacagaccccagccagaagttcccccagtacctgcccctgtctgctgaggacaacctgggccccctgcctgagaactgggagatggcctacacagaaaatggagaggtgtacttcatcgaccacaacaccaagaccacctcctggctggacccccgctgcctgaacaagcagcagaagcccctggaggagtgtgaagatgatgaaggagtgcacacagaggagctggacagcgagctggagctgcctgctggctgggagaagattgaagatcctgtgtatggcatctactacgtggaccacatcaacaggaagacccagtatgagaaccctgtgctggaggccaagaggaagaagcagctggagcagcagcagcagcagcagcagcagcagcagcagcagcagcagcagcagcagcagcagcagacagaggagtggacagaggaccacagcgccctggtgccccctgtgatccccaaccacccccccagcaaccctgagcccgcccgggaggtgcccctgcagggcaagcccttcttcaccaggaaccccagcgagctgaagggcaagttcatccacaccaagctgaggaagagcagccggggcttcggcttcaccgtggtgggcggagatgagccagatgagttcctgcagatcaagagcctggtgctggatggccctgctgccctggatggcaagatggagactggagatgtgattgtgtctgtgaatgacacctgtgtgctgggccacacccacgcccaggtggtgaagatcttccagagcatccccatcggggcctctgtggacctggagctgtgccggggctaccccctgccctttgatcctgatgaccccaacaccagcctggtgacctctgtggccatcctggacaaggagcccatcatcgtgaatggccaggagacctatgacagccctgccagccacagcagcaagacaggcaaggtgaatggcatgaaggatgcccggcccagcagccctgcagatgtggccagcaacagcagccacggctacccaaatgacacagtgtccctggccagcagcatcgccacccagcctgagctgatcaccgtgcacatcgtgaagggccccatgggcttcggcttcaccatcgctgacagccctgggggcggcggccagagggtgaagcagatcgtggacagcccccgctgccggggcctgaaggagggggacctgattgtggaggtgaacaagaagaatgtgcaggccctgacccacaaccaggtggtggacatgctggtggagtgccccaagggcagcgaggtgaccctgctggtgcagaggggcggcctgcctgtgcccaagaagagccccaagagccagcccctggagaggaaggacagccagaacagcagccagcacagcgtgagcagccacaggagcctgcacacagccagccccagccacagcacccaggtgctgcctgagttccccccagctgaggcccaggccccagaccagacagacagcagcggccagaagaagccagaccccttcaagatctgggcccagagccgctccatgtatgaaaatcggcccatgagccccagccctgccagcggcctgagcaaaggagagcgggagcgggagatcaacagcaccaactttggagaatgtcccatcccagactaccaggagcaggacatcttcctgtggaggaaggagactggatttggcttccgcatcctgggcggcaatgaacctggagagcccatctacatcggccacatcgtgcccctgggcgctgctgacacagatggccgcctgcggtctggagatgagctgatctgtgtggatggcacccctgtgattggcaagagccaccagctggtggtgcagctgatgcagcaggccgccaagcagggccacgtgaacctgactgtgcggaggaaggtggtgtttgctgtgcccaagacagaaaatgaggtgcccagccctgccagcagccaccacagcagcaaccagcctgccagcctgacagaggagaagaggaccccccagggcagccagaacagcctgaacacagtgagcagcggcagcggcagcaccagcggcatcggcagcggcggcggcggcggcagcggcgtggtgtccacagtggtgcagccctatgatgtggagatcagaagaggagaaaatgaaggatttggatttgtgattgtgtcctctgtgtccaggcctgaggccggcaccacctttgctggaaatgcctgtgtggccatgccccacaagattggccgcatcatcgagggcagccctgctgacagatgtgggaagctgaaggtgggggaccgcatcctggccgtgaatggctgcagcatcaccaacaagagccacagcgacatcgtgaacctgatcaaggaggccggcaacacagtgaccctgcgcatcatccctggagatgagagcagcaatgccaccctgctgaccaatgctgagaagatcgccaccatcaccaccacccacacccccagccagcagggcacccaggagaccaggaacaccaccaagcccaagcaggagagccagtttgagttcaaggccccccaggccacccaggagcaggacttctacacagtggagctggagcggggggccaagggcttcggcttcagcctgcggggcggccgggagtacaacatggacctgtatgtgctgcggctggctgaagatggccctgctgagcgctgtgggaagatgagaattggagatgagatcctggagatcaatggagagaccaccaagaacatgaagcacagccgggccatcgagctgatcaagaatggaggccggcgggtgcggctcttcctgaagagaggagatggctctgtgcctgaatatggaggcagcaactatgagaacatccccagcttccctggcatgaccccctag

SEQ ID NO: 149168 - DNA, 4791 bp, Artificial Sequence
  derived and/or modified sequence
cggaatgcaaacaaagctcgcgggcgcctgtgcggggctcgcggggaagcccagaaagtttgttttatgatggcttgagtgcgcgagcgtgtgcaggggagcgaggctgccaagtttctctctcctgttttgtgatttggggagagatgtttctcccatgaacaagcggaggcttgggggctcgtgctgtggggggcacctgtctctcgttttatttttttggaggaggggtgtaactcatcatgtccaaagtgatccagaagaagaaccactggactagcagggttcacgaatgcaccgtgaagcggggaccccagggcgagctgggggtgacggtgctgggaggcgcggagcacggggagtttccgtacgtcggagcggtggcggcggtcgaggcagcggggcttcccggcggcggcgagggcccgaggctgggcgaaggggagctgcttctggaggtgcagggggtccgggtgtccggcttgccccgctatgacgtgctgggggtcatcgacagctgcaaggaggccgtcaccttcaaggccgtcagacaaggaggaaggctgaacaaggacctgcgacattttctcaatcagcgattccagaaggggtctcctgatcatgagctccagcagaccataagggataacctttaccgccatgctgtgccttgcacaacccgatctcccagagaaggagaagtgcctggcgtggactataactttctgactgtgaaggagttcttggacctcgagcagagtgggactcttctggaagtcggcacctatgaaggaaactattatgggacacccaagcctcctagccagccagtcagtgggaaagtgatcacgacggatgccttgcacagccttcagtctggctctaagcagtcgaccccgaagcgaaccaagtcctacaatgatatgcaaaatgctggcatagtccacgcggagaatgaggaggaggatgacgttcctgaaatgaacagcagctttacagccgattctggtgaacaagaggagcacactctccaagaaacagcattaccacctgtgaatagtagcatcatcgctgctcccatcacggacccttctcagaagttccctcaatacctacctctttctgcagaggataatttaggtcctctacctgaaaactgggagatggcctatactgaaaatggagaagtctattttatagaccataacacgaaaacaacatcttggttagaccctcggtgcctaaacaagcagcagaagccactggaagagtgtgaagatgatgaaggggtacacaccgaggagctggacagtgaactagaactgcctgctggttgggaaaagattgaagaccctgtctatggtatctactatgtagaccacatcaacaggaagacacaatatgagaacccggttctagaagccaaacggaagaagcagcttgagcagcagcagcagcagcaacagcagcagcaacagcagcagcagcagcagcagcagcagcagacagaagaatggacagaagatcactcagcccttgtgcctcctgttattccaaaccaccctccaagcaatccagagccagccagagaagttccacttcagggcaaacccttttttacacgaaacccttctgagttgaaaggcaagttcattcacacaaagctgcggaaaagcagtcgtggctttggcttcacggtggttggaggggatgaacctgatgagtttctccagatcaagagcttggtcctagatggtcctgctgcattggatggcaagatggaaacaggggatgtgattgtaagtgtgaatgacacctgtgttttgggacacacacatgctcaagttgtgaagatcttccagtccatccccattggtgccagcgtggaccttgaactctgccgaggttatccattgccttttgatccagatgaccccaatacaagtttagtgacctcggtagccattttggataaagaaccaattattgtgaatgggcaagagacctatgattcaccagctagccacagtagtaaaacaggcaaagtcaatggcatgaaggatgccaggccaagcagcccagcggacgtggcttcaaatagttctcatggttatcctaatgacactgtttctttggcttcctccatagccactcagccagaactcataactgttcatattgtcaaagggccaatgggctttggttttactatcgcagacagtcctggtgggggtggccaaagagtgaaacagattgttgacagcccaaggtgccgaggcctgaaagaaggggatctcatagtggaagttaataagaagaacgtgcaggccctaactcacaaccaagtggtggatatgctggttgagtgtcctaagggaagtgaggtcacattgttggtgcaacgaggagggctgccagttcccaagaagagcccaaagtcgcaaccactggaaaggaaagacagccagaatagttctcagcacagtgtttccagccaccgaagcctgcacacagcatccccaagccacagcacacaggtgctccccgagttcccacctgcagaggcccaagctccagatcaaactgacagctctggccagaaaaaaccagatccttttaaaatctgggcccagtccaggagcatgtatgaaaaccgacctatgtcaccttcacctgcgtcgggattgagcaagggtgagagagagagagaaatcaattccacgaattttggagaatgtccgattccagattaccaggaacaggacatcttcctctggagaaaagagactggatttggatttaggattctgggtggaaatgaaccaggggaacctatttatattggtcacatcgtaccactgggtgctgctgatactgacggccgcctgaggtctggagatgaattaatctgtgtggatgggacgccagtaattggaaaatcacaccagcttgtggtccagcttatgcaacaagctgccaagcaaggccacgtcaatctcacggtgcggcgtaaagtggtttttgcggtgcccaaaaccgagaacgaggtgccctcgccagcctcctctcatcacagtagcaaccagccggcctcgctgacagaagagaagcgcactccgcagggcagccagaactcgctgaacacggtgagctcgggcagcggcagcaccagcggcatcggcagtggcggcggcgggggcagcggcgtggtcagcaccgtggtgcagccctacgacgtggagatccggcgcggggagaacgagggcttcggcttcgtcatcgtgtcctcggtgagcaggcccgaagcaggcacgacctttgcaggcaatgcatgtgtggctatgcctcacaaaataggtcggattattgaggggagccctgctgaccgctgtggcaagctgaaagtaggagaccggatcttggcagtaaatggatgttccatcaccaacaaatcccattcagacattgtgaacctaatcaaggaagcgggaaacacagttaccctccgcatcattcctggggatgagtcctcgaatgccaccttgctgaccaatgcagagaagattgccaccatcaccaccacacacaccccttctcagcaagggacccaggagacaaggaataccaccaaaccaaagcaggaatctcaatttgagttcaaagcaccccaagcaacacaggagcaagatttttacactgtggaactggaaagaggagccaagggatttggctttagccttcgaggaggccgagagtataacatggacctctatgttctgcgcttagcagaggacggtcctgcggagaggtgtggaaagatgaggattggtgatgaaattttagagatcaatggtgagaccaccaaaaacatgaagcattctcgagctatagaactgattaagaatggtggccgcagagttcgtctgtttctgaagcggggagacggctcagtaccagaatatggtgggtcaaactatgaaaacattccttccttccctggcatgactccatgaatttgtctccagaacggcagcaggaaagtcttttttgtttcccctattcaccagtgtcttaccagcctctcgcaccatgtgattatttgcctcgcttgttctgaaatctctacacatttcatccttttgcttgcttacgtggactggggcatggcctaagacaagatctttatagccccctttctgataatcagagagaacgttttgtctagtccgaccaagagcgaaggaatgtttgtttgtactgtgccaaactgttcctcagatccaattgttagcacaaaatgactatatactccttttaagaagcaggaaagcaggtttcctgagtgatatgttgaggcacaattattttttcctttttggttacttggtgtctttatttaagaggcatgaaattttgagagatttgggggctttgctaacctcccttatgctctgtatacaacacttctccatcccccaactggtgtcttaccccaaatcagaccatctgagcccactactatcaaacaaacaaacaaaaactgttaatatattagccataatgtttttaaatgataaaggatgaaataaattcccagtgctcatcatgagggaaacatgtgactatacctttcctatgaggaaagccaggttatacatagagttcctttgtcatatctttagacttgatttgagtagacagcaatgatctttacatagcttagtgttctgatggcaaaatattgtatatgataataattatgtcctatttatttgagatttgtgtttaaaa

SEQ ID NO: 149169 - DNA, 3771 bp, Artificial Sequence
  derived and/or modified sequence
atgagcaaggtgatccagaagaagaaccactggaccagccgggtgcatgagtgtaccgtgaagagggggccacaaggcgaactgggtgtgaccgtgctgggcggcgccgaacacggagaattcccctatgttggggccgtggcagcagtggaggccgcagggctgcccggcggcggcgaaggaccaaggctcggggaaggtgagttgctgctggaagtgcagggcgttagggtgtctggcctgccccggtacgacgttctgggggtaatcgatagctgcaaggaggccgtaacattcaaggcagtcaggcaagggggaaggctgaataaagacctgcgccattttctaaaccaacggttccaaaaaggatcccctgatcacgagctgcaacaaaccatccgggacaacctatacaggcacgctgtgccatgcaccactcgctcccccagagagggagaagtgccgggagtagactataatttcttgacagttaaggagtttctggatctggaacagagcggaaccttgcttgaggtcgggacgtatgagggtaactattatggaacgcccaagccacctagccaaccagtctccggaaaagtaatcactactgatgcgctgcatagtctgcagtccggatctaagcagtccaccccaaaaagaaccaaaagttataacgatatgcaaaatgccgggattgtacacgctgaaaatgaagaggaggatgacgtgcccgaaatgaactcatccttcaccgcagacagcggtgagcaagaagagcacaccctacaagagactgccctgccacccgtgaactcttccatcatagccgctcctattaccgacccgtctcagaaattcccccagtatcttcccctttctgctgaggataacttaggtcccttacccgagaattgggagatggcctatactgaaaatggggaggtgtactttatcgatcataacaccaagaccactagttggctcgatccacggtgtcttaataagcaacagaagcccctcgaagaatgtgaagacgatgaaggagtgcataccgaggagctggatagcgaactggaactgcccgccgggtgggaaaaaatcgaggatcccgtctatggcatctactacgtagaccatattaataggaagacccagtatgagaatcctgtgttagaagcaaaaaggaaaaagcagttagagcaacaacaacaacagcagcagcagcagcagcaacagcagcaacagcaacagcagcagcagactgaggaatggaccgaggaccactctgctctggtgccgcccgtgataccaaatcatcctccctctaaccccgagcccgcaagagaggtgcctctgcagggcaaacccttctttacacggaatcctagcgaacttaagggcaagttcattcatacaaagttacgaaaatcatcacggggcttcggatttaccgtcgtgggaggcgacgagccggatgagttcctccaaatcaaatcactggttctcgatggtcccgcggccctcgatggaaagatggagacaggagatgtgatagtgtccgttaatgatacctgtgttttgggccacacccatgcccaggtagtgaaaatctttcagtctatccccatcggagcatccgtggacctcgagctgtgcagaggttatcccctaccttttgatccggacgacccgaataccagtctggttacaagtgtagccatccttgacaaagaaccaatcatcgttaatggccaggaaacatacgactcccccgctagccactcttcgaagacgggcaaggtgaacggcatgaaagatgccagaccttccagcccagccgatgtcgcgagtaactcgtctcatgggtatccaaatgatactgtgagcctggccagctctattgccactcagcccgaactcataacagtgcacattgtcaagggaccaatgggctttggattcacaattgccgactcccctggcggtggagggcagcgagtcaagcagatcgtcgactctcccagatgccgcggactgaaggagggcgacttaatcgtggaggtgaacaagaagaatgtccaggcgctgactcacaatcaggtagtggatatgctggtagaatgccctaaaggcagcgaagtcacattattagtgcaacggggaggacttccagtccccaagaaatccccaaaatcgcagccacttgagcggaaagacagtcagaatagcagtcaacatagcgtgagctcacatcgcagtttacacacggcaagtccttcccacagcacacaggtgttgccagagtttcctccagcggaagcccaggcccctgaccagactgactcaagcggacaaaaaaaacctgatccgtttaaaatctgggcccagagcagaagtatgtatgagaatagacccatgagcccctctcctgcctcagggctcagcaagggcgagcgagagcgagaaattaattccactaacttcggagagtgccccattccagactaccaggagcaagatatcttcttgtggaggaaagagactgggttcggatttaggatattgggcggtaatgagcccggtgaacccatctatattgggcacatagtccctctgggggccgccgataccgacgggcgactgaggtctggcgatgaactcatatgcgttgacgggacccccgtgatcggaaaaagccatcagctcgtggtccagctgatgcagcaggccgctaagcagggccacgtgaatttaacagtaagacgaaaggtcgtgtttgccgtgcccaaaaccgagaacgaagtccctagccccgccagctcgcaccactctagcaatcagcctgcttccctgaccgaggaaaaacgtacacctcagggctcccagaatagcctgaatacggtatcgtccggcagcgggtctacctccggtatcggctcagggggcggtggcgggtccggggtggtatcaaccgtcgtccagccatacgatgttgagatcagaaggggagagaacgaggggttcggcttcgtaatagtctctagtgtaagcaggcccgaggcagggacaacttttgctggcaacgcgtgcgtcgcaatgccacataaaattggtagaattatcgaggggagccccgctgaccgttgtggaaaactgaaagtcggtgaccgcatccttgctgtcaacggatgctccattactaataagtctcactccgacatagtgaacttgatcaaagaagcgggcaatacagtaaccctgaggatcatccctggagacgaaagtagtaatgcaacccttctgaccaatgcagagaagatcgctacaataacaacaacacatacgccaagtcaacagggaacccaagagacccggaatactactaagcctaagcaagagtcccagtttgaatttaaggccccacaggctacccaagagcaagacttctataccgtcgagcttgaacggggtgcaaagggtttcgggttttccctgagggggggcagggaatataacatggatctgtatgtgctcaggttggctgaggatggacccgctgagcggtgtggtaagatgcggatcggagatgaaattctggaaattaacggtgagaccaccaagaacatgaagcacagccgcgccattgaactgataaagaatggggggcgacgggtacgcctttttctcaagcgtggagatgggtccgtacctgaatacgggggtagcaactacgagaacattccttcatttcctggcatgactccctag

SEQ ID NO: 149170 - DNA, 3771 bp, Artificial Sequence
  derived and/or modified sequence
atgagcaaagtgattcaaaagaaaaatcactggacttctcgggttcacgagtgtaccgtaaagcgcggtccacagggtgaattaggtgtaactgtcctcgggggtgctgagcatggagagttcccctacgttggcgcagtggccgctgtggaagcagctgggctcccagggggaggtgaaggacctcgcctgggcgagggtgagttgttgctggaggtacagggggtacgggtgtccgggctcccaaggtatgacgtgctcggcgtgatagactcctgcaaggaagcagtgacattcaaggccgtgcgtcaggggggacgcctgaataaggacctccggcacttcctgaaccagaggttccagaagggcagccccgaccacgagcttcaacagactatacgggataacctgtacaggcatgccgttccctgtacaactcggtcacccagggaaggcgaagtgcctggtgtggattacaacttcctgacagtcaaggaattccttgacctggagcaatctggtacattactggaagtcgggacttacgaagggaactattatggaacgccaaagcctccaagccagcctgtttcggggaaagtgatcactaccgatgccctgcattctcttcagtcggggagtaagcagagcactccaaaaagaacaaagtcgtataacgatatgcaaaatgctgggatcgttcacgctgaaaatgaggaggaggacgacgtacccgaaatgaatagtagcttcactgcagacagcggtgagcaggaggagcacaccttgcaggagacagcacttccccctgtcaattcatctatcatagctgctcccatcaccgatcccagccaaaaatttccacagtatctcccactgagcgctgaggataacctgggtcctctgccggagaactgggaaatggcatatacagaaaacggtgaggtttattttattgaccataacacaaaaacaacatcttggctggaccctcggtgtctgaataagcagcaaaaaccacttgaggagtgcgaggatgacgagggggtgcacactgaggagctggactccgaactcgagctaccagccggttgggagaagattgaagaccccgtctatgggatatactacgtagaccacataaatcgcaagactcagtacgagaacccagtgctggaagcaaagaggaagaagcaattggagcagcagcagcagcagcagcaacagcaacagcaacagcagcagcagcaacaacagcagcagacagaagaatggactgaggatcattctgcactcgtgcccccagtaattccaaatcaccctcccagcaacccagaaccggctagggaggttcctctgcagggcaaaccttttttcactcgcaatccaagtgaactcaaagggaaattcatacacactaagctaaggaaatctagcaggggcttcggcttcacggtggtcggtggggacgaacccgacgagttcttgcagatcaagtctctcgtactggatgggccagcagccctagacggtaagatggagactggggacgttatcgtatcagtcaacgatacttgcgtgctgggccatacccacgctcaagttgtgaagatattccagagtattcccattggggcatcagtcgatctggagttgtgccgcggttaccctctccccttcgaccctgatgacccaaacacctcactcgtaacttcggtggcaatattggacaaagagcctatcatcgtgaacgggcaagagacctacgattcccccgcatcgcactcctctaagactggaaaggtcaacggtatgaaagatgccagaccctcgtcacccgctgacgttgctagcaattcatctcatgggtatcctaatgacaccgtctcactagcctccagcatcgcaactcagcccgagctcattacggtgcacatcgtgaaggggccaatgggctttgggtttacaattgccgacagtccgggaggcggtggccaaagggttaagcagatagtcgactcgcccaggtgtaggggccttaaagagggtgacctgattgtagaggtgaataagaaaaatgtccaggcactcacgcacaatcaggtggtggatatgctcgttgaatgcccaaagggatctgaggtcaccctgttggtgcagcggggtgggctgcccgttcctaaaaaaagtcccaagtcccagccattggagcgcaaggattcccaaaactctagccagcattccgttagctcacatcgcagcctgcataccgcctcaccatctcactccacccaagtgctgcccgaattcccaccagcagaggctcaggcaccagaccagactgattctagtggccagaaaaaacctgacccattcaagatttgggcacagagtcgtagtatgtacgagaaccgcccaatgagtccaagccccgcttccggactttccaagggagaacgggagcgggagattaacagtaccaacttcggggagtgccccattcccgactaccaagaacaggacatttttctttggcggaaagagactgggttcgggttccgcattctggggggaaacgaacctggagaacctatctatatcggacatatcgtacccctaggcgctgccgacactgatggacgcctgcggtccggagatgagctgatctgtgtggacggcacaccagtcatcggcaagagtcaccagctggttgtgcagctcatgcaacaggccgcaaagcagggtcatgtcaatctgacagtcagacgcaaggttgtctttgcggtgccaaagaccgagaatgaggtcccatctccagcaagctcccatcacagcagcaaccagccagctagcttaaccgaggaaaagcggacacctcaagggtctcagaacagtcttaacactgtgtcctcggggtccggtagtacgtctggaattggctctggcggtggcggtgggtccggggtagtcagcaccgtggtacagccgtacgacgtggaaatacggaggggtgaaaacgaggggtttggctttgtgatcgtgagttccgtgtctagacccgaagccggaactaccttcgccggaaacgcttgcgtggctatgccacacaagatcggcagaattatagagggtagtcctgccgatagatgtgggaagctcaaagtcggcgaccggatccttgctgtgaatggctgttctataactaacaaatcccactcagacatcgtgaatctgatcaaagaagctggcaacactgtgactctgcgcatcatccccggtgatgaaagcagcaacgccaccctgctcaccaatgccgagaagatagcaaccatcactacaacccacaccccctctcaacagggtacccaggagacccgtaatactactaagccaaaacaggaatcacagtttgagtttaaggcccctcaggccacccaggagcaggatttttacaccgtcgaactcgaacgcggtgccaagggatttggtttttcactccggggtggtcgagaatataacatggatctgtatgttctgagactggctgaagacggccctgcagaaagatgtgggaaaatgaggattggggatgaaattttggagatcaatggcgaaaccactaaaaatatgaagcatagtcgagcaattgagttaattaagaacggtggccgtcgagttagattgttcctgaaaaggggagacggttcagtgcccgagtacggagggtcaaactatgaaaacattccctccttccccggaatgacaccctag

SEQ ID NO: 149171 - DNA, 3771 bp, Artificial Sequence
  derived and/or modified sequence
atgagcaaggtgatccagaagaagaaccactggaccagcagagtgcacgagtgcaccgtgaagagaggcccccagggcgagctgggcgtgaccgtgctgggcggcgccgagcacggcgagttcccctacgtgggcgccgtggccgccgtggaggccgccggcctgcccggcggcggcgagggccccagactgggcgagggcgagctgctgctggaggtgcagggcgtgagagtgagcggcctgcccagatacgacgtgctgggcgtgatcgacagctgcaaggaggccgtgaccttcaaggccgtgagacagggcggcagactgaacaaggacctgagacacttcctgaaccagagattccagaagggcagccccgaccacgagctgcagcagaccatcagagacaacctgtacagacacgccgtgccctgcaccaccagaagccccagagagggcgaggtgcccggcgtggactacaacttcctgaccgtgaaggagttcctggacctggagcagagcggcaccctgctggaggtgggcacctacgagggcaactactacggcacccccaagccccccagccagcccgtgagcggcaaggtgatcaccaccgacgccctgcacagcctgcagagcggcagcaagcagagcacccccaagagaaccaagagctacaacgacatgcagaacgccggcatcgtgcacgccgagaacgaggaggaggacgacgtgcccgagatgaacagcagcttcaccgccgacagcggcgagcaggaggagcacaccctgcaggagaccgccctgccccccgtgaacagcagcatcatcgccgcccccatcaccgaccccagccagaagttcccccagtacctgcccctgagcgccgaggacaacctgggccccctgcccgagaactgggagatggcctacaccgagaacggcgaggtgtacttcatcgaccacaacaccaagaccaccagctggctggaccccagatgcctgaacaagcagcagaagcccctggaggagtgcgaggacgacgagggcgtgcacaccgaggagctggacagcgagctggagctgcccgccggctgggagaagatcgaggaccccgtgtacggcatctactacgtggaccacatcaacagaaagacccagtacgagaaccccgtgctggaggccaagagaaagaagcagctggagcagcagcagcagcagcagcagcagcagcagcagcagcagcagcagcagcagcagcagcagaccgaggagtggaccgaggaccacagcgccctggtgccccccgtgatccccaaccacccccccagcaaccccgagcccgccagagaggtgcccctgcagggcaagcccttcttcaccagaaaccccagcgagctgaagggcaagttcatccacaccaagctgagaaagagcagcagaggcttcggcttcaccgtggtgggcggcgacgagcccgacgagttcctgcagatcaagagcctggtgctggacggccccgccgccctggacggcaagatggagaccggcgacgtgatcgtgagcgtgaacgacacctgcgtgctgggccacacccacgcccaggtggtgaagatcttccagagcatccccatcggcgccagcgtggacctggagctgtgcagaggctaccccctgcccttcgaccccgacgaccccaacaccagcctggtgaccagcgtggccatcctggacaaggagcccatcatcgtgaacggccaggagacctacgacagccccgccagccacagcagcaagaccggcaaggtgaacggcatgaaggacgccagacccagcagccccgccgacgtggccagcaacagcagccacggctaccccaacgacaccgtgagcctggccagcagcatcgccacccagcccgagctgatcaccgtgcacatcgtgaagggccccatgggcttcggcttcaccatcgccgacagccccggcggcggcggccagagagtgaagcagatcgtggacagccccagatgcagaggcctgaaggagggcgacctgatcgtggaggtgaacaagaagaacgtgcaggccctgacccacaaccaggtggtggacatgctggtggagtgccccaagggcagcgaggtgaccctgctggtgcagagaggcggcctgcccgtgcccaagaagagccccaagagccagcccctggagagaaaggacagccagaacagcagccagcacagcgtgagcagccacagaagcctgcacaccgccagccccagccacagcacccaggtgctgcccgagttcccccccgccgaggcccaggcccccgaccagaccgacagcagcggccagaagaagcccgaccccttcaagatctgggcccagagcagaagcatgtacgagaacagacccatgagccccagccccgccagcggcctgagcaagggcgagagagagagagagatcaacagcaccaacttcggcgagtgccccatccccgactaccaggagcaggacatcttcctgtggagaaaggagaccggcttcggcttcagaatcctgggcggcaacgagcccggcgagcccatctacatcggccacatcgtgcccctgggcgccgccgacaccgacggcagactgagaagcggcgacgagctgatctgcgtggacggcacccccgtgatcggcaagagccaccagctggtggtgcagctgatgcagcaggccgccaagcagggccacgtgaacctgaccgtgagaagaaaggtggtgttcgccgtgcccaagaccgagaacgaggtgcccagccccgccagcagccaccacagcagcaaccagcccgccagcctgaccgaggagaagagaaccccccagggcagccagaacagcctgaacaccgtgagcagcggcagcggcagcaccagcggcatcggcagcggcggcggcggcggcagcggcgtggtgagcaccgtggtgcagccctacgacgtggagatcagaagaggcgagaacgagggcttcggcttcgtgatcgtgagcagcgtgagcagacccgaggccggcaccaccttcgccggcaacgcctgcgtggccatgccccacaagatcggcagaatcatcgagggcagccccgccgacagatgcggcaagctgaaggtgggcgacagaatcctggccgtgaacggctgcagcatcaccaacaagagccacagcgacatcgtgaacctgatcaaggaggccggcaacaccgtgaccctgagaatcatccccggcgacgagagcagcaacgccaccctgctgaccaacgccgagaagatcgccaccatcaccaccacccacacccccagccagcagggcacccaggagaccagaaacaccaccaagcccaagcaggagagccagttcgagttcaaggccccccaggccacccaggagcaggacttctacaccgtggagctggagagaggcgccaagggcttcggcttcagcctgagaggcggcagagagtacaacatggacctgtacgtgctgagactggccgaggacggccccgccgagagatgcggcaagatgagaatcggcgacgagatcctggagatcaacggcgagaccaccaagaacatgaagcacagcagagccatcgagctgatcaagaacggcggcagaagagtgagactgttcctgaagagaggcgacggcagcgtgcccgagtacggcggcagcaactacgagaacatccccagcttccccggcatgaccccctag

SEQ ID NO: 149172 - protein, 977 aa, Artificial Sequence
  derived and/or modified sequence
MKGLSGSRSHHHGVTCDSACDSLSHHSDRKPYLLSPVEHHPADHPYYTQRNSFQAECVGPFSDPLASSTFPRRHYTSQQELKDECALVPRTLATKANRIPANLLDQFERQLPLSRDGYHTLQYKRTAVEHRSDSPGRIRHLVHSVQKLFTKSHSLEGPSKGSVNGGKASPDEAQAARYGKRSKSKERRAEPKARPSTSPGWWSSDDNLDGDMCIYHAPSGVMTMGRCPDRSASQYFLEAYNTISEQAVKASRSNNDVKCSTCANLPVSLDTPLLKKSAWSSTLTVSRAREVYQKASVNMDQAMVKSESCQQERSCQYLQVPQDEWTGYTPRGKDDEIPCRRMRSGSYIKAMGDEDSGDSDTSPKPSPKVAARRESYLKATQPSLTELTTLKISNEHSPKLQIRSHSYLRAVSEVSINRSLDSLDPAGLLTSPKFRSRNESYMRAMSTISQVSEMEVNGQFESVCESVFSELESQAVEALDLPMPGCFRMRSHSYVRAIEKGCSQDDECVSLRSSSPPRTTTTVRTIQSSTVSSCITTYKKTPPPVPPRTTTKPFISITAQSSTESAQDAYMDGQGQRGDIISQSGLSNSTESLDSMKALTAAIEAANAQIHGPASQHMGNNTATVTTTTTIATVTTEDRKKDHFKKNRCLSIGIQVDDAEEPDKTGENKAPSKFQSVGVQVEEEKCFRRFTRSNSVTTAVQADLDFHDNLENSLESIEDNSCPGPMARQFSRDASTSTVSIQGSGNHYHACAADDDFDTDFDPSILPPPDPWIDSITEDPLEAVQRSVCHRDGHWFLKLLQAERDRMEGWCQQMEREERENNLPEDILGKIRTAVGSAQLLMAQKFYQFRELCEENLNPNAHPRPTSQDLAGFWDMLQLSIENISMKFDELHQLKANNWKQMDPLDKKERRAPPPVPKKPAKGPAPLIRERSLESSQRQEARKRLMAAKRAASVRQNSATESAESIEIYIPEAQTRL

SEQ ID NO: 149173 - DNA, 2934 bp, Artificial Sequence
  derived and/or modified sequence
atgaagggcctgagcggcagcagaagccaccaccacggcgtgacctgcgacagcgcctgcgacagcctgagccaccacagcgacagaaagccctacctgctgagccccgtggagcaccaccccgccgaccacccctactacacccagagaaacagcttccaggccgagtgcgtgggccccttcagcgaccccctggccagcagcaccttccccagaagacactacaccagccagcaggagctgaaggacgagtgcgccctggtgcccagaaccctggccaccaaggccaacagaatccccgccaacctgctggaccagttcgagagacagctgcccctgagcagagacggctaccacaccctgcagtacaagagaaccgccgtggagcacagaagcgacagccccggcagaatcagacacctggtgcacagcgtgcagaagctgttcaccaagagccacagcctggagggccccagcaagggcagcgtgaacggcggcaaggccagccccgacgaggcccaggccgccagatacggcaagagaagcaagagcaaggagagaagagccgagcccaaggccagacccagcaccagccccggctggtggagcagcgacgacaacctggacggcgacatgtgcatctaccacgcccccagcggcgtgatgaccatgggcagatgccccgacagaagcgccagccagtacttcctggaggcctacaacaccatcagcgagcaggccgtgaaggccagcagaagcaacaacgacgtgaagtgcagcacctgcgccaacctgcccgtgagcctggacacccccctgctgaagaagagcgcctggagcagcaccctgaccgtgagcagagccagagaggtgtaccagaaggccagcgtgaacatggaccaggccatggtgaagagcgagagctgccagcaggagagaagctgccagtacctgcaggtgccccaggacgagtggaccggctacacccccagaggcaaggacgacgagatcccctgcagaagaatgagaagcggcagctacatcaaggccatgggcgacgaggacagcggcgacagcgacaccagccccaagcccagccccaaggtggccgccagaagagagagctacctgaaggccacccagcccagcctgaccgagctgaccaccctgaagatcagcaacgagcacagccccaagctgcagatcagaagccacagctacctgagagccgtgagcgaggtgagcatcaacagaagcctggacagcctggaccccgccggcctgctgaccagccccaagttcagaagcagaaacgagagctacatgagagccatgagcaccatcagccaggtgagcgagatggaggtgaacggccagttcgagagcgtgtgcgagagcgtgttcagcgagctggagagccaggccgtggaggccctggacctgcccatgcccggctgcttcagaatgagaagccacagctacgtgagagccatcgagaagggctgcagccaggacgacgagtgcgtgagcctgagaagcagcagcccccccagaaccaccaccaccgtgagaaccatccagagcagcaccgtgagcagctgcatcaccacctacaagaagacccccccccccgtgccccccagaaccaccaccaagcccttcatcagcatcaccgcccagagcagcaccgagagcgcccaggacgcctacatggacggccagggccagagaggcgacatcatcagccagagcggcctgagcaacagcaccgagagcctggacagcatgaaggccctgaccgccgccatcgaggccgccaacgcccagatccacggccccgccagccagcacatgggcaacaacaccgccaccgtgaccaccaccaccaccatcgccaccgtgaccaccgaggacagaaagaaggaccacttcaagaagaacagatgcctgagcatcggcatccaggtggacgacgccgaggagcccgacaagaccggcgagaacaaggcccccagcaagttccagagcgtgggcgtgcaggtggaggaggagaagtgcttcagaagattcaccagaagcaacagcgtgaccaccgccgtgcaggccgacctggacttccacgacaacctggagaacagcctggagagcatcgaggacaacagctgccccggccccatggccagacagttcagcagagacgccagcaccagcaccgtgagcatccagggcagcggcaaccactaccacgcctgcgccgccgacgacgacttcgacaccgacttcgaccccagcatcctgcccccccccgacccctggatcgacagcatcaccgaggaccccctggaggccgtgcagagaagcgtgtgccacagagacggccactggttcctgaagctgctgcaggccgagagagacagaatggagggctggtgccagcagatggagagagaggagagagagaacaacctgcccgaggacatcctgggcaagatcagaaccgccgtgggcagcgcccagctgctgatggcccagaagttctaccagttcagagagctgtgcgaggagaacctgaaccccaacgcccaccccagacccaccagccaggacctggccggcttctgggacatgctgcagctgagcatcgagaacatcagcatgaagttcgacgagctgcaccagctgaaggccaacaactggaagcagatggaccccctggacaagaaggagagaagagcccccccccccgtgcccaagaagcccgccaagggccccgcccccctgatcagagagagaagcctggagagcagccagagacaggaggccagaaagagactgatggccgccaagagagccgccagcgtgagacagaacagcgccaccgagagcgccgagagcatcgagatctacatccccgaggcccagaccagactgtag

SEQ ID NO: 149174 - DNA, 6154 bp, Artificial Sequence
  derived and/or modified sequence
tgcccaagacgggtctggagcctgacttccgggtgtccatgaccctggcggctgcttccggtccgccatgaaagggctatcaggcagccgcagccatcaccacggggtcacctgcgactcggcctgtgactcgctgtcgcaccactccgaccgcaagccctacctgctgagcccagtggagcaccaccccgcagaccacccatactacacccagcggaactccttccaggctgagtgcgtgggccccttcagcgacccgctggccagcagcaccttcccccgcaggcactacacctcgcagcaagagctgaaggacgagtgtgccctggtgccccgcaccctggccaccaaggcgaaccgcatccccgccaacctgctggaccagttcgagcggcagctgccactcagccgcgatggctatcacaccctgcagtacaagcgcacggccgtggagcaccgcagcgacagccccggccgcatccgccacctggtgcactcggtccagaagctcttcaccaagtcgcactccctggaggggccgtccaagggcagcgtcaacgggggcaaggccagccctgacgaggcgcaggcggcgcgctatggcaaacgcagcaagagcaaggagcggcgcgcggagcccaaggcccggcccagcacctccccgggctggtggagctcggacgacaacctggatggtgacatgtgcatctaccacgccccctcgggcgtgatgaccatgggcaggtgccccgaccgctcggcctcacagtacttcctggaggcctacaacaccatcagcgagcaggcggtgaaggcctcccggagcaacaacgacgtcaagtgctccacctgcgccaacctgccggtcagcctggacaccccgctgctgaagaagagcgcctggtcctccacgctcaccgtgagccgggcccgggaggtttaccagaaggcctcggtgaacatggaccaggccatggtgaagtccgagtcgtgtcagcaagaacgctcctgccagtacctgcaggttccacaagatgaatggacagggtacaccccacgaggtaaagatgatgaaattccatgccgaagaatgcggagtggcagttatatcaaggccatgggggatgaagacagtggagactcagacacgagtcctaagccttctccaaaagttgctgcgcggagagaaagctatctcaaggctactcagccatcccttacagaactcaccacactcaaaatctccaatgaacactcacccaaactccagatccggagtcatagttacctgagggcagtgagtgaagtctccatcaaccggagcctggacagcctggaccctgcaggcttgctcacatcaccaaagttccgctccaggaatgagagctacatgcgagccatgagcaccatcagccaggtgagcgagatggaagtgaacgggcagttcgagtccgtgtgcgagtccgtgttcagcgagctggagtcgcaggccgtggaagcgctggacctgcccatgcccggctgcttccgcatgcggagccacagctatgtgcgggccattgagaaaggctgctcccaggacgacgagtgcgtgtccctgaggtcgtcctcgccgccgcgcaccaccaccaccgttaggaccatccagagcagcacggtgtcatcttgcattacaacatataagaagacaccacctccagtcccacccagaactaccacgaaacctttcatttctatcacagcccagagtagcacagagtcagcccaggatgcctacatggacggacagggccagcgaggagatattatcagccagtctggactcagcaactccaccgagagcctggacagtatgaaggctctgacagccgccatcgaagctgcaaacgcccagatccatggccctgccagtcaacacatgggcaataacactgccaccgtcaccaccacgactaccatagccaccgtcaccacggaggacaggaagaaggaccactttaagaaaaatcgatgcctgtctatcgggatacaggtggatgatgctgaagaacctgacaaaacaggggagaataaagcacccagtaagttccagtccgtgggagtgcaagtagaagaagagaagtgcttccgcaggttcactcgatccaacagtgtgacgacagcagtacaggccgacctggacttccatgataatctggaaaattctctggaatctatagaggacaattcgtgtcctggccccatggccagacagttctcccgcgatgccagcacctccacagtcagcattcagggctcaggaaaccattaccatgcctgtgccgccgatgatgactttgacacggattttgacccctctattctgcctcctccggacccctggattgactctatcactgaagaccctctggaggccgtgcaaaggtcagtgtgccaccgggatggccactggttcctgaagcttctccaggcagagcgagaccgcatggaggggtggtgtcaacagatggagcgggaagaacgggaaaacaacctgcccgaagacattctaggaaaaatccgaaccgcagtgggcagtgcccaacttctcatggcccagaaattctaccagttcagagaactgtgtgaagaaaacctgaatcctaatgctcatccaagacccacctcccaggatttggcggggttttgggacatgctgcagttgtccatagaaaatattagtatgaaatttgatgaacttcatcagttaaaggccaataattggaaacagatggatcctcttgacaagaaggagagaagggcccctcctccagtgccaaagaagccggcgaagggccccgcgccgctgatccgggagcgctcgctggagagctcgcagcgccaggaggcccgcaagcgcctgatggccgccaagcgcgccgcgtccgtccgccagaactcggccaccgagagcgccgagagcatcgagatctacatccccgaggcgcagacccggctctgagcgccccgcagcccggccgccgccgccaagcatctgtcccctcctcccccggccgctcctctgccggctgcctctccccctccgagcccgtccgctcccgagctcggtgacttccactgtcgcggtgtagttgtccacctcgcaggagccgccccccgggcccccctcagccccccacttcccgtacccgtttgcccatctccttcttcaccgagcttcgccccctgtcctgatgccgtcgccctgcctcatactgagatccaaccctttattttctgggcaaagccaaacccacctgtgtagaagtgatgcctttaggtcacccgccgtcctcagttctctcgagctagtctgttcagcaatataaaaccatagggtatttcagaaatccagtatcacagggtgatcctttgggacttaccgtcttccacgtgaaagaaactaggcctccgattccctttatttcccctaaatggttattcttttaaaaaagcagatggagcactttattcccaacctcagaaatcacaccatctcactggaatccatgagggacacagagagaggggaccaagcctggcctgggggtgggggacctggatgtgtagcaaggatgggagaagcgaaatctgcaggtgctgggggcacctgcacactcacagctgcacaaactgcctcactgttacttcatcaatcacagcttcaaatgtctcaatcagcagaagattgtaaattcgatctttcagggaaattaatctattctgaaaggcaataacatgaagcaaggcaaaggaggcactgatggtttagtatactacataagggatttttttgttctattattaagaaaatctagacctgaaatgttttctcaactcttattgtactgtgtatatttatattgttgtcgtggcggctgtttttaaagggaaagtgttggttctattaatttgttaagtgtccatccaggtgggcctacctgattccacatatataagtacatatctgcttataaagcgctgtaaatggcagcaaggctgtttttggagaagagtttgggttttcctaccatccctttgaatgctacacatccgtctattttaacccaagtagttcgtatttcagatatattttctcctttcatctcctctcactactgcagagtccagtaatacctagcataggattctgtcctgtgtcaaatggctaaaataaatttttgccccaatagacatgctgcctcattcaaaagagctgccgctgtcatcttgaggttccaggtagtgagagaagaaactcgacctgccagggtcaacagccatgaagaggtggggggagtcatgattcataaacactgaaagaagtcaaggcttttggcagagagtgttgatttagatttttagtcttgattgatgggcagtatgcatcggtgtctagctgaagttgtctttaaatgcccttactcgtcacagtttaaacacttaggatgtggcaatcttaagtatcaatggcattttatgtccagctaacatcctaaagcattagaaattaaaaacgaaagacttttaaaaacatacatcaaacatgcttgcaccagagaagctttttaaaataatacactctcatagccaggtgctaatttaattttacttatgaaattaagagaggtgatgggttctagcaacagatattttcacggacatattctaaaaccactagagaattcgctacctctcagagccatcgatgctttgagctacctttataaacagggcacaaatgtttactgctgtggtttacaagaaaagggctactcacttattttgaaaccaacgaaccaacttttaactagggtgaacaaagcactcaaagtgctttgtgaaattggagcatacagagattttgagcttcaagtatttgctagttttaaaaagaatacaccttttctttaccttgtagcagcaattaaaagtcacacaaagcttgcatcgagtagggccaactgccacttgggtagcctatggtcacattcaatactgagaatgacttggaactcacagattaatatgaaagaagcagcgttcatcccaagacccatgctcacaattacagctccgtgccctgaggtagagttgagatttggattaagaaatagatttctaatacgactcaagatcatcctacaatattttctttggaaactaatttagcccatgatattttaaagagagacaagagaaggcctatttatcttgtctaagtgaacggcatttgtatattcataagctatttttggtaagaattttaaatcttttagctcaaggcctacagggcatcatgatctttgccttccttgaaaatacaatttaaattgtacaaacactttataaaaagctaattattggtgttagaacatgaccccacacaatgctgcttgacccctgaaactgacattcatgagcataacctttgttacattgttctttttgatgtaatttgtagaaatgttttttagttcgtaatggaaaatgtatgtaccctgaaaaattacttattttgtttaactttggtataaaggtgttgggcattttcttggggagggggggattacaaaagaagtttgtctcccacatcaaaaaacgttcaaagaaattaagtatttattatattttttgcagatgtttccatacaattcacataacctttttgtaaagagagatgaagaaatggattaaagatttttaatatttgaaatggtaaatagaactaatttattgtaatatatttctgttatttatagatgtttccttaatgttttactgtgcattaccactttcatttaagccttatccttgtgaatttaccatttcttttttaaaacatgtctagatgcatattttaaataactggaatgtaaatcactagcatatctgaattcccaaatgtaatttttaaaaattattttggtttggaaaaaaaagattcatttgaaagccttcagatggaggggtgggaacatttttatggctttatgaattggaatttcataggcttatttacctagattgtgtgtgaacaaaaaaatattgtaaatagatgaatgtttcccataatgtaaaaagaagaaattaataaaataattaatgcactgct

SEQ ID NO: 149175 - DNA, 2934 bp, Artificial Sequence
  derived and/or modified sequence
atgaagggcctctctgggtcaaggagccatcatcatggtgtcacgtgtgactctgcgtgtgacagcctttcgcaccactctgataggaaaccctaccttctttccccggtggagcatcatccagccgatcatccctactatactcagcgcaactccttccaggcagagtgcgttgggccgttctccgatcctctcgcctcttctacctttccacgccgccattacacaagccagcaagagctcaaagatgagtgtgcgctggtgcccaggacattagctaccaaggcaaatcgaatccccgcaaacctcctggatcagttcgagcgacagttacctctgtcccgtgatggttatcataccttacagtataaacgaacagccgttgaacaccgaagtgacagtccgggtaggattagacatctggtgcactcggtacaaaagctgttcactaaaagtcactccttagagggaccaagcaaagggagcgtcaatggagggaaggcctccccagacgaagcccaggccgcacgatatggcaaacgcagcaaatctaaggaacggagggccgagcccaaggccagaccttctacctcccccggatggtggtcttccgatgataatctggacggcgacatgtgcatataccacgcacccagcggggtgatgaccatgggtcggtgcccggaccgtagtgcttctcagtactttctcgaagcttacaacactatcagtgaacaggcggtgaaggcttccaggtctaataacgacgttaagtgcagcacatgtgccaatctccccgtctcattggacacccccctgcttaaaaaatcagcctggagttctacgcttacagtctcacgtgcgagagaggtatatcagaaggctagcgtcaatatggaccaggcaatggtgaagagtgagagctgccagcaggaacgctcgtgccagtatttgcaggttcctcaggatgagtggacaggctacacaccgagaggaaaagacgacgagattccgtgtagacgaatgagaagcggttcttacatcaaagctatgggtgacgaagattccggggatagcgacacctctcctaagccgtcgccgaaggtggctgctaggagagaaagttatctaaaagcaacacagcccagtctcactgaactcaccactttaaaaatctcaaatgagcatagcccaaaattgcagatacgatcccactcttaccttcgagccgtcagcgaagtgagcataaataggtccctagatagcttggatcctgcaggtctgctcacgtctcctaaatttcggagtaggaatgagagctacatgcgcgctatgagtacgatctcacaagtctcagagatggaggtcaacggccagttcgagtccgtgtgtgaaagcgtgtttagcgagctggagtcccaggccgttgaggccctcgacttaccaatgcccggttgctttaggatgagaagtcactcctacgtccgcgcaattgagaagggctgtagccaagacgatgaatgtgtctcgctgcgaagctcctcaccccctcgcaccactactacggtgaggaccatacagagctccacagtctcctcttgcatcactacctacaaaaaaaccccacctcctgtgcctcctaggacaaccaccaagccttttatctctatcacagcccagtccagcactgagtcagcccaggacgcatacatggatgggcaagggcagaggggcgatattatttcacagagcggattgtccaacagcactgagagtctggattctatgaaagctcttaccgccgctattgaggccgctaatgcccagatccacggtcccgcctcacagcacatgggcaacaacactgcaacagtgactactaccaccaccatcgcaacagtgaccacggaggaccggaagaaagatcatttcaagaagaatcgctgcttgagcatcggaatccaggtcgacgatgccgaagaacctgataaaactggggagaataaggctccatctaaatttcagtctgtcggagttcaggtcgaggaggagaaatgctttcgcagattcacccgctctaatagtgtgacaacggcagtgcaggctgacttggactttcatgacaatcttgagaacagtcttgaatccatcgaggataactcatgcccgggcccgatggctagacagtttagtcgggatgccagtacgagcactgtcagcatccagggcagcggtaaccattaccacgcgtgtgccgcagacgatgatttcgatacagacttcgatcctagtattctgccccctccggacccgtggatcgactctatcacagaggatcctttggaggcagtccagagaagcgtgtgtcacagagacgggcattggtttttgaagctgctgcaggctgagagggaccgcatggagggctggtgtcagcagatggaaagagaggagagggaaaacaacctccctgaagacatcctgggaaaaatcagaactgcggtggggtcagctcagctcctgatggcccaaaagttttatcagtttagagagttatgtgaagaaaacctgaatcctaatgcacatcctaggccaacaagccaagacctcgcggggttttgggacatgctccaactctctatcgaaaacatctcaatgaagtttgatgagcttcaccagctgaaggccaacaactggaaacagatggacccccttgacaagaaagagcggagagccccaccccccgtgcctaaaaaacccgccaagggaccagcgcccctgatccgcgaacgcagcttggaaagcagtcagcgtcaagaggccagaaaacggttgatggctgccaaaagggcagcgagcgtgagacagaactccgccaccgagagcgccgagtccatcgagatctacatacccgaggctcagacacggttatag

SEQ ID NO: 149176 - DNA, 2934 bp, Artificial Sequence
  derived and/or modified sequence
atgaagggcctgagcggcagccgcagccaccaccacggcgtgacctgtgacagcgcctgtgacagcctgagccaccacagcgacaggaagccctacctgctgagccctgtggagcaccaccctgctgaccacccctactacacccagaggaacagcttccaggccgagtgtgtgggccccttcagtgaccccctggccagcagcaccttcccccggcggcactacaccagccagcaggagctgaaggatgaatgtgccctggtgcccaggaccctggccaccaaggccaaccgcatcccagccaacctgctggaccagtttgagcggcagctgcccctgagcagagatggctaccacaccctgcagtacaagaggacagctgtggagcacagaagtgacagccctggccgcatccgccacctggtgcacagcgtgcagaagctgttcaccaagagccacagcctggagggccccagcaagggctctgtgaatggaggcaaggccagcccagatgaggcccaggccgcccgctatggcaagaggagcaagagcaaggagaggagagctgagcccaaggcccggcccagcaccagccctggctggtggagcagtgatgacaacctggatggagacatgtgcatctaccacgcccccagcggcgtgatgaccatgggccgctgcccagacagaagtgccagccagtacttcctggaggcctacaacaccatcagcgagcaggccgtgaaggccagccgcagcaacaatgatgtgaagtgcagcacctgtgccaacctgcctgtgtccctggacacccccctgctgaagaagagcgcctggagcagcaccctgactgtgtcccgggcccgggaggtgtaccagaaggcctctgtgaacatggaccaggccatggtgaagtctgagagctgccagcaggagaggagctgccagtacctgcaggtgccccaggatgagtggacaggctacaccccccggggcaaggatgatgagatcccctgcaggaggatgaggagcggcagctacatcaaggccatgggagatgaggacagcggggacagcgacaccagccccaagcccagccccaaggtggccgcccggcgggagagctacctgaaggccacccagcccagcctgacagagctgaccaccctgaagatcagcaatgagcacagccccaagctgcagatccgcagccacagctacctgcgggctgtgtctgaggtgtccatcaacagaagcctggacagcctggaccctgctggcctgctgaccagccccaagttccgcagcagaaatgaaagctacatgagggccatgagcaccatcagccaggtgtctgagatggaggtgaatggccagtttgagagcgtgtgtgagagcgtcttcagcgagctggagagccaggccgtggaggccctggacctgcccatgcctggctgcttcaggatgaggagccacagctatgtgcgggccatcgagaagggctgcagccaggatgatgaatgtgtgtccctgcggagcagcagcccccccaggaccaccaccaccgtgaggaccatccagagcagcacagtgagcagctgcatcaccacctacaagaagaccccacctcctgtgccccccaggaccaccaccaagcccttcatcagcatcacagcccagagcagcacagaaagtgcccaggatgcctacatggatggccagggccagagaggagacatcatcagccagagcggcctgagcaacagcacagagagcctggacagcatgaaggccctgacagctgccattgaagctgccaatgcccagatccacggccctgccagccagcacatgggcaacaacacagccaccgtgaccaccaccaccaccatcgccaccgtgaccacagaggacaggaagaaggaccacttcaagaagaaccgctgcctgagcatcggcatccaggtggatgatgctgaggagccagacaagacaggagagaacaaggcccccagcaagttccagagcgtgggcgtgcaggtggaggaggagaagtgcttccgccgcttcaccaggagcaacagcgtgaccacagctgtgcaggccgacctggacttccatgacaacctggagaacagcctggagagcattgaggacaacagctgccccggccccatggcccggcagttcagcagagatgccagcaccagcacagtgtccatccagggcagcggcaaccactaccacgcctgtgccgcagatgatgactttgacacagactttgaccccagcatcctgcccccaccagacccctggattgacagcatcacagaggaccccctggaggccgtgcagaggtctgtgtgccacagagatggccactggttcctgaagctgctgcaggccgagcgggacaggatggagggctggtgccagcagatggagcgggaggagcgggagaacaacctgcctgaggacatcctgggcaagatcagaacagctgtgggcagcgcccagctgctgatggcccagaagttctaccagttccgggagctgtgtgaggagaacctgaaccccaatgcccacccccggcccaccagccaggacctggccggcttctgggacatgctgcagctgagcattgagaacatctccatgaagtttgatgagctgcaccagctgaaggccaacaactggaagcagatggaccccctggacaagaaggagcggcgggcccctcctcctgtgcccaagaagccagccaagggccctgcccccctcatccgggagaggagcctggagagcagccagaggcaggaggccaggaagaggctgatggccgccaagagagctgcctctgtgcggcagaacagcgccacagagagcgctgagagcattgagatctacatccctgaggcccagacccggctgtag

SEQ ID NO: 149177 - DNA, 2934 bp, Artificial Sequence
  derived and/or modified sequence
atgaagggcctgagcggcagccggagccaccaccacggcgtgacctgcgactcagcatgtgactctttgtcacaccacagcgatcgaaagccttacctcttgtctcccgttgaacatcatccagcagaccatccgtactacacacaacgcaatagcttccaggctgaatgcgtggggccttttagcgatcccctcgcatctagcacctttcctcgtcgtcactacaccagtcaacaggagctaaaggatgagtgtgcacttgtacctcgcacacttgcaactaaagctaaccggatccccgccaaccttctcgaccagttcgaaagacagctccctctatctagggatggctaccataccctgcagtacaagcggacagcagtcgagcataggtcagactctccaggcagaatccgtcatcttgtccattctgtgcagaagctctttacaaaatcccatagtctagagggcccctcgaaaggcagcgtgaacggcggcaaggcatcaccggatgaagcccaagctgcgcgatacggcaaaaggagtaagtctaaagaaagacgcgctgagccaaaggccagaccatcgacgtcacccgggtggtggtccagcgacgacaatcttgacggcgatatgtgcatctaccacgccccatcgggggtgatgactatggggcggtgcccagatcgatctgcatctcagtattttctggaagcctataacaccataagcgaacaggcagttaaggcctcccgcagtaataatgatgtgaaatgttccacctgtgctaatctccctgtgtcactagacacgcctctcctcaagaagtccgcttggtcatccacactgacagtgtcaagagccagagaggtgtaccagaaagcgtctgtgaacatggatcaagccatggtgaaatctgaatcatgccagcaggaacgctcctgtcagtacttgcaggtcccgcaagacgagtggacgggttatacccctcgcggaaaggatgatgaaattccgtgtcgccggatgaggtctggcagttacatcaaggcaatgggcgacgaggacagcggtgattccgacacttcccccaaaccctccccaaaggtggctgctcgccgggagtcctatctgaaggccacacaacctagtctgaccgagctgaccactctgaagatcagtaatgagcatagtccgaagttacaaattaggtcacattcatatttacgggcagtgtcagaggtatctatcaataggtcccttgacagtctcgacccagcgggccttctgacaagccccaaattcaggtctcgcaatgaaagctacatgcgggcaatgtccaccatttcgcaagtgagcgagatggaagtcaatggacagttcgagtccgtgtgcgaaagcgtgttctcagaactggaatcacaggcggtcgaggcgcttgatctgcctatgccagggtgtttccgcatgagatcccattcatacgtgcgggcaatcgagaaaggatgttcacaagacgatgagtgtgtctcacttcggagtagctcacctccacgcactacaacaaccgttaggacaattcagtcatccacggtaagttcatgcataacaacctacaagaagacccctccacccgtaccacctagaaccacaacaaagcctttcatctcaattacagcccaaagtagcacagagtctgctcaggatgcttacatggacgggcaaggacaaagaggagacatcatctcccagagtggcctgagcaactctactgaatctcttgactctatgaaggcactgaccgccgctatcgaagccgccaacgcacaaatccacggacctgcatcgcaacacatgggaaataataccgccacggtgactaccacgaccaccatcgcaacggttaccaccgaagacagaaaaaaagatcacttcaaaaaaaatcgctgcctaagtatcgggattcaagtagacgatgccgaagaacccgataaaaccggagagaacaaggcccccagtaagttccagtctgtgggagtgcaagttgaggaagaaaagtgcttcagaagatttacgagatccaatagtgtgactaccgctgtccaggcagatctggatttccacgacaatcttgagaactctctggagtccatcgaggataattcctgcccaggacccatggccaggcagttctctcgcgacgctagcacgagtaccgtgtcaatccagggaagcgggaatcattaccacgcttgtgctgctgatgacgatttcgacaccgatttcgacccttcaatactacctccgcccgacccctggatcgacagcatcaccgaggacccgcttgaggccgtccagcgctcggtttgccacagggatggacattggttcttgaagcttctgcaggctgagcgcgatcgcatggaggggtggtgtcagcagatggaacgcgaagagcgagaaaataatttgcccgaagacatcctgggcaagattcgcactgctgtgggttcggcccaattactgatggctcaaaaattctaccagtttcgcgagctctgtgaggaaaacctgaaccctaatgcccatccccgccccactagccaggacttagcagggttctgggatatgctgcagcttagtattgaaaatatctcgatgaagttcgatgagctgcatcaactgaaggccaacaattggaagcaaatggacccactcgacaagaaagagcgcagagctccccctccagttccaaaaaagccggccaagggccctgcacccctgatccgggaaagatccttggagtctagtcagcggcaggaggcgaggaagaggttaatggctgctaaacgggccgcctctgtgcgccaaaacagtgcaacagaaagtgctgagtctattgaaatttacatcccggaggctcaaaccagattgtag

SEQ ID NO: 149178 - DNA, 2934 bp, Artificial Sequence
  derived and/or modified sequence
atgaagggactgtctggcagccgaagccaccaccacggggtcacctgcgatagtgcttgcgattccctgtcccaccactccgatcggaagccctacctgttatcaccagtggagcatcaccccgctgaccacccgtactacacccagcgcaacagctttcaggccgaatgcgtgggtcctttttcggatcctctagccagtagcacgtttccaaggagacactatactagtcagcaggagctgaaggatgagtgtgctctcgttccacgtacactcgccaccaaggcaaaccggatccctgcaaacttgctggatcagttcgagcggcagcttcccctttctcgcgatggctaccacacactgcagtacaagaggacggccgtggaacaccggagtgactccccgggtagaatccggcaccttgtgcattctgtgcagaagttatttacaaaatctcattctctggaggggccaagcaaaggatcagttaatggcggaaaagctagccccgacgaggctcaggccgctcgctacgggaaacggtccaaatctaaagaacgtagagccgagcctaaagcgagaccaagtaccagcccaggttggtggagttcggatgataatctggacggtgatatgtgcatctaccacgcgccttctggtgtaatgacaatggggaggtgccctgaccggagcgcgagccagtacttcttagaggcctataacactatttccgagcaggctgtcaaagccagtcggtccaataatgacgtgaagtgcagcacctgtgcaaatctccccgttagcctggacacccctctgctcaagaaatccgcgtggagtagcacccttaccgtgtcccgcgctagggaagtttaccaaaaagcgtctgtgaatatggatcaggcaatggttaaaagcgaaagctgtcagcaggagcgttcctgccaatacttgcaggttccccaggatgagtggacaggctatactccgcgtggaaaggatgacgagattccgtgtagaagaatgcgctcaggatcatatattaaggccatgggagatgaagatagcggcgactccgacacctctcccaagcctagcccaaaagtggctgcgagaagggaatcgtacctcaaggctacacagccttctctgacagagctcactaccctgaagattagcaacgaacatagccccaaactgcagattaggagccacagctaccttagggctgtgtcagaagtgagcataaaccgctcattggactctctggacccagctgggcttctcacgagtcccaagttccgcagccggaatgaaagttacatgcgtgccatgagtacaattagccaggtgtcagagatggaggtgaacggccaattcgaatctgtgtgtgaaagcgtgttctctgagctggagtcccaagcggttgaggctctggatctgcctatgccaggctgtttccgaatgaggtcccactcctacgtaagagcaatcgagaagggatgctcacaggatgatgagtgcgtgtcccttagatcctctagcccaccacgcaccacaacaactgtgaggacaatacagtctagcactgtgtcgtcctgcattacgacatacaagaagactcctccgcctgtgcccccacgcacgacaacaaaaccctttatttccatcacagcccagtcgtcaacagaaagcgcccaggatgcatacatggatggccaggggcagaggggcgacatcatttcacaatctggactcagcaactctactgaaagtttggattccatgaaggccctgacggcagccatcgaagccgcaaatgctcagattcatgggccagcaagtcagcacatgggcaacaataccgctactgtgacgaccacaacaactatagctacagttactacggaggaccgtaagaaagaccattttaaaaaaaataggtgtctcagtattgggattcaagttgacgacgctgaagagcccgacaaaactggagagaacaaggccccatcaaagttccagagcgtgggagtgcaggtggaagaggagaagtgttttcggagattcacacgcagtaattctgttactaccgccgtgcaggcagacctcgattttcatgacaacctggagaatagccttgagtccatagaagacaacagctgccccggacctatggcaagacagttttcacgagacgccagcacatctaccgtgagtattcaggggagtggcaaccattaccatgcttgcgcagctgatgacgattttgacactgattttgatccgtcaattctgccgccaccagacccttggattgacagtattacagaggacccgttggaggccgtccagcgcagcgtatgccatcgcgatggccactggtttctcaagctcctgcaggctgaacgggatcggatggaaggctggtgccagcagatggaacgtgaagagcgagagaacaacctgcctgaggatatcttggggaaaattcgcaccgccgtcgggtcagcccaacttttgatggcccagaaattctaccagttccgcgagctgtgcgaagaaaacctgaatcccaatgctcacccccgaccgacatctcaggacttagctggcttctgggacatgcttcagttatcaatagagaatatcagtatgaagttcgacgagctgcatcagctcaaggctaataattggaagcagatggatcctctggataagaaagagcgcagagctcccccacccgtgcctaagaaacccgcaaaaggcccagcaccacttatccgggagagaagtctggaaagttctcagcgccaggaagcccgaaagagactgatggctgcgaagcgcgctgcctccgtgcgccaaaactccgctacagagtcggccgagagtatcgagatctatatccctgaggcacagacccggctctag

SEQ ID NO: 149179 - protein, 1919 aa, Artificial Sequence
  derived and/or modified sequence
MEPQRRELLAQCQQSLAQAMTEVEAVLGLLEAAGALSPGERRQLDEEAGGAKAELLLKLLLAKERDHFQDLRAALEKTQPHLLPILYLNGVVGPPQPAEGAGSTYSVLSTMPSDSESSSSLSSVGTTGKAPSPPPLLTDQQVNEKVENLSIQLRLMTRERNELRKRLAFATHGTAFDKRPYHRLNPDYERLKIQCVRAMSDLQSLQNQHTNALKRCEEVAKETDFYHTLHSRLLSDQTRLKDDVDMLRRENGQLLRERNLLQQSWEDMKRLHEEDQKEIGDLRAQQQQVLKHNGSSEILNKLYDTAMDKLEVVKKDYDALRKRYSEKVAIHNADLSRLEQLGEENQRLLKQTEMLTQQRDTAIQLQHQCALSLRRFEAIHHELNKATAQNKDLQWEMELLQSELTELRTTQVKTAKESEKYREERDAVYSEYKLIMSERDQVISELDKLQTEVELAESKLKSSTSEKKAANEEMEALRQIKDTVTMDAGRANKEVEILRKQCKALCQELKEALQEADVAKCRRDWAFQERDKIVAERDSIRTLCDNLRRERDRAVSELAEALRSLDDTRKQKNDVSRELKELKEQMESQLEKEARFRQLMAHSSHDSAIDTDSMEWETEVVEFERETEDIDLKALGFDMAEGVNEPCFPGDCGIFVTKVDKGSIADGRLRVNDWLLRINDVDLINKDKKQAIKALLNGEGAINMVVRRRKSLGGKVVTPLHINLSGQKDSGISLENGVYAAAVLPGSPAAKEGSLAVGDRIVAINGIALDNKSLNECESLLRSCQDSLTLSLLKVFPQSSSWSGQNIFENIKDSDKMLSFRAHGPEVQAHNKRNLIQHNNSTQTDIFYTDRLEDRKEPGPPGGSSSFLHKPFPGGPLQVCPQACPSASERSLSSFRSDASGDRGFGLVDVRGRRPLLPFETEVGPCGVGEASLDKADSEGSNSGGTWPKAMLSSTAVPEKLSVYKKPKQRKSIFDPNTFKRPQTPPKIDYLLPGPGPAHSPQPSKRAGPLTPPKPPRRSDSIKFQHRLETSSESEATLVGSSPSTSPPSALPPDVDPGEPMHASPPRKARVRIASSYYPEGDGDSSHLPAKKSCDEDLTSQKVDELGQKRRRPKSAPSFRPKLAPVVIPAQFLEEQKCVPASGELSPELQEWAPYSPGHSSRHSNPPLYPSRPSVGTVPRSLTPSTTVSSILRNPIYTVRSHRVGPCSSPPAARDAGPQGLHPSVQHQGRLSLDLSHRTCSDYSEMRATHGSNSLPSSARLGSSSNLQFKAERIKIPSTPRYPRSVVGSERGSVSHSECSTPPQSPLNIDTLSSCSQSQTSASTLPRIAVNPASLGERRKDRPYVEEPRHVKVQKGSEPLGISIVSGEKGGIYVSKVTVGSIAHQAGLEYGDQLLEFNGINLRSATEQQARLIIGQQCDTITILAQYNPHVHQLSSHSRSSSHLDPAGTHSTLQGSGTTTPEHPSVIDPLMEQDEGPSTPPAKQSSSRIAGDANKKTLEPRVVFIKKSQLELGVHLCGGNLHGVFVAEVEDDSPAKGPDGLVPGDLILEYGSLDVRNKTVEEVYVEMLKPRDGVRLKVQYRPEEFTKAKGLPGDSFYIRALYDRLADVEQELSFKKDDILYVDDTLPQGTFGSWMAWQLDENAQKIQRGQIPSKYVMDQEFSRRLSMSEVKDDNSATKTLSAAARRSFFRRKHKHKRSGSKDGKDLLALDAFSSDSIPLFEDSVSLAYQRVQKVDCTALRPVLILGPLLDVVKEMLVNEAPGKFCRCPLEVMKASQQAIERGVKDCLFVDYKRRSGHFDVTTVASIKEITEKNRHCLLDIAPHAIERLHHMHIYPIVIFIHYKSAKHIKEQRDPIYLRDKVTQRHSKEQFEAAQKLEQEYSRYFTGVIQGGALSSICTQILAMVNQEQNKVLWIPACPL

SEQ ID NO: 149180 - DNA, 5760 bp, Artificial Sequence
  derived and/or modified sequence
atggaaccacagcgccgcgaattactggcacagtgtcaacaaagtttagctcaggctatgaccgaggtggaggcagtgctcggcctactcgaggcagccggggcgttgtcccccggggaacgaaggcaactcgatgaggaggcaggcggtgccaaggctgaactgctcctgaagttgcttcttgcaaaggagcgggaccatttccaggacctgagggccgcgctggagaagacgcagccccacctgttacccattttgtatctgaacggcgttgtgggccccccacaaccagcggagggggcgggaagcacatacagtgtgctatctacaatgccgagtgactctgagtcttcttctagtcttagcagtgtcggtacgactggcaaagctcccagtcctccaccacttctaaccgatcagcaggtcaacgaaaaggtggagaacctgagtatccaactccggcttatgactagagagcgaaacgaacttcgaaagagactcgcctttgcgacacatgggactgcattcgacaagagaccctatcaccgtctcaacccggactacgagcggttaaagatccagtgtgtgcgcgccatgagtgacttgcagtctctgcagaatcagcatacgaatgccctgaagcgatgcgaagaggttgccaaggaaaccgacttctatcacaccttacacagcagactgctctccgatcaaaccagactgaaggatgatgtcgacatgctgcggagggagaatggtcagttgctgagggaaagaaacctgcttcaacagagttgggaagacatgaagcgcttacatgaggaggaccagaaagagatcggggatctgcgcgctcagcaacaacaggtgctgaagcacaacggctcttcggagattctcaacaagttatacgacaccgcaatggacaagctggaggtggttaaaaaggactatgacgccttgcgtaagcgttactccgagaaagtcgcgattcacaatgcagacctgtctaggcttgagcagctgggagaggaaaaccagaggttgctgaagcagaccgagatgttgactcagcagagggacactgcgatccagctgcagcaccagtgtgccctcagtctacgcagatttgaggcaatccatcacgagctgaacaaggcaaccgctcagaacaaggacttacaatgggaaatggagctgctgcagtccgaactaactgaactgcgaacgactcaggtgaaaaccgctaaagagtccgaaaagtatcgcgaggagcgtgatgcagtttatagcgaatataaacttatcatgtcagagcgcgaccaggtcatctcagaacttgataagttgcagaccgaggtagaactggcggagtctaaactcaagtcgtctacaagtgaaaaaaaagctgccaatgaagaaatggaagctcttcgccagatcaaggacacagttactatggacgccgggcgcgcaaataaggaagtggagatcctacgtaaacagtgcaaagcattgtgccaggaactgaaggaagccctgcaagaggcagacgtggccaagtgcagacgggactgggccttccaagaaagggacaaaatcgtcgcagaaagagactccatcaggacactgtgcgataatctgcggcgggagagagaccgggcggtgtcagagttggcagaggcgctgaggagtctggacgatacgcgcaagcagaaaaatgatgtgagccgggaactgaaagaactgaaagaacagatggagagccaattggagaaagaagcccggtttaggcagctgatggcacattcttctcatgatagcgcaattgacaccgattctatggaatgggaaaccgaggtagtggagttcgagcgcgagaccgaggacattgatctcaaggcactcggtttcgatatggcagagggtgtaaacgagccatgctttcccggagactgcggcatcttcgtgactaaggtggataaggggtcgatagccgatggccggctgagggtaaatgattggcttctgcgtattaacgacgtggacttgattaacaaggacaaaaaacaagctattaaagcccttctgaatggagaaggcgcaatcaatatggtcgtcaggaggcgaaaatctctaggaggaaaggtcgtgactcccctccatattaacttgagcgggcagaaggacagtggtatctcgctcgagaacggagtgtacgctgcggccgtcttgccaggctcaccggccgccaaagaagggagcctggcagtcggagataggatcgtagctattaacggaatagccttggataataagtcattgaatgagtgtgagtccctgctgcggagttgccaggattcacttaccctgtcattgctaaaagtttttcctcagtcctcatcttggtcaggccaaaatatctttgagaacatcaaggactcagacaaaatgctgtctttcagggctcacggccccgaagtgcaggctcacaataaaagaaatctgattcaacataataacagcacgcaaactgacattttctacaccgacaggctcgaagaccggaaggaacctggcccccctggcggatcttctagttttttgcataagccctttcccggaggacccctgcaagtctgtccacaggcctgcccatcggcctctgaaagaagcctctcatcctttcggtctgacgccagtggcgaccgcggctttggtctggtggatgttcgtgggcgccggcctctcttgccattcgagaccgaagttgggccctgtggagttggggaggccagcctcgacaaagctgattccgaaggcagtaattctgggggcacttggcctaaagcaatgctgtcgtccacggctgttcctgaaaaactgagtgtgtataaaaaaccaaaacagcgtaagtccattttcgaccctaatacattcaagagaccccaaaccccccccaagatcgactacctgctcccgggcccagggcctgctcacagtccacaacctagcaaacgggcgggcccattaactccgccgaagcccccaaggcggagcgatagcattaaattccagcatagactcgaaacttcttctgaaagtgaggccaccctggtgggttcatcacctagcacttctccaccttccgcgctgcctccagatgtggatcccggagaacctatgcacgcatctccaccccgaaaggcacgggttcggatcgcctcctcatactaccctgagggcgacggcgactcatcacacctgcctgctaaaaaatcctgtgatgaggacctcaccagccagaaggtggacgaactgggacaaaagcggaggcgtcccaaatcagcaccctcctttaggccgaaattggcgcccgtcgtgattcccgctcagtttctcgaggagcagaagtgtgtgcccgcgagtggagaactgtccccagagttacaggaatgggcaccatactctcccggccactcaagccgacatagtaatcctcccctctacccatcaaggccaagcgtcggaacagtaccccgttcgttgaccccaagtaccaccgtctccagcatcctgagaaaccctatttatacggtccgctcccaccgagtagggccttgttcgtcccctcctgctgcaagagacgccgggcctcaggggctgcacccatcggtgcagcaccagggacgcctttccttggacctgtctcatcgcacttgcagtgattacagcgagatgcgcgccacgcacgggagcaatagtctccctagctcagctcgccttggatctagttccaacctgcagttcaaagctgagcggatcaagataccaagcactccccgatatccgcgttccgttgtcgggtcggagcgaggctcagttagccacagcgagtgttcaacccccccccagtcgcctctcaacatcgacaccttgtcatcctgctcacagtctcagacgtcagcaagcaccctgccccgcattgctgttaaccccgcctcattgggagagcggagaaaagatagaccctacgttgaagagccacgccatgtgaaagtacagaaggggtctgaaccgctggggatctccatcgtcagtggcgagaagggaggcatctacgtgtcaaaagtaacagtcgggagtatcgcccaccaggctggactagagtatggtgatcagctattagaattcaatggtattaacctgcgaagcgctaccgagcagcaagctcgtctaatcatcgggcagcagtgcgacacaataacaatcctggcccagtataacccgcacgtacatcagctcagtagccactctcggagctcaagtcacttggatcccgcagggacacacagtacattacagggatccggaacaacaacccctgaacacccttcagttattgacccattgatggaacaggatgagggacccagtacccctccagccaaacaatctagctcaaggatcgccggggatgcgaataagaagacacttgagcccagagttgtgttcatcaaaaagtctcagctcgagcttggagtgcatctgtgcggcggaaacctccacggagttttcgtggccgaggtagaggacgattctcctgcgaaagggcctgatgggttagtacctggcgatctgattctcgagtatggtagcctggacgtgcgcaataagaccgttgaggaagtgtatgttgagatgctcaagcctcgtgacggcgtgcggcttaaggtgcagtaccggcccgaagaattcacaaaggccaagggactcccgggcgactctttttacatcagggctctgtatgacaggttggcagacgtcgagcaggaactgtccttcaagaaggacgatatactttacgtagatgatactctccctcagggaactttcggcagttggatggcttggcaactcgatgaaaatgcacagaaaatccaaaggggccagataccctcaaagtatgtaatggaccaagagttcagccggaggttgtcgatgtcagaagttaaagatgacaactcagcgactaaaacattatcggccgctgctagaaggtccttctttagaagaaagcataagcacaagcgaagtgggagtaaagacgggaaggatttgcttgctctggacgccttctcatctgactcaatcccacttttcgaggactcggtgtcactggcctaccagcgggttcaaaaagtcgactgcactgcgttacgcccggtcctcattctggggccccttcttgacgtggtgaaggaaatgctagtgaatgaggcccctgggaaattctgtaggtgcccactggaggtcatgaaagccagccaacaggctatcgagcgcggcgttaaggactgtctcttcgtggactacaagcggcgttccggacatttcgacgtgacaaccgtcgctagcatcaaagaaattacagaaaagaaccgccattgtctgctcgacatagcaccacatgctatcgagagactccaccatatgcatatttacccgattgtgatatttattcattacaagtccgccaagcatatcaaagagcagcgggatcctatatacctccgggataaagtgacccaaagacatagcaaggagcaattcgaggccgctcagaagctggagcaggaatactctcggtatttcactggtgtcatacagggcggggccctgtccagcatctgtacacagatcctggccatggtgaatcaagaacagaataaggtcctctggatcccagcctgtccactttag

SEQ ID NO: 149181 - DNA, 2052 bp, Artificial Sequence
  derived and/or modified sequence
atggagccacagagacgggagttgctggcccagtgccagcagtctttagctcaagccatgacagaggtcgaggccgtgctggggttactagaggctgccggagccctgagtccaggcgagaggagacagttagacgaggaagcggggggtgcgaaggctgaactcttacttaagttactcctcgcaaaggagcgcgaccattttcaagacctgcgggccgcgctggaaaagacacagcctcatttgctgcctatcttgtacttaaacggggttgtcggcccccctcagccggctgaaggcgctggctccacgtattccgtcctgtctacaatgcccagtgatagcgaatcttccagctctctgtcaagcgtggggactacggttaagcatctgcgcgaacagatggagtcccagctggaaaaagaggcaagatttagacaacttatggctcactcctctcatgatagcgccattgatacagattcaatggaatgggagaccgaagtggtagaattcgaacgcgaaacggaagacattgatctcaaggctttggggtttgacatggccgaaggtgtcaacgaaccatgtttccccggcgactgcggaattttcgtgacaaaagttgacaaaggttcaatcgcagacggccgcctgcgagttaacgactggcttctgcgcattaatgatgtggatctcataaataaagacaaaaaacaagccatcaaagccttactcaacggcgagggtgctattaatatggttgttcgaagacgaaaatctctcggggggaaagttgtgacaccattgcacataaatctatccggacagaaggactccggaatatcactcgagaacggcgtctacgcggccgccgtcctgcccgggagcccagctgcaaaagaaggcagcctggccgtgggcgatagaatcgtggccattaatgggatcgcacttgacaacaagagtctgaacgagtgtgagagcctgctccgtagctgtcaagactctctaacgctgtctcttctcaaggttttccctcagagtagttcctggtcagggcaaaacatcttcgaaaacatcaaggattcagataagatgctgtccttcagagcccatggacctgaagtccaggcccacaacaagaggaacctgatccaacataacaacagtacccaaaccgatatcttctatactgatcgccttgaggaccggaaagagccgggacctccaggaggaagctcttccttcctgcataagccctttccgggtggccccctacaggtgtgtccgcaggcctgtccatctgcttccgaacgatcgttgtcttctttccgaagcgatgcctccggcgacaggggatttggcctggtagatgtgagaggacgcagacccctcctgccttttgaaactgaggtgggcccatgcggtgtgggcgaggcatcactcgataaagctgactctgagggcagtaacagtggcggaacgtggccgaaggctatgctctctagcaccgccgtccccgaaaagctgtctgtgtataaaaaacctaaacagcgtaaaagcatctttgatcccaacacatttaaaaggccccagaccccccccaagatagactatctgttgcctgggcccggccccgcccactccccccaacccagtaaacgtgccggaccactgacaccacccaaacctcctcgaaggagcgactctattaaatttcagcacagactcgaaacatcatcggaatctgaggctaccctggtcggttcaagtccttcaacgtccccacccagcgccctgccaccagatgtggatccgggtgaacctatgcacgcatcaccccctcgcaaggccagagtgcggattgcttcctcctattaccctgagggagacggcgacagctctcatctgcccgccaagaaatcctgcgatgaggacctgacttcgcagaaggttgacgagctggggcagaaacgaagacgccctaaaagcgcgccttcttttaggccaaagctggcccccgtggtgatccccgcacagtttcttgagtag

SEQ ID NO: 149182 - DNA, 5760 bp, Artificial Sequence
  derived and/or modified sequence
atggagccccagaggcgggagctgctggcccagtgccagcagagcctggcccaggccatgacagaggtggaggccgtgctgggcctgctggaggccgccggggccctgagccctggagagcggcggcagctggatgaggaggccggcggggccaaggccgagctgctgctgaagctgctgctggccaaggagcgggaccacttccaggacctgcgggccgccctggagaagacccagccccacctgctgcccatcctgtacctgaatggagtggtgggccccccccagcctgctgagggcgccggcagcacctacagcgtgctgagcaccatgcccagcgacagcgagagcagcagcagcctgagctctgtgggcaccaccgggaaggcccccagccccccacccctgctgacagaccagcaggtgaatgagaaggtggagaacctgagcatccagctgcggctgatgacccgggagagaaatgagctgaggaagaggctggcctttgccacccacggcacagcctttgacaagaggccctaccaccggctgaacccagactatgaaaggctgaagatccagtgtgtgcgggccatgtctgacctgcagagcctgcagaaccagcacaccaatgccctgaagagatgtgaggaggtggccaaggagacagacttctaccacaccctgcacagccggctgctgagtgaccagacccggctgaaggatgatgtggacatgctgcggcgggagaatggccagctgctgcgggagaggaacctgctgcagcagagctgggaggacatgaagaggctgcacgaggaggaccagaaggagattggagacctgcgggcccagcagcagcaggtgctgaagcacaacggcagcagcgagatcctgaacaagctgtatgacacagccatggacaagctggaggtggtgaagaaggactatgatgccctgaggaagcgctacagcgagaaggtggccatccacaatgctgacctgagccggctggagcagctgggggaggagaaccagaggctgctgaagcagacagagatgctgacccagcagagggacacagccatccagctgcagcaccagtgtgccctgagcctgcggagatttgaggccatccaccacgagctgaacaaggccacagcccagaacaaggacctgcagtgggagatggagctgctgcagagcgagctgacagagctgcggaccacccaggtgaagacagccaaggagagcgagaagtaccgggaggagagagatgctgtgtacagcgagtacaagctgatcatgtctgagcgggaccaggtgatcagcgagctggacaagctgcagacagaggtggagctggccgagagcaagctgaagagcagcaccagcgagaagaaggccgccaatgaggagatggaggccctgcggcagatcaaggacacagtgaccatggatgctggccgggccaacaaggaggtggagatcctgaggaagcagtgcaaggccctgtgccaggagctgaaggaggccctgcaggaggctgatgtggccaagtgccggcgggactgggccttccaggagcgggacaagatcgtggccgagcgggacagcatccgcaccctgtgtgacaacctgcggcgggagcgggacagagctgtgtctgagctggccgaggccctgcggagcctggatgacaccaggaagcagaagaatgatgtgtcccgggagctgaaggagctgaaggagcagatggagagccagctggagaaggaggcccgcttccggcagctgatggcccacagcagccatgattctgccatcgacacagacagcatggagtgggagacagaggtggtggagtttgagcgggagacagaggacatcgacctgaaggccctgggctttgacatggccgagggcgtgaatgagccctgcttccctggggactgtggcatctttgtgaccaaggtggacaagggcagcattgctgatggccgcctgcgggtgaatgactggctgctgcgcatcaatgatgtggacctgatcaacaaggacaagaagcaggccatcaaggccctgctgaatggagagggcgccatcaacatggtggtgagaagaaggaagagcctgggcggcaaggtggtgacccccctgcacatcaacctgagcggccagaaggacagcggcatcagcctggagaatggagtgtatgctgctgctgtgctgcccggcagccctgctgccaaggagggcagcctggccgtgggggacagaattgtggccatcaatggaattgccctggacaacaagagcctgaatgaatgtgagagcctgctgcggagctgccaggacagcctgaccctgagcctgctgaaggtgttcccccagagcagctcctggagcggccagaacatctttgagaacatcaaggacagcgacaagatgctgtccttccgggcccacggccctgaggtgcaggcccacaacaagaggaacctgatccagcacaacaacagcacccagacagacatcttctacacagaccggctggaggacaggaaggagcccggccccccaggcggcagcagcagcttcctgcacaagcccttccctgggggccccctgcaggtgtgcccccaggcctgccccagcgccagcgagaggagcctgagcagcttcagaagtgatgccagcggggaccggggcttcggcctggtggatgtgcggggcagaagacccctgctgccctttgaaacagaggtgggcccctgtggggtgggggaggccagcctggacaaggctgacagcgagggcagcaacagcggcggcacctggcccaaggccatgctgagcagcacagctgtgcctgagaagctgtctgtgtacaagaagcccaagcagaggaagagcatctttgaccccaacaccttcaagaggccccagaccccacccaagattgactacctgctgcccggccctggccctgcccacagcccccagcccagcaagagagctggccccctgaccccacccaagcccccaagaagaagtgacagcatcaagttccagcaccggctggagaccagcagcgagagcgaggccaccctggtgggcagcagccccagcaccagccccccatctgccctgcccccagatgtggaccctggagagcccatgcacgccagcccccccaggaaggcccgggtgagaattgccagcagctactacccagaaggagatggagacagcagccacctgcctgccaagaagagctgtgatgaggacctgaccagccagaaggtggatgagctgggccagaagagaagaagacccaagagcgcccccagcttccggcccaagctggcccctgtggtgatcccagcccagttcctggaggagcagaagtgtgtgcctgccagcggggagctgagccctgagctgcaggagtgggccccctacagccctggccacagcagccgccacagcaacccccccctgtaccccagccggcccagcgtgggcaccgtgcccaggagcctgacccccagcaccaccgtgagcagcatcctgaggaaccccatctacacagtgcgcagccaccgggtgggcccctgcagcagccccccagctgccagagatgctggcccccagggcctgcaccccagcgtgcagcaccagggccgcctgagcctggacctgagccacaggacctgcagcgactacagcgagatgagggccacccacggcagcaacagcctgcccagcagcgcccggctgggcagcagcagcaacctgcagttcaaggccgagcgcatcaagatccccagcaccccccgctaccccaggtctgtggtgggcagcgagcggggctctgtgagccacagcgagtgcagcaccccaccccagagccccctgaacatcgacaccctgagcagctgcagccagagccagaccagcgccagcaccctgcccagaattgctgtgaacccagccagcctgggggagaggaggaaggaccggccctacgtggaggagcccaggcatgtgaaggtgcagaagggcagcgagcccctgggcatcagcatcgtgtctggagagaagggcggcatctacgtgtccaaggtgacagtgggcagcatcgcccaccaggccggcctggagtatggagaccagctgctggagttcaacggcatcaacctgcggagcgccacagagcagcaggcccggctcatcatcggccagcagtgtgacaccatcaccatcctggcccagtacaacccccacgtgcaccagctgagcagccacagccgcagcagcagccacctggaccctgctggcacccacagcaccctgcagggcagcggcaccaccaccccagagcaccccagcgtgattgaccccctgatggagcaggatgagggccccagcaccccaccagccaagcagagcagcagcagaattgctggagatgccaacaagaagaccctggagccccgggtggtgttcatcaagaagagccagctggagctgggcgtgcacctgtgtggcggcaacctgcacggcgtgtttgtggccgaggtggaggatgacagccctgccaagggcccagatggcctggtgcctggggacctgatcctggagtatggcagcctggatgtgaggaacaagacagtggaggaggtgtatgtggagatgctgaagcccagagatggagtgcggctgaaggtgcagtacagacctgaggagttcaccaaggccaagggcctgcccggggacagcttctacatccgggccctgtatgaccggctggctgatgtggagcaggagctgtccttcaagaaggatgacatcctgtatgtggatgacaccctgccccagggcaccttcggctcctggatggcctggcagctggatgaaaatgcccagaagatccagaggggccagatccccagcaaatatgtgatggaccaggagttcagccggcggctgtccatgtctgaggtgaaggatgacaacagcgccaccaagaccctgtctgctgctgcccggcgctccttcttccggaggaagcacaagcacaagaggagcggcagcaaggatggcaaggacctgctggccctggatgccttcagcagtgacagcatccccctgtttgaagattctgtgtccctggcctaccagagggtgcagaaggtggactgcacagccctgcggcctgtgctgatcctgggccccctgctggatgtggtgaaggagatgctggtgaatgaggcccctgggaagttctgccgctgccccctggaggtgatgaaggccagccagcaggccatcgagcggggcgtgaaggactgcctgtttgtggactacaagagaagaagtggccactttgatgtgaccaccgtggccagcatcaaggagatcacagagaagaacagacactgcctgctggacatcgcccctcatgccatcgagcggctgcaccacatgcacatctaccccatcgtcatcttcatccactacaagagcgccaagcacatcaaggagcagagggaccccatctacctgcgggacaaggtgacccagaggcacagcaaggagcagtttgaggccgcccagaagctggagcaggagtacagccgctacttcaccggggtcatccagggcggggccctgagcagcatctgcacccagatcctggccatggtgaaccaggagcagaacaaggtgctgtggatcccagcctgccccctgtag

SEQ ID NO: 149183 - DNA, 2052 bp, Artificial Sequence
  derived and/or modified sequence
atggagccccagaggcgggagctgctggcccagtgccagcagagcctggcccaggccatgacagaggtggaggccgtgctgggcctgctggaggccgccggggccctgagccctggagagcggcggcagctggatgaggaggccggcggggccaaggccgagctgctgctgaagctgctgctggccaaggagcgggaccacttccaggacctgcgggccgccctggagaagacccagccccacctgctgcccatcctgtacctgaatggagtggtgggccccccccagcctgctgagggcgccggcagcacctacagcgtgctgagcaccatgcccagcgacagcgagagcagcagcagcctgagctctgtgggcaccaccgtgaagcacctgcgggagcagatggagagccagctggagaaggaggcccgcttccggcagctgatggcccacagcagccatgacagcgccatcgacacagacagcatggagtgggagacagaggtggtggagtttgagcgggagacagaagatattgacctgaaggccctgggctttgacatggccgagggcgtgaatgagccctgcttccctggggactgtggcatctttgtgaccaaggtggacaagggcagcattgctgatggccgcctgcgggtgaatgactggctgctgcgcatcaatgatgtggacctgatcaacaaggacaagaagcaggccatcaaggccctgctgaatggagagggcgccatcaacatggtggtgagaagaaggaagagcctgggcggcaaggtggtgacccccctgcacatcaacctgagcggccagaaggacagcggcatcagcctggagaatggagtgtatgctgctgctgtgctgcccggcagccctgctgccaaggagggcagcctggccgtgggggaccgcatcgtggccatcaatggcatcgccctggacaacaagagcctgaatgaatgtgagagcctgctgcggagctgccaggacagcctgaccctgagcctgctgaaggtgttcccccagagcagctcctggagcggccagaacatctttgagaacatcaaggacagcgacaagatgctgtccttccgggcccacggccctgaggtgcaggcccacaacaagaggaacctgatccagcacaacaacagcacccagacagacatcttctacacagaccggctggaggacaggaaggagcccggccccccaggcggcagcagcagcttcctgcacaagcccttccctgggggccccctgcaggtgtgcccccaggcctgccccagcgccagcgagaggagcctgagcagcttcagaagtgatgccagcggggaccggggcttcggcctggtggatgtgcggggccggcggcccctgctgccctttgaaacagaggtgggcccctgtggggtgggggaggccagcctggacaaggctgacagcgagggcagcaacagcggcggcacctggcccaaggccatgctgagcagcacagctgtgcctgagaagctgtctgtgtacaagaagcccaagcagaggaagagcatctttgaccccaacaccttcaagaggccccagaccccacccaagattgactacctgctgcccggccctggccctgcccacagcccccagcccagcaagagagctggccccctgaccccacccaagccaccccggcggagtgacagcatcaagttccagcaccggctggagaccagcagcgagagcgaggccaccctggtgggcagcagccccagcaccagcccccccagcgccctgcccccagatgtggaccccggggagcccatgcacgccagcccccccaggaaggcccgggtgcgcatcgccagcagctactacccagaaggagatggagacagcagccacctgcctgccaagaagagctgtgatgaggacctgaccagccagaaggtggatgagctgggccagaagagaagaagacccaagagcgcccccagcttccggcccaagctggcccctgtggtgatcccagcccagttcctggagtag

SEQ ID NO: 149184 - DNA, 5760 bp, Artificial Sequence
  derived and/or modified sequence
atggagccccagcggcgggagctgctggcccagtgccagcagagcctagcgcaggcgatgacagaggtggaggctgtgctggggctactggaagcggcgggggccttgtcccccggggaacgccgtcagctcgacgaggaggctgggggggcaaaggctgagctcctcttaaagctattgctagcgaaggagagagaccactttcaggaccttcgggcagctttggaaaaaacccagccccatctcttgccaatcctgtacctgaatggcgtcgttggcccacctcagcctgccgaaggagcaggaagcacatatagtgttttgagtacgatgccgtctgactccgaatcctcttccagcttgtcgagcgttgggactaccggtaaggcccctagtcctcccccattactcacagatcagcaggtgaatgagaaggtggaaaacctgagcatccagctacgtttgatgacaagagagaggaatgaactccggaagcgcctggcctttgctacacacggcaccgctttcgataagagaccttatcaccgtctcaatcctgattatgagagattgaagatccaatgcgtgcgtgcaatgtcggatctgcagtcccttcaaaaccagcatactaatgcccttaagcgatgcgaggaagtggccaaagaaacagatttttatcatactttgcattctcgcctcctttctgatcagactagactgaaagatgacgttgacatgctccgacgcgaaaacggccaactcttgagggagaggaacctcctgcagcaaagttgggaagatatgaaaagacttcacgaggaggatcaaaaagagattggcgacttgagagcacagcaacagcaggtcttaaaacacaacggcagcagcgagatcttgaacaaactgtatgataccgccatggataagctggaggttgtcaaaaaagactatgatgctctgcgcaaacggtattcggagaaggtagccatccataatgccgacctttcacggctggaacagctgggcgaagagaaccagcgactgctgaaacagacggagatgctcacccagcagcgggatacagccattcagctgcaacatcaatgtgctttatctctacgccggttcgaggccatccatcatgaactgaacaaggcgaccgctcaaaataaagacttgcagtgggagatggaactgctccagtcagaattgactgagctgaggaccacccaggtcaagacggcgaaggagagtgaaaaataccgggaagaacgcgacgccgtgtacagcgaatacaagctgatcatgagcgagcgggatcaagttatctccgagcttgacaagctgcagacagaagtcgaactggcagaatccaaattaaagagcagcaccagtgaaaagaaggccgctaatgaggaaatggaagctctcagacagatcaaggatactgtaacgatggatgccgggcgggctaacaaggaggttgagatactaagaaagcagtgtaaagccctttgtcaggaacttaaggaagccttacaggaagcagatgtggccaaatgtagacgggactgggcttttcaggagagggacaagattgtggcagaacgggattctattcgcactctgtgcgacaacttacggcgagagagggatcgcgcggtgtcagagttagccgaagcgcttcgatctcttgatgacacccgtaagcagaagaacgacgttagccgagaactgaaggaactcaaagaacagatggagtctcagcttgagaaggaagcccggttcagacagctgatggctcatagcagccacgactcggccatagacactgatagtatggagtgggaaacagaggttgttgaatttgaaagagagaccgaggatatcgatctcaaggctcttggcttcgacatggccgagggtgtgaacgaaccttgtttccctggagattgtggaattttcgtgactaaggtggataaggggagcatcgccgacggcaggctgagagtgaacgactggctgctccgaattaatgacgtggacttgattaacaaggacaagaaacaggccattaaggcactgctgaatggggagggcgcgatcaacatggttgttcgacggcgaaagagtttgggagggaaagtcgttacgcctcttcacattaacctgtccggacagaaagattcagggatttcgctcgagaatggagtttatgcggcagccgtgcttcctggcagcccagctgcaaaggagggctcattggctgtgggggacaggattgtggcaataaatggcattgcacttgataataagtcccttaatgagtgtgagagtctgttgaggtcttgccaggactccctcacactgtccctcctgaaagtgtttcctcaatcctcatcctggagcggacaaaatatattcgaaaacattaaagattccgacaaaatgctgtctttcagagcacacggacccgaagtgcaagcgcataataagcgtaacctcatccaacataataactctacacagaccgacatcttttacaccgataggctggaagataggaaagagccagggccacctggtggcagctccagctttttgcataagccattcccagggggtcctctccaggtgtgtcctcaagcttgtcccagcgctagtgagcgatccctgagcagttttcgctctgacgcttctggcgatcggggtttcgggctcgtggatgtcaggggcaggaggcccctgctcccttttgagacagaggtaggtccttgcggcgtaggcgaagcaagcttggacaaagccgattctgagggatcaaactccggtggtacctggcctaaggcaatgctctcctctactgcggtgccagagaagctatccgtttataagaagcccaaacaacgtaaatctatctttgaccctaacactttcaaacgcccgcaaacccccccaaaaatcgactatcttctcccaggtccaggacccgcccatagccctcagccttccaaaagggcaggtccactgacaccgcctaagccgcctcgcagaagcgattccatcaaatttcagcatagactcgaaacctctagtgaatccgaggctactctcgtgggaagtagcccgtccaccagtccaccctccgctctgccaccagatgttgaccctggagagcccatgcacgcttctccgcccagaaaagccagagttaggatcgcaagttcctactatcccgagggggacggagatagctctcatctgccagccaagaaatcctgcgacgaggatcttacttctcagaaagtggacgaactgggccaaaagagaagacggcccaagtcggcccctagtttccggccaaagctggcccctgttgtaatccccgcacagtttcttgaagaacaaaagtgtgtgccagcttccggagaattaagcccggagctccaggaatgggctccctactcccctgggcatagctccagacattcgaacccaccactgtatccttccagaccatcagttggtacagtccctcggagtctgacgccctctactactgtgtcgtctatcctgaggaatcccatctatactgtgcgctctcatagagtcgggccatgcagtagcccgcccgccgcaagggatgccggtccccaaggcttgcacccttcagtgcagcatcagggccggctgtcattagacctcagccataggacttgttctgactacagcgagatgcgggctacccatgggtctaacagtctgccttcctccgcccgcctcggctccagtagcaacctccagtttaaggccgagcggattaagattccttccacgcctcggtatcccaggtctgtggttggctcagagaggggttcagtctcacattccgagtgcagtactccccctcagtcgcccttgaacattgatactctcagctcctgctctcagtcccagaccagcgcgagtactctgccacggatcgctgtgaaccccgcatctctgggggagaggcgcaaagatagaccctacgtcgaggagcccagacacgtcaaagtacagaaaggatctgagcctctggggatctccatagtctccggtgagaaggggggaatctacgttagtaaagtgactgtcggcagcatcgcccaccaggcaggattggagtacggggaccagctgctcgaattcaatggcattaatctccggtcagccaccgagcagcaggctcgcttgatcattggccagcaatgtgacaccatcactatcctggctcagtacaacccgcacgtccatcagctgagctcacatagcaggagctctagtcacctggatccagctggcacccattctactctgcaaggctcagggacaaccacacccgagcatcctagcgtcatcgaccccctcatggagcaagatgaaggcccttcaacgccaccggccaaacagtcatcttcgcgcatcgctggggatgccaacaaaaaaacgcttgaaccaagagtagtgttcatcaagaagtcacagctggagctgggagtccatttgtgcggtggaaacttgcacggtgtctttgtagcggaggtggaagacgactctcctgccaaggggcccgacggtctcgttcccggggacttaatacttgaatacggttcattagatgtgcgcaacaagacggttgaggaggtatacgtggagatgctcaagcctagagatggcgtaaggctcaaagtccagtatcggccagaggagtttaccaaagctaagggattaccgggtgacagcttctacatccgcgcactgtacgatcgcttggccgacgtcgaacaggagctctctttcaaaaaggatgatattctttacgtggatgacaccctgccccaggggacttttggctcttggatggcctggcagctggatgagaacgcccagaaaatacagcgggggcagatcccatcaaaatatgtgatggatcaagaattcagtcgccgactcagcatgtcagaagttaaagatgataattcagccactaagactctctcggcagccgccaggcgctcgttctttcgtcggaaacacaagcataaacgatcggggtccaaagatggaaaagacttgcttgcactcgacgcatttagttcagactccattcctctctttgaagactccgtcagcctcgcctaccagcgcgtgcagaaagtggattgcaccgcactccggcctgtactcatcctaggacctttacttgacgtcgttaaagagatgcttgtgaacgaggcccccggcaaattctgtcgctgcccactcgaggtgatgaaggcatcccagcaggcgatcgagagaggagtcaaggattgtcttttcgtggactacaaaaggcgaagtggacacttcgacgtaacgacggtcgcctctattaaagagatcactgagaaaaaccgccactgcctgctggatattgccccccatgctatcgagaggcttcaccatatgcatatttatccaatagtaatctttatccactacaagtcagctaagcacattaaggaacagcgagatccgatatatcttcgtgacaaagtgactcagcgccattccaaggagcagtttgaagccgcccagaaactggaacaggagtatagtcgctatttcactggtgtcattcagggtggcgctctctcatcgatctgcacacagattctggctatggtgaatcaggaacagaataaggtgttgtggatccccgcttgccccctttag

SEQ ID NO: 149185 - DNA, 2052 bp, Artificial Sequence
  derived and/or modified sequence
atggagccccagcggcgggagctgctggcccagtgccagcagagcctcgcgcaggccatgacggaggtggaggcagtgctcggcctgctggaggctgcaggcgctctttctcccggggaacgacggcagctagatgaagaggctgggggcgccaaggccgagctactgcttaaattgcttctggctaaggagcgggaccatttccaggatctccgcgcagctctggaaaaaactcagccccatctgctgccaattctgtacctgaacggtgtagtcggacctccccaacccgccgagggcgccggaagtacgtattctgtgctcagtacaatgcccagcgacagcgagagttctagctccttgtccagcgtcggaactacggtgaaacacctgcgtgagcagatggagtcacaactcgaaaaggaggctcggtttaggcagttgatggcccattctagccatgatagcgccatagatacggactcaatggaatgggagacggaagtggttgagttcgaaagggaaactgaggatatagaccttaaggcactaggcttcgacatggccgagggagtcaatgagccatgttttcccggtgattgtgggattttcgtcaccaaggtggataagggctccatcgctgacggccggctgcgagtgaatgattggctactgcgaattaatgacgtggacctcattaacaaagacaagaagcaggccataaaagccctattgaacggcgaaggagcgattaacatggtcgtcagacgaagaaaaagtctcggaggaaaggtagtgaccccgctgcacatcaatcttagcggccagaaagatagtggcataagcttggagaacggggtctatgcagcagctgttctacccggctcccccgctgctaaagagggatcactcgctgttggagaccggattgtggccatcaacggtattgcactggacaataaatctttgaatgagtgcgagtcactgctgcggagttgccaagactccctgaccctgtccctgctgaaagtcttcccgcaatcgagctcctggtcaggacaaaacatcttcgagaacatcaaggattcagacaaaatgctctcatttcgcgcccatgggcctgaggttcaggcccacaacaaaagaaacctgattcaacacaacaactctactcaaaccgatatattttatacagatcgactggaagacagaaaagagccaggccccccaggaggcagcagttcatttctccacaaaccctttcccggcggtcccttacaggtgtgtcctcaagcatgtccctcggcctctgaacgctcattgtcctcctttcgaagcgatgcctcaggcgacagaggctttggactcgtggacgtccgcgggcgaaggcccctcttgccatttgaaacagaagtgggaccatgtggagtgggggaggctagccttgacaaagctgacagcgagggaagcaatagcgggggtacatggcctaaggctatgctttcttccacagcagtgccagagaaactttccgtgtacaaaaagcccaaacagcgcaagagcattttcgaccccaacacttttaagaggcctcagactccccccaagatcgattacctgctacccggccccgggcctgcgcatagtccccagcctagtaaaagagcaggaccactgactccacccaagccccctaggagatctgactcgattaagtttcagcataggctcgagacttccagtgaatctgaagctacattggtcggatcttccccttccacctcacccccctccgccctaccacctgatgttgacccgggggagcctatgcatgcttctcccccacgaaaggccagggtgcgaatcgctagttcttattaccctgagggggatggtgattcttctcacctgccggctaagaaatcatgcgacgaggatctaacttcacagaaggtcgatgaactcggtcagaagcgacggaggcctaagagcgcaccctctttcagaccgaaacttgccccagtcgtcatccccgcgcagttcctggagtag

SEQ ID NO: 149186 - DNA, 5759 bp, Artificial Sequence
  derived and/or modified sequence
atggaaccgcaaaggcgtgaattgctggcccagtgccaacagtccctggcccaggccatgacagaagtagaagcagtgttggggctgctggaagccgctggcgctttatcccccggagaaaggcgacagctggatgaagaagcaggcggagccaaagccgagctccttctgaagctccttctcgccaaggagcgggaccacttccaggacctgcgcgcagctttggagaagacacagccccaccttcttcctatcctctatttgaatggcgtcgtgggaccacctcaacctgctgaaggagcagggagtacatactccgtgctgagtaccatgcccagtgacagcgaatcctctagttccctgagctccgtcgggaccactggtaaagctcccagcccaccacccctgcttacagaccaacaggtgaacgagaaggtagaaaatctcagcattcagctgcggctgatgacccgcgaacgaaatgaactgcggaagaggttggctttcgccactcacggcactgcattcgacaagcgcccttaccacagactcaatcctgactatgagcgactgaagatccagtgcgtgcgcgcaatgtccgacctgcagtccctccaaaaccagcacactaacgctcttaaacggtgcgaagaggtggccaaggaaaccgatttctaccatacacttcatagccgccttttaagcgaccagacacgactcaaagatgacgtggatatgctcagacgggaaaacgggcagctgctgagagagagaaatttgcttcagcaatcttgggaggatatgaaaagattgcatgaggaggaccaaaaagagatcggtgatctgcgagcccagcagcagcaggtgctgaagcacaacggatcttcagaaatccttaacaagctttatgatacggcaatggacaaactggaggtggtgaaaaaggattacgacgctctccgcaaaaggtatagcgaaaaagtggccatacacaacgctgatctctcaaggttggaacagttaggagaggagaaccagagactgctaaagcagactgaaatgctgacacagcaaagggataccgccatccagctgcaacatcagtgtgctctttccctgcgcagatttgaggccatccaccacgaacttaacaaggccacagcccagaacaaagacttgcaatgggagatggagcttctccagtccgagctgacggaactgaggactacacaggtgaaaacagctaaagagtccgaaaaatatcgcgaggaacgtgacgctgtctattctgaatataagctgattatgtccgaaagagatcaagtgatctctgaacttgacaaacttcaaactgaggttgagttggccgagtccaagctgaagagctctacaagcgagaagaaggccgcaaacgaagaaatggaggcgctgaggcagatcaaggatacagtgacgatggacgccggacgcgcaaacaaagaggttgagatcctgaggaagcaatgtaaagccctgtgccaagagctgaaggaggccctgcaggaagcagacgttgccaagtgccggcgagactgggcattccaggagagagataagattgtggctgagcgagactctattagaactctttgtgataacttaagacgggaacgagatagggctgtgtctgaactcgcagaagcattacggtctttggacgacacccgcaaacagaagaacgatgttagccgggagctcaaagagcttaaagagcagatggagagccagctggaaaaagaagcgagatttagacagctgatggctcacagctcccatgactccgctatcgatactgattcaatggagtgggaaaccgaggtggtcgaattcgagagggaaacagaggatatagatcttaaggccctcggcttcgatatggccgagggtgtgaacgaaccatgtttccccggagactgtgggatctttgtgaccaaagtggacaaggggtctattgcagacgggagactgagagtgaatgattggttactccgcatcaatgacgtggacttaatcaacaaggataaaaaacaagcaataaaggcgttgctgaatggagaaggcgctataaatatggtggttcgcagacggaagtcactcggcggtaaggtggtaacacctttacacatcaatctgtccggtcagaaagatagcggtatcagtctcgaaaatggggtgtatgcggctgccgtgctgccaggctcaccggcagctaaagagggctcattggccgtgggggacaggattgtggcaatcaacggcatcgcactcgacaataagtctctgaacgagtgcgagtcgcttctgaggagttgtcaggattcactcaccttgtctctgttgaaagtttttccccagtctagctcctggagtggacagaacattttcgagaatatcaaagactccgacaaaatgctctccttccgggcacatgggcctgaggtgcaggcacataacaaaaggaacctaattcaacacaacaacagtacacaaacggacatattttatacagaccggctggaggacaggaaggaaccgggtccgccagggggatcatcttcatttctgcacaaacccttccccggaggacctctgcaggtctgcccacaggcatgcccttcagcatccgagcggtcactcagctctttcaggtccgacgctagtggcgataggggtttcggtctcgtggatgttcgcggaaggcggccacttcttcctttcgagacagaagtcggtccttgcggtgtgggtgaagcatcactggataaggccgattcagagggttcaaactccgggggaacctggccaaaagcgatgctgtcatccacagccgtccccgaaaagctgtccgtttataaaaaacccaagcagcgcaagagtatcttcgatccgaatacattcaaaagaccccaaacccctcccaagattgactatctcctgccagggccagggcctgcacattctccccagccgtcaaagagagccggtcccctgacacctcccaaacctcccagaagatccgactctattaaatttcagcatagacttgagacttcgtctgagagcgaggccacgttagttggcagctcccccagcacatctccaccatctgctctgcccccagatgtcgaccccggtgaacccatgcacgcaagtcctcccaggaaagcaagagtgcgcatcgcgagcagctactatcccgagggggacggggattcttctcatctgcctgcaaagaagagttgcgacgaggatctgacttcccagaaagtggatgaactgggacagaaacgccgaagaccaaagtcggcgccttcatttaggcctaagctggctcctgtagtcatccccgcacagttcctagaggaacagaagtgcgttcctgcttcaggcgagcttagtcccgaattgcaggaatgggcgccatatagccctgggcattcttccaggcattccaatccccctctatatccttcccggccatccgtcgggactgttcccagatctctgactcccagtaccacagtgagttcaattttgaggaaccccatttacacagtacgctcccaccgggtcggcccatgctcatctccgccagccgcaagggacgctgggccacaaggccttcatccatccgtccagcatcagggtcggttgagcctggacctgtcgcatagaacatgtagtgattattcagagatgcgcgcaacacacggctccaactccctccccagctccgctagactaggaagttccagtaacctgcagttcaaggcagaaaggattaagatcccatcaacgccccgttacccaagatccgttgttggaagcgaacgtgggtccgtgtcccacagcgagtgttccacccctccccaaagccctctgaacatagatacgctgtcctcttgtagccagagccagactagcgcctccacgttacctcggatcgcagtgaatccggctagtctgggcgagaggaggaaagatcgcccatacgtggaagagcccaggcacgtaaaggtgcagaagggcagcgagccactcggcatctcgatagtgtccggcgaaaaaggcggaatatatgtttccaaggttacagtcggatccatcgcccaccaggccggtctggaatacggtgatcagctcctggagtttaatggcattaatctgagaagcgccaccgaacagcaagcgagactgatcatcggacagcagtgtgatacgataaccatattagcacagtacaacccgcatgtgcaccagttgtctagtcacagccggagttcctcccacctcgatcccgctggcacacattccacccttcagggatcagggactacaactcctgaacatcctagcgtgatcgatccattgatggagcaggacgagggcccttcgacccccccagctaagcagtcctcgtcccgaatcgccggagatgctaataaaaagacactggaaccccgtgtggtgttcatcaagaagagccagcttgaactaggtgtgcatctctgcggaggcaacctgcacggcgtattcgtcgcggaggttgaggacgacagtcccgcaaaaggacctgatggcctcgtgcctggagatttaatcctggaatacgggtcccttgacgtgcgtaacaagaccgtggaggaggtatatgtggaaatgctgaagccacgagatggcgtgcgcttgaaagtccagtaccgtcccgaggagttcaccaaggcgaagggacttccgggtgactccttttacattagagccctttacgataggcttgccgacgtggaacaggagttaagcttcaaaaaagacgatatcctttatgttgatgacaccctgccacaggggacttttggtagctggatggcctggcagctggacgaaaacgctcagaagatccagcgtggccagattccatctaagtatgtaatggaccaggaattctctaggcggttatccatgtcggaggtaaaagacgataatagcgccactaaaactctcagcgccgctgccagacgttcattttttagaagaaagcataagcacaaacgatccggctctaaggacggcaaggacctgctcgccctcgacgcctttagttctgattctatccctcttttcgaagattccgtttccttggcataccagcgggtgcaaaaagtcgattgtacagccctgcgcccagtgctgatcttaggacccctgttggatgtcgttaaggagatgcttgtgaatgaagccccaggaaagttctgtagatgccccttggaggtcatgaaggcctcccagcaagcaattgagcggggtgtcaaggactgcctctttgtggactacaagagacgctcaggccattttgacgttactactgttgcatctatcaaggagataaccgaaaaaaatcgtcattgtctgctagatatcgctcctcacgctatcgagagactccatcacatgcacatatatccaattgttatcttcatccactataaaagcgccaaacacattaaggagcagagagaccccatctaccttagagataaggtcacacagcggcactccaaggagcaatttgaggccgctcagaagctcgagcaggagtacagtcgctacttcacaggagtgatacagggcggagcactgagttcaatatgcacacagatcctggcaatggtgaatcaggagcagaataaagtgctgtggattccagcctgccccttgta

SEQ ID NO: 149187 - DNA, 2052 bp, Artificial Sequence
  derived and/or modified sequence
atggagccccagcggagagaactgttggctcaatgccagcaaagccttgctcaagccatgacagaggttgaagccgtgctgggcttgctggaggcagcgggagctctgtcaccaggagagcgtcgccagttagacgaggaggctggcggtgctaaagccgaactgcttcttaagctgctactcgcaaaagagcgggaccatttccaggacctgagggccgctcttgagaaaacccagcctcatttactacccattctctatcttaatggcgtggtgggccctccacagcccgctgagggggcaggaagcacatacagcgtgctgtcgacaatgccttcagacagtgagtccagcagcagcctgagtagtgtcggaacaaccgtcaagcacctccgcgaacagatggaatcccagcttgagaaagaggcccgttttcggcagcttatggcgcacagcagccacgactcagccatcgatacagattctatggaatgggagacagaagtcgtcgaatttgaaagagagacagaagatatcgatcttaaagctctggggtttgacatggcggaaggagtgaatgaaccgtgctttccaggagactgcgggatcttcgttaccaaggttgataagggaagtatcgctgatgggaggcttagagtgaacgattggttactgagaattaatgacgtcgacctcatcaacaaggacaaaaagcaggccatcaaagctctgcttaacggtgagggcgctatcaatatggttgtaaggcggcgaaagagcctagggggaaaagtcgtaactcccctgcatattaacttgagtggtcagaaggatagcgggatcagtcttgagaacggcgtatacgctgctgccgtactgccagggagtccagccgctaaggaggggtcccttgctgtaggagaccgtatcgtggcaattaatggaattgccctcgacaataaatctctcaatgaatgtgaaagcttacttcgctcgtgccaagactcactgacactgtcccttctgaaagttttcccgcaatcctcttcatggtccggacagaacattttcgagaacattaaggattccgacaagatgttgtccttcagggctcatggaccagaggttcaggcacacaacaagagaaatctgattcagcataataacagtacccagactgacatcttttatactgataggctggaggatcgcaaggaacctgggcctccaggtggttcctcttcattccttcacaagcctttcccaggcggacctttacaagtgtgcccacaggcctgtccctccgccagcgaacgtagcctctcctcctttagatccgatgcctccggcgatcgtggcttcggacttgtcgatgtgagaggtcggagaccccttctaccatttgaaactgaggtcggaccctgcggggtgggggaggccagcctggataaagccgactcagaaggctcaaacagcgggggaacttggccaaaggcgatgctttcttccaccgcagtccccgagaagcttagtgtctacaagaagcctaaacagcggaagtcaatctttgaccccaacactttcaaacggccacagacaccgccaaaaatagactacctgctccccggtcccggtccagcccactcccctcagccttccaaaagagccggaccactgacacctcctaagcctcccagaaggtccgattccattaaatttcagcaccgtctggaaacctccagtgaaagcgaggcgaccttggtggggtcttccccatcaacatctcccccttccgcgttgccaccagacgtggaccctggcgagcccatgcacgcaagcccgccacgtaaggcacgtgtcaggattgcaagctcatactatccggagggcgacggcgacagcagccacttacccgcaaagaagtcctgcgatgaggacctgacctctcagaaagtcgacgagctcggccagaaaagacgcagacccaagtccgcgcctagttttagaccaaagctggcaccagtggtcattcctgcacagtttctagagtag

SEQ ID NO: 149188 - DNA, 5760 bp, Artificial Sequence
  derived and/or modified sequence
atggagccccagagaagagagctgctggcccagtgccagcagagcctggcccaggccatgaccgaggtggaggccgtgctgggcctgctggaggccgccggcgccctgagccccggcgagagaagacagctggacgaggaggccggcggcgccaaggccgagctgctgctgaagctgctgctggccaaggagagagaccacttccaggacctgagagccgccctggagaagacccagccccacctgctgcccatcctgtacctgaacggcgtggtgggccccccccagcccgccgagggcgccggcagcacctacagcgtgctgagcaccatgcccagcgacagcgagagcagcagcagcctgagcagcgtgggcaccaccggcaaggcccccagccccccccccctgctgaccgaccagcaggtgaacgagaaggtggagaacctgagcatccagctgagactgatgaccagagagagaaacgagctgagaaagagactggccttcgccacccacggcaccgccttcgacaagagaccctaccacagactgaaccccgactacgagagactgaagatccagtgcgtgagagccatgagcgacctgcagagcctgcagaaccagcacaccaacgccctgaagagatgcgaggaggtggccaaggagaccgacttctaccacaccctgcacagcagactgctgagcgaccagaccagactgaaggacgacgtggacatgctgagaagagagaacggccagctgctgagagagagaaacctgctgcagcagagctgggaggacatgaagagactgcacgaggaggaccagaaggagatcggcgacctgagagcccagcagcagcaggtgctgaagcacaacggcagcagcgagatcctgaacaagctgtacgacaccgccatggacaagctggaggtggtgaagaaggactacgacgccctgagaaagagatacagcgagaaggtggccatccacaacgccgacctgagcagactggagcagctgggcgaggagaaccagagactgctgaagcagaccgagatgctgacccagcagagagacaccgccatccagctgcagcaccagtgcgccctgagcctgagaagattcgaggccatccaccacgagctgaacaaggccaccgcccagaacaaggacctgcagtgggagatggagctgctgcagagcgagctgaccgagctgagaaccacccaggtgaagaccgccaaggagagcgagaagtacagagaggagagagacgccgtgtacagcgagtacaagctgatcatgagcgagagagaccaggtgatcagcgagctggacaagctgcagaccgaggtggagctggccgagagcaagctgaagagcagcaccagcgagaagaaggccgccaacgaggagatggaggccctgagacagatcaaggacaccgtgaccatggacgccggcagagccaacaaggaggtggagatcctgagaaagcagtgcaaggccctgtgccaggagctgaaggaggccctgcaggaggccgacgtggccaagtgcagaagagactgggccttccaggagagagacaagatcgtggccgagagagacagcatcagaaccctgtgcgacaacctgagaagagagagagacagagccgtgagcgagctggccgaggccctgagaagcctggacgacaccagaaagcagaagaacgacgtgagcagagagctgaaggagctgaaggagcagatggagagccagctggagaaggaggccagattcagacagctgatggcccacagcagccacgacagcgccatcgacaccgacagcatggagtgggagaccgaggtggtggagttcgagagagagaccgaggacatcgacctgaaggccctgggcttcgacatggccgagggcgtgaacgagccctgcttccccggcgactgcggcatcttcgtgaccaaggtggacaagggcagcatcgccgacggcagactgagagtgaacgactggctgctgagaatcaacgacgtggacctgatcaacaaggacaagaagcaggccatcaaggccctgctgaacggcgagggcgccatcaacatggtggtgagaagaagaaagagcctgggcggcaaggtggtgacccccctgcacatcaacctgagcggccagaaggacagcggcatcagcctggagaacggcgtgtacgccgccgccgtgctgcccggcagccccgccgccaaggagggcagcctggccgtgggcgacagaatcgtggccatcaacggcatcgccctggacaacaagagcctgaacgagtgcgagagcctgctgagaagctgccaggacagcctgaccctgagcctgctgaaggtgttcccccagagcagcagctggagcggccagaacatcttcgagaacatcaaggacagcgacaagatgctgagcttcagagcccacggccccgaggtgcaggcccacaacaagagaaacctgatccagcacaacaacagcacccagaccgacatcttctacaccgacagactggaggacagaaaggagcccggcccccccggcggcagcagcagcttcctgcacaagcccttccccggcggccccctgcaggtgtgcccccaggcctgccccagcgccagcgagagaagcctgagcagcttcagaagcgacgccagcggcgacagaggcttcggcctggtggacgtgagaggcagaagacccctgctgcccttcgagaccgaggtgggcccctgcggcgtgggcgaggccagcctggacaaggccgacagcgagggcagcaacagcggcggcacctggcccaaggccatgctgagcagcaccgccgtgcccgagaagctgagcgtgtacaagaagcccaagcagagaaagagcatcttcgaccccaacaccttcaagagaccccagaccccccccaagatcgactacctgctgcccggccccggccccgcccacagcccccagcccagcaagagagccggccccctgaccccccccaagccccccagaagaagcgacagcatcaagttccagcacagactggagaccagcagcgagagcgaggccaccctggtgggcagcagccccagcaccagcccccccagcgccctgccccccgacgtggaccccggcgagcccatgcacgccagcccccccagaaaggccagagtgagaatcgccagcagctactaccccgagggcgacggcgacagcagccacctgcccgccaagaagagctgcgacgaggacctgaccagccagaaggtggacgagctgggccagaagagaagaagacccaagagcgcccccagcttcagacccaagctggcccccgtggtgatccccgcccagttcctggaggagcagaagtgcgtgcccgccagcggcgagctgagccccgagctgcaggagtgggccccctacagccccggccacagcagcagacacagcaacccccccctgtaccccagcagacccagcgtgggcaccgtgcccagaagcctgacccccagcaccaccgtgagcagcatcctgagaaaccccatctacaccgtgagaagccacagagtgggcccctgcagcagcccccccgccgccagagacgccggcccccagggcctgcaccccagcgtgcagcaccagggcagactgagcctggacctgagccacagaacctgcagcgactacagcgagatgagagccacccacggcagcaacagcctgcccagcagcgccagactgggcagcagcagcaacctgcagttcaaggccgagagaatcaagatccccagcacccccagataccccagaagcgtggtgggcagcgagagaggcagcgtgagccacagcgagtgcagcacccccccccagagccccctgaacatcgacaccctgagcagctgcagccagagccagaccagcgccagcaccctgcccagaatcgccgtgaaccccgccagcctgggcgagagaagaaaggacagaccctacgtggaggagcccagacacgtgaaggtgcagaagggcagcgagcccctgggcatcagcatcgtgagcggcgagaagggcggcatctacgtgagcaaggtgaccgtgggcagcatcgcccaccaggccggcctggagtacggcgaccagctgctggagttcaacggcatcaacctgagaagcgccaccgagcagcaggccagactgatcatcggccagcagtgcgacaccatcaccatcctggcccagtacaacccccacgtgcaccagctgagcagccacagcagaagcagcagccacctggaccccgccggcacccacagcaccctgcagggcagcggcaccaccacccccgagcaccccagcgtgatcgaccccctgatggagcaggacgagggccccagcaccccccccgccaagcagagcagcagcagaatcgccggcgacgccaacaagaagaccctggagcccagagtggtgttcatcaagaagagccagctggagctgggcgtgcacctgtgcggcggcaacctgcacggcgtgttcgtggccgaggtggaggacgacagccccgccaagggccccgacggcctggtgcccggcgacctgatcctggagtacggcagcctggacgtgagaaacaagaccgtggaggaggtgtacgtggagatgctgaagcccagagacggcgtgagactgaaggtgcagtacagacccgaggagttcaccaaggccaagggcctgcccggcgacagcttctacatcagagccctgtacgacagactggccgacgtggagcaggagctgagcttcaagaaggacgacatcctgtacgtggacgacaccctgccccagggcaccttcggcagctggatggcctggcagctggacgagaacgcccagaagatccagagaggccagatccccagcaagtacgtgatggaccaggagttcagcagaagactgagcatgagcgaggtgaaggacgacaacagcgccaccaagaccctgagcgccgccgccagaagaagcttcttcagaagaaagcacaagcacaagagaagcggcagcaaggacggcaaggacctgctggccctggacgccttcagcagcgacagcatccccctgttcgaggacagcgtgagcctggcctaccagagagtgcagaaggtggactgcaccgccctgagacccgtgctgatcctgggccccctgctggacgtggtgaaggagatgctggtgaacgaggcccccggcaagttctgcagatgccccctggaggtgatgaaggccagccagcaggccatcgagagaggcgtgaaggactgcctgttcgtggactacaagagaagaagcggccacttcgacgtgaccaccgtggccagcatcaaggagatcaccgagaagaacagacactgcctgctggacatcgccccccacgccatcgagagactgcaccacatgcacatctaccccatcgtgatcttcatccactacaagagcgccaagcacatcaaggagcagagagaccccatctacctgagagacaaggtgacccagagacacagcaaggagcagttcgaggccgcccagaagctggagcaggagtacagcagatacttcaccggcgtgatccagggcggcgccctgagcagcatctgcacccagatcctggccatggtgaaccaggagcagaacaaggtgctgtggatccccgcctgccccctgtag

SEQ ID NO: 149189 - DNA, 2052 bp, Artificial Sequence
  derived and/or modified sequence
atggagccccagagaagagagctgctggcccagtgccagcagagcctggcccaggccatgaccgaggtggaggccgtgctgggcctgctggaggccgccggcgccctgagccccggcgagagaagacagctggacgaggaggccggcggcgccaaggccgagctgctgctgaagctgctgctggccaaggagagagaccacttccaggacctgagagccgccctggagaagacccagccccacctgctgcccatcctgtacctgaacggcgtggtgggccccccccagcccgccgagggcgccggcagcacctacagcgtgctgagcaccatgcccagcgacagcgagagcagcagcagcctgagcagcgtgggcaccaccgtgaagcacctgagagagcagatggagagccagctggagaaggaggccagattcagacagctgatggcccacagcagccacgacagcgccatcgacaccgacagcatggagtgggagaccgaggtggtggagttcgagagagagaccgaggacatcgacctgaaggccctgggcttcgacatggccgagggcgtgaacgagccctgcttccccggcgactgcggcatcttcgtgaccaaggtggacaagggcagcatcgccgacggcagactgagagtgaacgactggctgctgagaatcaacgacgtggacctgatcaacaaggacaagaagcaggccatcaaggccctgctgaacggcgagggcgccatcaacatggtggtgagaagaagaaagagcctgggcggcaaggtggtgacccccctgcacatcaacctgagcggccagaaggacagcggcatcagcctggagaacggcgtgtacgccgccgccgtgctgcccggcagccccgccgccaaggagggcagcctggccgtgggcgacagaatcgtggccatcaacggcatcgccctggacaacaagagcctgaacgagtgcgagagcctgctgagaagctgccaggacagcctgaccctgagcctgctgaaggtgttcccccagagcagcagctggagcggccagaacatcttcgagaacatcaaggacagcgacaagatgctgagcttcagagcccacggccccgaggtgcaggcccacaacaagagaaacctgatccagcacaacaacagcacccagaccgacatcttctacaccgacagactggaggacagaaaggagcccggcccccccggcggcagcagcagcttcctgcacaagcccttccccggcggccccctgcaggtgtgcccccaggcctgccccagcgccagcgagagaagcctgagcagcttcagaagcgacgccagcggcgacagaggcttcggcctggtggacgtgagaggcagaagacccctgctgcccttcgagaccgaggtgggcccctgcggcgtgggcgaggccagcctggacaaggccgacagcgagggcagcaacagcggcggcacctggcccaaggccatgctgagcagcaccgccgtgcccgagaagctgagcgtgtacaagaagcccaagcagagaaagagcatcttcgaccccaacaccttcaagagaccccagaccccccccaagatcgactacctgctgcccggccccggccccgcccacagcccccagcccagcaagagagccggccccctgaccccccccaagccccccagaagaagcgacagcatcaagttccagcacagactggagaccagcagcgagagcgaggccaccctggtgggcagcagccccagcaccagcccccccagcgccctgccccccgacgtggaccccggcgagcccatgcacgccagcccccccagaaaggccagagtgagaatcgccagcagctactaccccgagggcgacggcgacagcagccacctgcccgccaagaagagctgcgacgaggacctgaccagccagaaggtggacgagctgggccagaagagaagaagacccaagagcgcccccagcttcagacccaagctggcccccgtggtgatccccgcccagttcctggagtag

SEQ ID NO: 149190 - DNA, 7415 bp, Artificial Sequence
  derived and/or modified sequence
gccaccatggagccccagcgccgggagctgctcgcccagtgtcagcagagcctggcccaggccatgacggaggtggaagccgtgctcgggctgctcgaggccgcgggagcgctcagtcccggcgagcggcggcagctggacgaggaggcgggaggcgccaaggcggagctgctgctcaagctgctcttggccaaggagcgggaccacttccaggacctgcgggcggcgctggagaagacgcagcctcacctgctgcccattctctacctgaacggcgtcgtcgggccgccgcagcccgccgaaggcgcgggttctacctacagcgtcctgtccaccatgccctcagactcagaaagcagcagctccctcagcagtgtgggcactaccgggaaggcgccgtccccaccacccctcctcactgaccagcaagtgaatgagaaggtggagaacctctccattcagctgcggctgatgacccgggagagaaacgagctccgcaagcgcctggcctttgctacgcatggcacggcctttgacaagaggccctaccacaggctgaatcctgactatgagaggctgaagatccagtgcgtgcgagccatgtcggacctgcagagcctgcagaaccagcacaccaacgccttgaagaggtgtgaggaggtggccaaggagactgacttctaccacacactccacagccggctcctgagtgaccagactcggctgaaggatgacgtggacatgctgaggcgggagaatgggcagctgctgcgggagcgaaacctgctgcagcagtcatgggaggacatgaagcggctccacgaggaggaccagaaggagatcggtgacctccgtgcccagcagcagcaggtgttgaagcacaacgggtcatccgagattctcaacaaactgtatgacacggccatggacaagttggaggtggtcaagaaggactatgacgcccttcggaagaggtacagtgagaaagtcgccatccacaatgcagacctgagccgcctggagcagctgggggaggagaaccagcggttgctgaagcagacagagatgctgacccagcagagggacacggccatccagctgcagcaccagtgcgccctctccctgaggaggtttgaggcgatccaccatgagctgaacaaggccacggcgcagaacaaggacctgcagtgggagatggagctgctgcagtcagagctgaccgagctgagaaccacgcaggtgaagacagcaaaggagtcggagaaatacagggaggagcgggacgctgtgtacagcgagtacaagctcatcatgagtgagcgtgaccaggtcatctctgagctggacaagctgcagaccgaagtggagctggccgagtccaagctcaagagcagcacatctgagaagaaggcggccaatgaggagatggaggcgctgcggcagatcaaagacacggtgacaatggatgctgggagagccaacaaggaggttgaaatccttcgaaagcagtgcaaggctctgtgccaggagctgaaggaagccctccaggaggcggatgtggccaagtgccggcgggactgggccttccaggagcgagacaagattgtagcagagcgtgacagcatccggacactgtgtgacaacctgaggcgggagcgggaccgtgcggtgagcgagctggctgaggccctgcgcagcctggatgacacccgcaagcagaagaatgatgtcagccgcgagctgaaggagctcaaggaacagatggaatcccagttggaaaaggaggcccggttccgacagctgatggcccacagctcccacgactcggccattgacacggattccatggagtgggaaacggaagttgtagagttcgagagggagacggaggatattgacttgaaggcactggggtttgatatggcagaaggtgtgaatgagccttgtttcccgggggactgtggcatatttgtcactaaagtggacaaaggaagcattgctgatggccgcttaagggtcaatgactggctgctgagaatcaacgatgtggacctcatcaacaaggacaagaagcaggccatcaaggcgctcctcaatggggagggggccatcaacatggtcgtgcggcggaggaagtccctgggtgggaaggtggtcacgccgctgcacatcaacctcagtggacagaaagacagtggcatcagtctggagaatggagtgtatgctgccgctgtgctgcctggaagccctgccgctaaagaagggtcccttgctgtgggagacaggatcgttgcgatcaatggcattgcactggacaacaagtctctgaatgaatgtgaatctctgctgcgcagctgccaggactccctgaccctgtccctcctgaaggtattccctcagagctcctcgtggagtggccagaacatttttgaaaatatcaaagactctgataagatgctgagttttcgagcccatggcccggaggtccaggctcataacaaacggaacttgatacagcacaataactccacgcagacagacatcttctacacggacaggctggaagacaggaaggagccaggccccccaggaggcagcagctcctttctgcataagccattccctgggggacccttgcaggtctgcccccaggcctgtcccagtgcctctgagcgtagcctgagctccttccgctcagatgcctctggggaccgtggctttgggctggtggacgtgcgtggccggcggccactgctgccctttgagaccgaggtgggcccctgtggggttggggaggcctccctggacaaggcagactctgaaggctccaacagcggcgggacctggcccaaggccatgctcagctccacggcagtgcctgagaagctctctgtttataaaaagccaaagcaaagaaagtccatctttgaccctaacactttcaaacgcccccagacaccccccaaaatagactacctgcttccaggtcctgggcctgctcactctccccagccctccaagagggcggggcctctgacacccccaaaacctcccagaaggagcgactccattaagttccagcacaggctggagactagctccgagtcagaagccactctggtgggcagctccccatccactagtcccccgagcgccctgccccctgacgtggaccccggggagcccatgcacgcatcaccccctcgcaaggccagggtccgcattgcttccagctactaccctgaaggagatggggactcctcccacctgccggccaagaaatcctgtgatgaggacctcacctcccagaaggtggatgagctggggcagaagcgtcgccggccaaaatctgctcccagttttcggccgaagcttgctccagtagtgattcctgctcagttcctggaggaacagaagtgtgtcccggccagtggagaactctccccggagctccaggagtgggcaccttactcgcctgggcattccagccggcacagcaaccccccgctataccctagcaggccgtctgtgggcactgttccccggagtttgacccccagcaccactgtgagctccatcctgcggaaccccatctacactgtgcgcagtcacagggtcggcccctgcagctctccacctgcggcccgagatgctggcccccagggtttgcatcccagtgtccagcaccagggacgcctgagcctggacctgagccacaggacctgcagcgactactccgagatgagagccacccatgggtccaactcactgccctccagcgcccgcctgggttcttcgagtaacttgcagttcaaggcggaacgcattaaaatcccatcaacaccaagatatccgcggagtgtcgtgggctccgagagaggttcagtgtcacattctgaatgcagcactcctccacagtcacccctgaacatcgacaccctgtcctcttgtagccagtcccagacctcagcctccacattgcccagaatcgctgtcaaccccgcgtccctcggggagcggagaaaggacaggccttatgtggaggagccacgccacgtgaaggtgcagaagggctcagagccgctgggcatctccatcgtgagtggagagaagggcggcatctacgtctccaaggtgaccgtggggagcatcgctcaccaggctggcctcgagtatggggatcagttactggagttcaacggcataaacctgcggagcgccacggagcagcaggcgcggctcatcatcgggcagcagtgtgataccatcaccatcctggcccagtacaacccccacgtgcaccagctcagcagccactcccggtccagctcacacctggaccctgccggtacccactccactctccagggcagtggcaccaccaccccggagcatccatctgtcatcgacccactgatggagcaggacgaggggcctagcacccccccagccaagcagagcagctccaggattgcgggagatgccaacaagaagaccctggagccacgcgttgtcttcatcaaaaagtcccagctggagcttggggtgcacttgtgtggtgggaacctgcatggggtgtttgtggccgaggtggaggatgacagtcctgccaagggtcctgacggcctcgtgccaggggacctcatcctggagtatggcagcctggacgtgcggaacaagacagtggaggaagtctatgtggagatgctgaagcccagggatggcgtccgcctgaaggtgcagtaccgccctgaggagttcacgaaggccaagggcctgcctggtgacagcttctacatcagggccctgtacgaccggctggcagatgtggagcaagagttgagctttaagaaggacgacatcctctacgtggatgacaccttaccccagggcacgttcgggtcctggatggcttggcagctggacgagaatgcccagaagatccagcgcgggcagattcccagcaaatatgtgatggaccaagaattctccaggaggctcagcatgtctgaagtcaaagatgacaatagcgccacaaagacgctgtcagcggctgcacgccggtccttttttcggaggaaacacaagcacaaacgcagcgggtccaaggacgggaaagacctgctcgccttggatgccttttccagtgactccattccactctttgaagattcggtgagcctggcctatcagcgggtccagaaggtggactgcaccgctctgaggcctgtcctgattctggggcctttgctggacgtggtgaaggagatgctggtgaatgaggctcctggcaagttctgcagatgtccccttgaggtgatgaaggcctcccagcaggccattgagcggggtgtcaaagattgcctgtttgtcgactataagcggagaagcggccatttcgatgtgaccactgtggcgtcaataaaggagatcacagaaaagaaccgacactgcctcctggacattgctccgcacgctattgagcggctccaccacatgcacatctaccccattgtcatcttcatccactacaagagcgccaagcacatcaaggagcagagagaccccatctacctgagggacaaggtgactcagaggcattccaaagagcagtttgaggcggcgcagaagcttgagcaggagtacagcaggtacttcacaggggtcatccagggaggagccctgtcaagcatttgcactcagatcttggcaatggtcaatcaagaacaaaataaagtcctgtggattccagcctgcccgctctaggagaatgctgtgctgtggatgactgcagctggccgcctgaggggacaccagactcagctcttttctagcgactgaaagtagaagtctgtccgtctatgaacatgcgggggaaggatccggaaccaggacccagaagcacctcctttgtagacagagggccacggctgcgtgcgatccaggcccaggcccacacactctgcccgtgtcacacgtgtgctttaacacaaaacagataacactaaagacgggttcagcacccacctttctttagccagctgatcagagatgctgcaaagagaacctttcggatcactcgtttacaagccttttctaagtatttggtggtttatgtttacttgaacggctccatgttgccggtgcccagcccctgtcccctctgtcaaccccctgtcgctttggtgttggtttcgttcccgtcttcagcaaaacgaccttggaacctcaatgggggctgctttgctttgggaggttcttgttggtgggaccagagctttgacaaacctcctgctccttggtggcacctctcctggaaggacgtcacaactccaggtgctcagactgcctgtggcagcagaaccagtgcctttggcattttcctcccacaatggggaaggtgactttggcattcttacaaactcgtctctcggcctttctctcctgccttccacagcctctcgtttctcctccatctgtgcttattacttgaggactgtgtctgctccgtgagagctgcgtgggcagggctgcagtggggtccaggtggtgttcagctgtgctgatgcctgccattgggtcctccttaggctctgtaagtcgtgacagccttcatcagtgcaatgtttgcagggtaattcttaaactttttagagggtggcaggtacatcagttctttttgatatgaaaacattcatgtttcagacattgaattgagagcttttaggggaagcataatggttattgtcactatcaacagtctaaaaagaaaaactgaggtctttttaatcttgattacagcactcacggcatgcaccctactcagtgtgggtgtcttcgtttgggggctttttttttttttgcacttctgaggctagatatgtctggctgaagatttgatgtggttcctccttaagctatgcgtcctgttaataataggtactgtactgggctctgtgtaagtgtcgttggggtaggacctatattttaatactgttcctaacatttcattttactagcgagaaatctttgatttcattttattctttgtaattctagacactagattgtagtttagccataactgatgttttttaaaaagggatatattttcttgcacagttgttcaaaaaagagacaagtttcagtcctcaatgctgtcctttgttttacaggtacaagttttctagctcagacaaactatgaaaaactgtagactattctcaaggtattaactcgcagaccctctgggggtaggggctgttttctaagttacaggcagagtgggactgagatggtacagtgtgcacagacaggtactgagctgacagactgggattttctgtactaaaatgttactttgtatcaaaagttaaacaggctttagtacaacaaataaaggtcaatttctgtaa

SEQ ID NO: 149191 - DNA, 6154 bp, Artificial Sequence
  derived and/or modified sequence
cggcgccctagggctgctgccgaggtgctcgcctgcccgcccgccggcctcggggggcccgggaggcgtccggcggggcggggcggcgcggcccgccaccatggagccccagcgccgggagctgctcgcccagtgtcagcagagcctggcccaggccatgacggaggtggaagccgtgctcgggctgctcgaggccgcgggagcgctcagtcccggcgagcggcggcagctggacgaggaggcgggaggcgccaaggcggagctgctgctcaagctgctcttggccaaggagcgggaccacttccaggacctgcgggcggcgctggagaagacgcagcctcacctgctgcccattctctacctgaacggcgtcgtcgggccgccgcagcccgccgaaggcgcgggttctacctacagcgtcctgtccaccatgccctcagactcagaaagcagcagctccctcagcagtgtgggcactaccgtaaaacatttgagggaacagatggaatcccagttggaaaaggaggcccggttccgacagctgatggcccacagctcccacgactcggccattgacacggattccatggagtgggaaacggaagttgtagagttcgagagggagacggaggatattgacttgaaggcactggggtttgatatggcagaaggtgtgaatgagccttgtttcccgggggactgtggcatatttgtcactaaagtggacaaaggaagcattgctgatggccgcttaagggtcaatgactggctgctgagaatcaacgatgtggacctcatcaacaaggacaagaagcaggccatcaaggcgctcctcaatggggagggggccatcaacatggtcgtgcggcggaggaagtccctgggtgggaaggtggtcacgccgctgcacatcaacctcagtggacagaaagacagtggcatcagtctggagaatggagtgtatgctgccgctgtgctgcctggaagccctgccgctaaagaagggtcccttgctgtgggagacaggatcgttgcgatcaatggcattgcactggacaacaagtctctgaatgaatgtgaatctctgctgcgcagctgccaggactccctgaccctgtccctcctgaaggtattccctcagagctcctcgtggagtggccagaacatttttgaaaatatcaaagactctgataagatgctgagttttcgagcccatggcccggaggtccaggctcataacaaacggaacttgatacagcacaataactccacgcagacagacatcttctacacggacaggctggaagacaggaaggagccaggccccccaggaggcagcagctcctttctgcataagccattccctgggggacccttgcaggtctgcccccaggcctgtcccagtgcctctgagcgtagcctgagctccttccgctcagatgcctctggggaccgtggctttgggctggtggacgtgcgtggccggcggccactgctgccctttgagaccgaggtgggcccctgtggggttggggaggcctccctggacaaggcagactctgaaggctccaacagcggcgggacctggcccaaggccatgctcagctccacggcagtgcctgagaagctctctgtttataaaaagccaaagcaaagaaagtccatctttgaccctaacactttcaaacgcccccagacaccccccaaaatagactacctgcttccaggtcctgggcctgctcactctccccagccctccaagagggcggggcctctgacacccccaaaacctcccagaaggagcgactccattaagttccagcacaggctggagactagctccgagtcagaagccactctggtgggcagctccccatccactagtcccccgagcgccctgccccctgacgtggaccccggggagcccatgcacgcatcaccccctcgcaaggccagggtccgcattgcttccagctactaccctgaaggagatggggactcctcccacctgccggccaagaaatcctgtgatgaggacctcacctcccagaaggtggatgagctggggcagaagcgtcgccggccaaaatctgctcccagttttcggccgaagcttgctccagtagtgattcctgctcagttcctggaggaacagaagtgtgtcccggccagtggagaactctccccggagctccaggagtgggcaccttactcgcctgggcattccagccggcacagcaaccccccgctataccctagcaggccgtctgtgggcactgttccccggagtttgacccccagcaccactgtgagctccatcctgcggaaccccatctacactgtgcgcagtcacagggtcggcccctgcagctctccacctgcggcccgagatgctggcccccagggtttgcatcccagtgtccagcaccagggacgcctgagcctggacctgagccacaggacctgcagcgactactccgagatgagagccacccatgggtccaactcactgccctccagcgcccgcctgggttcttcgagtaacttgcagttcaaggcggaacgcattaaaatcccatcaacaccaagatatccgcggagtgtcgtgggctccgagagaggttcagtgtcacattctgaatgcagcactcctccacagtcacccctgaacatcgacaccctgtcctcttgtagccagtcccagacctcagcctccacattgcccagaatcgctgtcaaccccgcgtccctcggggagcggagaaaggacaggccttatgtggaggagccacgccacgtgaaggtgcagaagggctcagagccgctgggcatctccatcgtgagtggagagaagggcggcatctacgtctccaaggtgaccgtggggagcatcgctcaccaggctggcctcgagtatggggatcagttactggagttcaacggcataaacctgcggagcgccacggagcagcaggcgcggctcatcatcgggcagcagtgtgataccatcaccatcctggcccagtacaacccccacgtgcaccagctcagcagccactcccggtccagctcacacctggaccctgccggtacccactccactctccagggcagtggcaccaccaccccggagcatccatctgtcatcgacccactgatggagcaggacgaggggcctagcacccccccagccaagcagagcagctccaggattgcgggagatgccaacaagaagaccctggagccacgcgttgtcttcatcaaaaagtcccagctggagcttggggtgcacttgtgtggtgggaacctgcatggggtgtttgtggccgaggtggaggatgacagtcctgccaagggtcctgacggcctcgtgccaggggacctcatcctggagtatggcagcctggacgtgcggaacaagacagtggaggaagtctatgtggagatgctgaagcccagggatggcgtccgcctgaaggtgcagtaccgccctgaggagttcacgaaggccaagggcctgcctggtgacagcttctacatcagggccctgtacgaccggctggcagatgtggagcaagagttgagctttaagaaggacgacatcctctacgtggatgacaccttaccccagggcacgttcgggtcctggatggcttggcagctggacgagaatgcccagaagatccagcgcgggcagattcccagcaaatatgtgatggaccaagaattctccaggaggctcagcatgtctgaagtcaaagatgacaatagcgccacaaagacgctgtcagcggctgcacgccggtccttttttcggaggaaacacaagcacaaacgcagcgggtccaaggacgggaaagacctgctcgccttggatgccttttccagtgactccattccactctttgaagattcggtgagcctggcctatcagcgggtccagaaggtggactgcaccgctctgaggcctgtcctgattctggggcctttgctggacgtggtgaaggagatgctggtgaatgaggctcctggcaagttctgcagatgtccccttgaggtgatgaaggcctcccagcaggccattgagcggggtgtcaaagattgcctgtttgtcgactataagcggagaagcggccatttcgatgtgaccactgtggcgtcaataaaggagatcacagaaaagaaccgacactgcctcctggacattgctccgcacgctattgagcggctccaccacatgcacatctaccccattgtcatcttcatccactacaagagcgccaagcacatcaaggagcagagagaccccatctacctgagggacaaggtgactcagaggcattccaaagagcagtttgaggcggcgcagaagcttgagcaggagtacagcaggtacttcacaggggtcatccagggaggagccctgtcaagcatttgcactcagatcttggcaatggtcaatcaagaacaaaataaagtcctgtggattccagcctgcccgctctaggagaatgctgtgctgtggatgactgcagctggccgcctgaggggacaccagactcagctcttttctagcgactgaaagtagaagtctgtccgtctatgaacatgcgggggaaggatccggaaccaggacccagaagcacctcctttgtagacagagggccacggctgcgtgcgatccaggcccaggcccacacactctgcccgtgtcacacgtgtgctttaacacaaaacagataacactaaagacgggttcagcacccacctttctttagccagctgatcagagatgctgcaaagagaacctttcggatcactcgtttacaagccttttctaagtatttggtggtttatgtttacttgaacggctccatgttgccggtgcccagcccctgtcccctctgtcaaccccctgtcgctttggtgttggtttcgttcccgtcttcagcaaaacgaccttggaacctcaatgggggctgctttgctttgggaggttcttgttggtgggaccagagctttgacaaacctcctgctccttggtggcacctctcctggaaggacgtcacaactccaggtgctcagactgcctgtggcagcagaaccagtgcctttggcattttcctcccacaatggggaaggtgactttggcattcttacaaactcgtctctcggcctttctctcctgccttccacagcctctcgtttctcctccatctgtgcttattacttgaggactgtgtctgctccgtgagagctgcgtgggcagggctgcagtggggtccaggtggtgttcagctgtgctgatgcctgccattgggtcctccttaggctctgtaagtcgtgacagccttcatcagtgcaatgtttgcagggtaattcttaaactttttagagggtggcaggtacatcagttctttttgatatgaaaacattcatgtttcagacattgaattgagagcttttaggggaagcataatggttattgtcactatcaacagtctaaaaagaaaaactgaggtctttttaatcttgattacagcactcacggcatgcaccctactcagtgtgggtgtcttcgtttgggggctttttttttttttgcacttctgaggctagatatgtctggctgaagatttgatgtggttcctccttaagctatgcgtcctgttaataataggtactgtactgggctctgtgtaagtgtcgttggggtaggacctatattttaatactgttcctaacatttcattttactagcgagaaatctttgatttcattttattctttgtaattctagacactagattgtagtttagccataactgatgttttttaaaaagggatatattttcttgcacagttgttcaaaaaagagacaagtttcagtcctcaatgctgtcctttgttttacaggtacaagttttctagctcagacaaactatgaaaaactgtagactattctcaaggtattaactcgcagaccctctgggggtaggggctgttttctaagttacaggcagagtgggactgagatggtacagtgtgcacagacaggtactgagctgacagactgggattttctgtactaaaatgttactttgtatcaaaagttaaacaggctttagtacaacaaataaaggtcaatttctgt

SEQ ID NO: 149192 - protein, 422 aa, Artificial Sequence
  derived and/or modified sequence
MPAGRRGPAAQSARRPPPLLPLLLLLCVLGAPRAGSGAHTAVISPQDPTLLIGSSLLATCSVHGDPPGATAEGLYWTLNGRRLPPELSRVLNASTLALALANLNGSRQRSGDNLVCHARDGSILAGSCLYVGLPPEKPVNISCWSKNMKDLTCRWTPGAHGETFLHTNYSLKYKLRWYGQDNTCEEYHTVGPHSCHIPKDLALFTPYEIWVEATNRLGSARSDVLTLDILDVVTTDPPPDVHVSRVGGLEDQLSVRWVSPPALKDFLFQAKYQIRYRVEDSVDWKVVDDVSNQTSCRLAGLKPGTVYFVQVRCNPFGIYGSKKAGIWSEWSHPTAASTPRSERPGPGGGACEPRGGEPSSGPVRRELKQFLGWLKKHAYCSNLSFRLYDQWRAWMQKSHKTRNQDEGILPSGRRGTARGPAR

SEQ ID NO: 149193 - protein, 438 aa, Artificial Sequence
  derived and/or modified sequence
MVQWKRLCQLHYLWALGCYMLLATVALKLSFRLKCDSDHLGLESRESQSQYCRNILYNFLKLPAKRSINCSGVTRGDQEAVLQAILNNLEVKKKREPFTDTHYLSLTRDCEHFKAERKFIQFPLSKEEVEFPIAYSMVIHEKIENFERLLRAVYAPQNIYCVHVDEKSPETFKEAVKAIISCFPNVFIASKLVRVVYASWSRVQADLNCMEDLLQSSVPWKYFLNTCGTDFPIKSNAEMVQALKMLNGRNSMESEVPPKHKETRWKYHFEVVRDTLHLTNKKKDPPPYNLTMFTGNAYIVASRDFVQHVLKNPKSQQLIEWVKDTYSPDEHLWATLQRARWMPGSVPNHPKYDISDMTSIARLVKWQGHEGDIDKGAPYAPCSGIHQRAICVYGAGDLNWMLQNHHLLANKFDPKVDDNALQCLEEYLRYKAIYGTEL

SEQ ID NO: 149194 - protein, 87 aa, Artificial Sequence
  derived and/or modified sequence
MVQWKRLCQLHYLWALGCYMLLATVALKLSFRLKCDSDHLGLESRESQSQYCRNILYNFLKLPAKRSINCSGVTRGDQEAVLQAILN

SEQ ID NO: 149195 - protein, 153 aa, Artificial Sequence
  derived and/or modified sequence
MVQWKRLCQLHYLWALGCYMLLATVALKLSFRLKCDSDHLGLESRESQSQYCRNILYNFLKLPAKRSINCSGVTRGDQEAVLQAILNNLEVKKKREPFTDTHYLSLTRDCEHFKAERKFIQFPLSKEEVEFPIAYSMVIHEKIENFERLLRAV

SEQ ID NO: 149196 - protein, 53 aa, Artificial Sequence
  derived and/or modified sequence
MVQWKRLCQLHYLWALGCYMLLATVALKLSFRLKCDSDHLGLESRESQSQYCR

SEQ ID NO: 149197 - DNA, 1317 bp, Artificial Sequence
  derived and/or modified sequence
atggttcagtggaagcgcttatgtcagcttcactacttgtgggcactcgggtgctatatgctgttggcgacagtcgcgctgaaactctctttcagactgaagtgcgactctgaccatctcggcttagagagtcgagagtcccagtcccaatactgccgcaacattctgtacaacttccttaagttacccgcgaagaggtcaataaactgctccggggtgacacgtggcgaccaggaagctgtcctgcaagccatcctgaataatctagaggtgaagaagaagagagagccatttactgatactcactacttatctctcaccagagactgtgagcacttcaaggccgagcggaagtttatccaattcccactttctaaggaggaggtggagttcccgatcgcctactcgatggtgattcatgagaaaattgaaaactttgaaaggctcttgcgagctgtgtatgcgccgcagaacatctactgtgtccacgttgatgagaagtctccagagacctttaaagaggccgtgaaggccatcattagctgtttcccaaatgtattcattgcttccaaactcgtgcgagtggtgtatgcctcctggagcagggtccaggccgacttgaactgtatggaggacctgctgcagtcatccgttccatggaaatattttctgaatacctgcggcactgatttccctattaaatctaatgcagagatggttcaggcgttgaaaatgctgaatggaagaaacagcatggagagtgaggtcccaccgaagcataaggaaacccgttggaagtaccattttgaagtcgtacgggacacactgcatctgacaaataagaaaaaggacccacctccgtacaacctcactatgtttactggcaacgcttatatcgtggcttcaagagactttgtgcaacacgtgctgaaaaacccgaaaagccagcaattgatcgagtgggtgaaggacacatattcacctgatgagcacctctgggccacgctccagcgagccagatggatgcccgggtcagtacccaaccatccaaagtacgacattagcgacatgacttctatcgcacggctagtcaagtggcaggggcatgaaggggatattgacaaaggagcaccctatgcgccttgctctggtatccaccagcgggctatctgcgtgtatggcgcaggggacctcaactggatgttacagaatcatcatttgctggctaacaagttcgatccgaaggtagatgataatgccctccagtgcctggaggaatacctgagatataaagcaatctacggaaccgagctatag

SEQ ID NO: 149198 - DNA, 264 bp, Artificial Sequence
  derived and/or modified sequence
atggtgcaatggaaacggttatgccagctacattatttgtgggcactgggttgttacatgctcttagcaacagtggctctcaagctctcgtttcggttgaagtgtgactccgatcacctgggcctagaatcacgcgagtcacaatcccagtactgcagaaacatcctttataacttcctgaaactccctgcaaagcgcagtatcaattgcagcggagtgacacggggtgatcaggaagccgttctgcaagcaatcctgaattag

SEQ ID NO: 149199 - DNA, 462 bp, Artificial Sequence
  derived and/or modified sequence
atggtacagtggaaacggttatgccaactgcactatctgtgggccctgggttgctacatgttgctggccacagtcgcacttaagctgtccttccgcctcaagtgcgatagtgaccacttgggtctggagagcagagagagccaatcacagtattgtcgtaacatactttataatttcttgaaactcccagctaagcggtcaatcaattgctccggagtcactcgcggggatcaggaagcagtgctgcaggctattctgaataatttggaggtaaaaaagaaaagagagccttttaccgacactcactatctcagcctgacacgggattgtgagcacttcaaagcagaaaggaagtttattcagttcccactctcaaaagaggaggtagaattccccatagcctattcaatggtaatacatgaaaagattgagaacttcgagcgcctactgcgggcagtttag

SEQ ID NO: 149200 - DNA, 162 bp, Artificial Sequence
  derived and/or modified sequence
atggtgcaatggaaacgcctgtgtcagctgcattatctctgggccctaggttgctacatgctcttggctaccgtggcccttaaactgtccttcagactgaagtgtgattccgatcacctgggactggaatcccgggaatctcaatcccagtattgtcggtag

SEQ ID NO: 149201 - DNA, 1317 bp, Artificial Sequence
  derived and/or modified sequence
atggtgcagtggaagcggctctgccagctacattatctgtgggccctgggctgctacatgctccttgctacagtcgcactgaaattgtcattcagattaaagtgcgattcagaccacttgggtctcgagagcagggagtctcagtctcagtattgtcggaatatcttatacaactttctaaaactgcctgcgaagagatctatcaattgctctggtgtaactagaggcgaccaagaagctgtgctgcaggctattcttaacaacctggaagtgaagaagaagcgcgaaccattcaccgacactcattacctcagcctgactcgcgactgcgagcacttcaaggccgagaggaagttcatccagttccctctcagtaaggaggaagtggagttccccatcgcatactccatggttatccacgaaaaaattgaaaacttcgagcggcttctcagggcagtgtatgctcctcagaatatttattgcgtacatgtggacgaaaagtcacccgagaccttcaaagaagcagtgaaggcaattatcagttgttttcctaatgtgtttatcgcatccaaattagttcgcgtagtttacgccagttggtctcgcgtgcaagccgacctcaactgcatggaagaccttctgcagtccagcgtaccatggaagtatttcttaaatacttgtgggaccgatttcccaatcaagtcaaacgccgagatggtgcaggcactcaagatgctcaatgggaggaactccatggagtccgaggtgccgccaaagcataaggagaccagatggaaatatcactttgaagttgtcagagatacacttcacctgactaacaaaaagaaggaccctccaccctataacctgactatgttcacaggcaacgcctatattgtggcctcgcgggacttcgtccagcacgtcttaaagaatcctaagtcccagcagctaattgagtgggtaaaggatacttactctccggacgagcacctctgggctaccctgcagagggcaaggtggatgccgggctccgtgcctaaccatcccaagtacgacatttcagacatgacgagtattgctagactagtgaaatggcaggggcacgaaggagatattgataagggagctccctatgccccttgttctggcattcaccagcgcgccatttgcgtttatggggccggagacttgaactggatgctccagaaccatcatctgctggcaaacaagtttgatcctaaggtggacgataacgcattacagtgcctagaggaatacctacgctataaggccatttatggcaccgagttgtag

SEQ ID NO: 149202 - DNA, 3034 bp, Artificial Sequence
  derived and/or modified sequence
agtcagagcctcttctctctaagtcacgggaactgcccttgctacttgtgacctgccctttactcagcagtttttgttctgggaagccctgggattctgctaatacctatcactgtaggtgctgaagggaaacagatgaagaacatgacctcaaggagcttcctgtcaatgagaagaccaagctgacgcctggcaaagatattaaagaggagcctgaaactgttccttggacatcttatgaatgtcagaaaataccttttggagggttagaagatcaggggacatggttgttcacatttgctgccacggaacaccgccagtcttcacttggaaacagaatcacgccttgtgaagagatcatccctaagcaggagagaagctactaaaggattgtgtcctcctccaccttccctgtgctcggtctccacctgtctcccattctgtgacgatggttcaatggaagagactctgccagctgcattacttgtgggctctgggctgctatatgctgctggccactgtggctctgaaactttctttcaggttgaagtgtgactctgaccacttgggtctggagtccagggaatctcaaagccagtactgtaggaatatcttgtataatttcctgaaacttccagcaaagaggtctatcaactgttcaggggtcacccgaggggaccaagaggcagtgcttcaggctattctgaataacctggaggtcaagaagaagcgagagcctttcacagacacccactacctctccctcaccagagactgtgagcacttcaaggctgaaaggaagttcatacagttcccactgagcaaagaagaggtggagttccctattgcatactctatggtgattcatgagaagattgaaaactttgaaaggctactgcgagctgtgtatgcccctcagaacatatactgtgtccatgtggatgagaagtccccagaaactttcaaagaggcggtcaaagcaattatttcttgcttcccaaatgtcttcatagccagtaagctggttcgggtggtttatgcctcctggtccagggtgcaagctgacctcaactgcatggaagacttgctccagagctcagtgccgtggaaatacttcctgaatacatgtgggacggactttcctataaagagcaatgcagagatggtccaggctctcaagatgttgaatgggaggaatagcatggagtcagaggtacctcctaagcacaaagaaacccgctggaaatatcactttgaggtagtgagagacacattacacctaaccaacaagaagaaggatcctcccccttataatttaactatgtttacagggaatgcgtacattgtggcttcccgagatttcgtccaacatgttttgaagaaccctaaatcccaacaactgattgaatgggtaaaagacacttatagcccagatgaacacctctgggccacccttcagcgtgcacggtggatgcctggctctgttcccaaccaccccaagtacgacatctcagacatgacttctattgccaggctggtcaagtggcagggtcatgagggagacatcgataagggtgctccttatgctccctgctctggaatccaccagcgggctatctgcgtttatggggctggggacttgaattggatgcttcaaaaccatcacctgttggccaacaagtttgacccaaaggtagatgataatgctcttcagtgcttagaagaatacctacgttataaggccatctatgggactgaactttgagacacactatgagagcgttgctacctgtggggcaagagcatgtacaaacatgctcagaacttgctgggacagtgtgggtgggagaccagggctttgcaattcgtggcatcctttaggataagagggctgctattagagtgtgggtaagtagatcttttgccttgcaaattgctgcctgggtgaatgctgcttgttctctcacccctaaccctagtagttcctccactaactttctcactaagtgagaatgagaactgctgtgatagggagagtgaaggagggatatgtggtagagcacttgatttcagttgaatgcctgctggtagcttttccattctgtggagctgccgttcctaataattccaggtttggtagcgtggaggagaactttgatggaaagagaaccttcccttctgtactgttaacttaaaaataaatagctcctgattcaaagtattacctctactttttgcctagtatgccagaaataatataaatataaacagataaagtgtgtgagactttttctcataactattcatgacatttaaaatccctaggggctggcaagagagttctcattattctgaaatggtcctgacaagctgcatgaatagcaattttttttttgagacagagtcttgctctgtcacccaggctggactgcagtagtgcaatctcagttcactgcaacctccgcctcccaggttcaagcgatactcccacctcagcctcctgagtagctgggactacaggcatgcagcaccatgtctggctaatttttgtatttttagtagaggccgggtttcaccatattcgccaggctggtcttgaactcctgaccttgtgatctgcccgcctcggccttccgaaatgctgggattacaggtgggaactactgcgcctggcctacaaatagcaaattctaacgaagacaggggaacagggatggttcttccattgttaaaagccatcctcattttgtttatattgccaggtttgtgatttttctgtaaaggaaaaggcagggtgatttaaccagtttgaccacctttcctgtactcttacaggaaaatcgcagcactaattctaattttgtccactttacagccaaagcttagctaatgttccataaaggagataatagccaatcaggtaaggtaatgtgtaattcattattcaaagtggaacatgtttttgtagggggagagtctgcactattaataattgtattgagaaataaaaataaactaggactattcagttaaa

SEQ ID NO: 149203 - DNA, 761 bp, Artificial Sequence
  derived and/or modified sequence
tgcctctcaagggctggggctgcaaaacatctcagagtttgactctttgcttcgacactaccgtctgcaagttcttgtgctagccgctgtgggaaagacacagctgagtcagacatgatccctgccctcaaggagcttgtgacaccacagtgaagacaagtctattttggtgctgaagggaaacagatgaagaacatgacctcaaggagcttcctgtcaatgagaagaccaagctgacgcctggcaaagatattaaagaggagcctgaaactgttccttggacatcttatgaatgtcagaaaataccttttggagggttagaagatcaggggacatggttgttcacatttgctgccacggaacaccgccagtcttcacttggaaacagaatcacgccttgtgaagagatcatccctaagcaggagagaagctactaaaggattgtgtcctcctccaccttccctgtgctcggtctccacctgtctcccattctgtgacgatggttcaatggaagagactctgccagctgcattacttgtgggctctgggctgctatatgctgctggccactgtggctctgaaactttctttcaggttgaagtgtgactctgaccacttgggtctggagtccagggaatctcaaagccagtactgtaggaatatcttgtataatttcctgaaacttccagcaaagaggtctatcaactgttcaggggtcacccgaggggaccaagaggcagtgcttcaggctattctgaata

SEQ ID NO: 149204 - DNA, 667 bp, Artificial Sequence
  derived and/or modified sequence
agttgttccttttctcctggggtggaggtggatccagatccagacttgagtgtggtcggctagtttgtagggtcagattacagatctccatcaacaaaccagatgtaaggggcttctaggcaggtctttactaaggatttttgtccaggattgtgtcctcctccaccttccctgtgctcggtctccacctgtctcccattctgtgacgatggttcaatggaagagactctgccagctgcattacttgtgggctctgggctgctatatgctgctggccactgtggctctgaaactttctttcaggttgaagtgtgactctgaccacttgggtctggagtccagggaatctcaaagccagtactgtaggaatatcttgtataatttcctgaaacttccagcaaagaggtctatcaactgttcaggggtcacccgaggggaccaagaggcagtgcttcaggctattctgaataacctggaggtcaagaagaagcgagagcctttcacagacacccactacctctccctcaccagagactgtgagcacttcaaggctgaaaggaagttcatacagttcccactgagcaaagaagaggtggagttccctattgcatactctatggtgattcatgagaagattgaaaactttgaaaggctactgcgagctgtg

SEQ ID NO: 149205 - DNA, 668 bp, Artificial Sequence
  derived and/or modified sequence
aaaggctttcaagttcttgcgtgagcactgacaggcttttatgaatagttggtgacacaggtacaaactgggctgttctggctgaaatatctgtttgccttgtcggatattgccagcattcttcctgcctcactgacctccctgaatgacttgggcttgagaatgtttctgcatgatttctctgagcttgctgtcttacctgagagcaggaagtcaaaaggagagtgatggagccacctgctgccctctactttgcagatattaaagaggagcctgaaactgttccttggacatcttatgaatgtcagaaaataccttttggagggttagaagatcaggggacatggttgttcacatttgctgccacggaacaccgccagtcttcacttggaaacagaatcacgccttgtgaagagatcatccctaagcaggagagaagctactaaaggattgtgtcctcctccaccttccctgtgctcggtctccacctgtctcccattctgtgacgatggttcaatggaagagactctgccagctgcattacttgtgggctctgggctgctatatgctgctggccactgtggctctgaaactttctttcaggttgaagtgtgactctgaccacttgggtctggagtccagggaatctcaaagccagtactgtagga

SEQ ID NO: 149206 - DNA, 2360 bp, Artificial Sequence
  derived and/or modified sequence
agtcagagcctcttctctctaagtcacgggaactgcccttgctacttgtgacctgccctttactcagcagtttttgttctgggaagccctgggattctgctaatacctatcactgtaggtgctgaagggaaacagatgaagaacatgacctcaaggagcttcctgtcaatgagaagaccaagctgacgcctggcaaagcattcttcctgcctcactgacctccctgaatgacttgggcttgagaatgtttctgcatgatttctctgagcttgctgtcttacctgagagcaggaagtcaaaaggagagtgatggagccacctgctgccctctactttgcagatattaaagaggagcctgaaactgttccttggacatcttatgaatgtcagaaaataccttttggagggttagaagatcaggggacatggttgttcacatttgctgccacggaacaccgccagtcttcacttggaaacagaatcacgccttgtgaagagatcatccctaagcaggagagaagctactaaaggattgtgtcctcctccaccttccctgtgctcggtctccacctgtctcccattctgtgacgatggttcaatggaagagactctgccagctgcattacttgtgggctctgggctgctatatgctgctggccactgtggctctgaaactttctttcaggttgaagtgtgactctgaccacttgggtctggagtccagggaatctcaaagccagtactgtaggaatatcttgtataatttcctgaaacttccagcaaagaggtctatcaactgttcaggggtcacccgaggggaccaagaggcagtgcttcaggctattctgaataacctggaggtcaagaagaagcgagagcctttcacagacacccactacctctccctcaccagagactgtgagcacttcaaggctgaaaggaagttcatacagttcccactgagcaaagaagaggtggagttccctattgcatactctatggtgattcatgagaagattgaaaactttgaaaggctactgcgagctgtgtatgcccctcagaacatatactgtgtccatgtggatgagaagtccccagaaactttcaaagaggcggtcaaagcaattatttcttgcttcccaaatgtcttcatagccagtaagctggttcgggtggtttatgcctcctggtccagggtgcaagctgacctcaactgcatggaagacttgctccagagctcagtgccgtggaaatacttcctgaatacatgtgggacggactttcctataaagagcaatgcagagatggtccaggctctcaagatgttgaatgggaggaatagcatggagtcagaggtacctcctaagcacaaagaaacccgctggaaatatcactttgaggtagtgagagacacattacacctaaccaacaagaagaaggatcctcccccttataatttaactatgtttacagggaatgcgtacattgtggcttcccgagatttcgtccaacatgttttgaagaaccctaaatcccaacaactgattgaatgggtaaaagacacttatagcccagatgaacacctctgggccacccttcagcgtgcacggtggatgcctggctctgttcccaaccaccccaagtacgacatctcagacatgacttctattgccaggctggtcaagtggcagggtcatgagggagacatcgataagggtgctccttatgctccctgctctggaatccaccagcgggctatctgcgtttatggggctggggacttgaattggatgcttcaaaaccatcacctgttggccaacaagtttgacccaaaggtagatgataatgctcttcagtgcttagaagaatacctacgttataaggccatctatgggactgaactttgagacacactatgagagcgttgctacctgtggggcaagagcatgtacaaacatgctcagaacttgctgggacagtgtgggtgggagaccagggctttgcaattcgtggcatcctttaggataagagggctgctattagagtgtgggtaagtagatcttttgccttgcaaattgctgcctgggtgaatgctgcttgttctctcacccctaaccctagtagttcctccactaactttctcactaagtgagaatgagaactgctgtgatagggagagtgaaggagggatatgtggtagagcacttgatttcagttgaatgcctgctggtagcttttccattctgtggagctgccgttcctaataattccaggtttggtagcgtggaggagaactttgatggaaagagaaccttcccttctgtactgttaacttaaaaataaatagctcctgattcaaa

SEQ ID NO: 149207 - DNA, 1317 bp, Artificial Sequence
  derived and/or modified sequence
atggtgcagtggaagaggctgtgccagctgcactacctgtgggccctgggctgctacatgctgctggccaccgtggccctgaagctgtccttccggctgaagtgtgacagcgaccacctgggcctggagagccgggagagccagagccagtactgcaggaacatcctgtacaacttcctgaagctgcctgccaagaggagcatcaactgcagcggcgtgaccaggggggaccaggaggccgtgctgcaggccatcctgaacaacctggaggtgaagaagaagcgggagcccttcacagacacccactacctgagcctgacccgggactgtgagcacttcaaggccgagaggaagttcatccagttccccctgagcaaggaggaggtggagttccccatcgcctacagcatggtgatccacgagaagattgagaactttgagcggctgctgcgggctgtgtatgccccccagaacatctactgtgtgcacgtggatgagaagagccctgagaccttcaaggaggccgtgaaggccatcatcagctgcttccccaacgtgttcatcgccagcaagctggtgcgggtggtgtatgcctcctggagccgggtgcaggccgacctgaactgcatggaggacctgctgcagagctctgtgccctggaagtacttcctgaacacctgtggcacagacttccccatcaagagcaatgctgagatggtgcaggccctgaagatgctgaatggaagaaattccatggagagcgaggtgccccccaagcacaaggagacccgctggaagtaccactttgaggtggtgcgggacaccctgcacctgaccaacaagaagaaggaccccccaccctacaacctgaccatgttcaccggaaatgcctacatcgtggccagccgggactttgtgcagcacgtgctgaagaaccccaagagccagcagctgattgagtgggtgaaggacacctacagcccagatgagcacctgtgggccaccctgcagagggcccgctggatgcctggctctgtgcccaaccaccccaagtatgacatcagtgacatgaccagcatcgcccggctggtgaagtggcagggccatgaaggagacatcgacaagggggccccctatgccccctgcagcggcatccaccagagggccatctgtgtgtatggagctggggacctgaactggatgctgcagaaccaccacctgctggccaacaagtttgaccccaaggtggatgacaatgccctgcagtgcctggaggagtacctgcgctacaaggccatctacggcacagagctgtag

SEQ ID NO: 149208 - DNA, 264 bp, Artificial Sequence
  derived and/or modified sequence
atggtgcagtggaagaggctgtgccagctgcactacctgtgggccctgggctgctacatgctgctggccaccgtggccctgaagctgtccttccggctgaagtgtgacagcgaccacctgggcctggagagccgggagagccagagccagtactgcaggaacatcctgtacaacttcctgaagctgcctgccaagaggagcatcaactgcagcggcgtgaccaggggggaccaggaggccgtgctgcaggccatcctgaactag

SEQ ID NO: 149209 - DNA, 462 bp, Artificial Sequence
  derived and/or modified sequence
atggtgcagtggaagaggctgtgccagctgcactacctgtgggccctgggctgctacatgctgctggccaccgtggccctgaagctgtccttccggctgaagtgtgacagcgaccacctgggcctggagagccgggagagccagagccagtactgcaggaacatcctgtacaacttcctgaagctgcctgccaagaggagcatcaactgcagcggcgtgaccaggggggaccaggaggccgtgctgcaggccatcctgaacaacctggaggtgaagaagaagcgggagcccttcacagacacccactacctgagcctgacccgggactgtgagcacttcaaggccgagaggaagttcatccagttccccctgagcaaggaggaggtggagttccccatcgcctacagcatggtgatccacgagaagattgagaactttgagcggctgctgcgggctgtgtag

SEQ ID NO: 149210 - DNA, 162 bp, Artificial Sequence
  derived and/or modified sequence
atggtgcagtggaagaggctgtgccagctgcactacctgtgggccctgggctgctacatgctgctggccaccgtggccctgaagctgtccttccggctgaagtgtgacagcgaccacctgggcctggagagccgggagagccagagccagtactgcaggtag

SEQ ID NO: 149211 - DNA, 1317 bp, Artificial Sequence
  derived and/or modified sequence
atggtgcagtggaagcggctgtgccagctgcactacctgtgggccttaggttgctatatgctcctggccactgtcgccctcaagctgtcattcagattaaagtgtgatagtgatcacctgggactcgagtctcgtgagtcccagtcgcaatactgtaggaacatcctgtataattttctgaagctacccgcaaaacgcagcataaattgttcgggtgtcaccaggggcgatcaagaggccgtcctccaggccattctgaacaacttggaggtcaagaagaagagggaaccgtttacggacacacactatttgtccctgacacgagactgtgagcactttaaggccgaacgcaaatttattcaattccctttgtcgaaggaagaagtggaattcccaatcgcttactccatggtcattcacgaaaaaatcgagaacttcgaacgcctgctccgcgctgtctacgccccgcagaacatttattgcgtgcacgtggatgagaaaagccctgagactttcaaggaggcagttaaagctattatttcgtgttttccaaacgtcttcatagcttccaagcttgtcagagtcgtctacgcctcctggtcaagggtgcaagcggacctcaactgtatggaggatctgctgcagagcagcgtgccctggaagtatttcttaaatacatgtggcacggactttcctataaagagcaacgccgaaatggtgcaagctctaaagatgctcaatggtaggaattcaatggaatccgaagtgccacctaaacataaggaaacacggtggaaataccactttgaggtggtgcgcgatacattacatcttacaaataaaaagaaagacccgcccccatacaacctcaccatgtttacgggtaatgcttacatcgtcgcaagtagggatttcgtgcagcacgtgcttaagaacccaaagtctcagcagctgattgagtgggttaaagatacctactcacccgacgaacacctttgggcaacgctgcagagagcacgatggatgcccggctcggtccccaatcaccccaagtacgacatctctgacatgacctccattgctcgactcgtaaagtggcagggccatgaaggggacatcgataaaggggccccttatgccccgtgttctggaatccaccaacgggccatctgtgtttatggcgctggggatctgaactggatgctgcagaatcatcacctccttgccaacaagttcgacccaaaggtcgacgataatgcccttcaatgcctggaggagtatcttcgatacaaggcaatctacggcactgaactctag

SEQ ID NO: 149212 - DNA, 264 bp, Artificial Sequence
  derived and/or modified sequence
atggtgcagtggaagcggctgtgccagctgcactacctgtgggccctaggctgctatatgctgctggcaaccgtcgccctgaaactgagtttcaggctcaaatgtgactccgatcacttaggcttggagagccgcgaaagtcagagccagtactgtaggaacatattatataatttcctaaagctgcctgccaagcgctccatcaactgcagtggggtcactcgtggagatcaggaagccgttctgcaggccattctcaactag

SEQ ID NO: 149213 - DNA, 462 bp, Artificial Sequence
  derived and/or modified sequence
atggtgcagtggaagcggctgtgccagctgcactacctgtgggccctggggtgttacatgctattagccaccgtggcacttaaacttagctttcgcctgaagtgtgactcagaccatctcggcctcgagtcaagggagtcacagtcacagtactgccgaaatatcttgtataactttctaaaactaccggccaagcgaagcatcaattgctcaggcgtgacacgcggagaccaggaggctgtactccaagcgatcctgaataatctcgaggttaagaagaagcgcgagccttttacagacactcactatctatccctcaccagggactgtgaacattttaaggccgaaagaaagttcatccaattccccttgtcaaaggaggaggttgagtttcccattgcttacagtatggtgatccatgagaagatcgaaaattttgaacgcctcctgagagccgtgtag

SEQ ID NO: 149214 - DNA, 162 bp, Artificial Sequence
  derived and/or modified sequence
atggtgcagtggaagcggctgtgccagctgcactacctgtgggccctgggatgctatatgctgctggccacggtggcattgaaactctctttcagactcaaatgcgactcggaccatctcggattagagtctagggagagtcagagccagtactgtaggtag

SEQ ID NO: 149215 - DNA, 1317 bp, Artificial Sequence
  derived and/or modified sequence
atggtgcagtggaagcggctgtgccagctgcactacctgtgggccctggggtgttatatgctccttgctacagtcgcactgaaattatctttccgccttaagtgtgactcggaccatctcgggttggagagcagggagtcccagtcacaatactgccgcaacatcctgtataatttcctgaagctcccggcaaaaagatccattaactgtagtggcgtgaccaggggcgaccaggaggctgttctgcaggcaatcctaaacaatttagaggtgaagaagaaaagagagcccttcactgatacacattatctgtctctcactcgagactgtgaacatttcaaggcagaaaggaaatttattcaattccccctgtccaaggaagaagtggagttccctatcgcttatagtatggtgatccatgaaaaaatcgaaaacttcgagcgcctgctgagagcagtgtatgcacctcagaatatttactgtgtgcacgtcgacgaaaagtcaccggagaccttcaaggaggccgtcaaagccatcatcagctgttttcccaatgtttttatcgcttctaagctcgtgagggtggtctacgcttcctggtctagggtccaagctgatctcaattgcatggaggatttattgcaatctagcgtgccatggaagtatttcctgaatacatgcggcacagactttccaattaagtcgaatgctgagatggtgcaggcactgaagatgctcaacgggcgcaactcgatggagagcgaggtacccccaaagcacaaagagactagatggaaatatcactttgaggtggttcgggatactttgcatctaacaaataaaaagaaggatcctccgccctacaacctgaccatgttcaccgggaatgcatatattgtggcctctcgggattttgtacagcatgtgctcaaaaatcctaagagccagcagctcattgagtgggtcaaggacacctattctccggatgaacacctatgggctacattacaacgcgcccgctggatgccaggcagtgtcccaaaccacccaaagtatgacatttctgatatgacaagtatcgcccgcctggtgaaatggcaaggtcacgaaggagatatagacaaaggagcgccatacgccccgtgcagtggcatacatcagagagccatttgcgtgtacggcgcaggcgatctgaattggatgttgcagaaccaccaccttctcgccaataaatttgaccccaaagtggatgacaacgccctccagtgtctcgaggagtatctgcgctacaaggcaatctatggtaccgagctctag

SEQ ID NO: 149216 - DNA, 1317 bp, Artificial Sequence
  derived and/or modified sequence
atggtccagtggaagcgcctatgtcaattgcactacctctgggccctcggatgctacatgctcctcgcaaccgtcgcgcttaagctgtcatttcgcctgaagtgtgattcggaccacctcgggctcgaaagccgggagtcccagagccagtattgtcgcaatatcttatataattttctcaagttgcctgccaagaggtccattaattgcagcggcgtaacacgaggggatcaggaagctgtccttcaagcgatcctgaataatctggaggtcaagaaaaagagggaaccattcaccgatacacactatctctctttgacacgagactgcgaacatttcaaagcagagagaaaattcattcagttccctttgtctaaggaggaggtagagttccctatcgcctattcaatggtgatccacgagaaaatcgagaattttgaaaggctactcagagccgtctacgcaccccagaacatctactgcgtccacgtagacgagaaatcaccagagacttttaaggaagccgtgaaagctatcatctcctgctttccaaatgtgtttatcgcaagtaagctcgtgcgcgtggtgtacgcaagttggagcagggtgcaggccgacctgaattgtatggaggacctgctccaaagcagcgtgccttggaagtacttcttgaacacctgtgggactgatttccctattaaaagtaacgcggagatggtgcaggccctcaaaatgctgaacggccgaaactccatggagtctgaggtgcccccaaagcataaggagacaaggtggaagtatcactttgaggtcgtgagggatacactgcacctgacaaataagaagaaagacccaccaccttacaatttgaccatgttcaccggcaatgcatacattgttgccagtagagacttcgtacagcacgtgctgaaaaacccaaagagtcagcagcttatagaatgggtgaaggatacctactcccccgatgaacacctttgggctaccctccagcgggctaggtggatgcccggatctgttccaaaccacccgaaatatgacatttccgatatgacgagtatcgctcgattagttaaatggcaggggcacgagggagatatcgacaaaggtgccccttacgctccgtgttccggcatccatcagagagcaatctgtgtctatggagcaggtgacttaaattggatgctccagaatcatcacctgctggcaaataagttcgaccccaaggtcgacgacaatgctttgcaatgtctggaagagtatttgcggtacaaagccatctacgggacagagttatag

SEQ ID NO: 149217 - DNA, 264 bp, Artificial Sequence
  derived and/or modified sequence
atggtgcagtggaaaagactctgtcagcttcactacctgtgggctctcggctgctatatgctactcgctactgtagcattaaagctgagttttcggctcaagtgcgattccgatcatttaggtcttgagtcacgcgagtctcagagccagtactgtagaaacatcctgtacaattttttaaagctccccgctaagaggtctattaactgctctggggtaacccgcggtgatcaggaagccgttcttcaggccatcctcaattag

SEQ ID NO: 149218 - DNA, 462 bp, Artificial Sequence
  derived and/or modified sequence
atggtgcagtggaagagactctgtcagttgcattacctatgggctttgggttgttatatgctgctggcaacggtggctttaaaacttagcttccgtctcaagtgcgattctgatcacctgggattagagagtcgggagtctcaatcgcagtactgtcggaatattctatacaactttctcaagctccctgcaaagcgtagtattaactgctccggggttacaaggggagatcaggaggcagtccttcaggccatactgaataacctggaggtgaaaaagaagcgggagccatttactgatacacattatctcagcttaacacgagactgtgagcattttaaggcagagcggaagttcatccagttccctctttccaaggaggaggtggaatttcctatcgcatattcaatggtcatccatgaaaagattgaaaacttcgagcgcttactgagagccgtttag

SEQ ID NO: 149219 - DNA, 162 bp, Artificial Sequence
  derived and/or modified sequence
atggtgcagtggaagaggctgtgccaactccactatctgtgggcccttggatgttatatgctcctcgcaaccgtggccctgaagctgagttttcgcctaaaatgcgactccgatcatttaggccttgagagtagggagtcccagtcacagtactgccgttag

SEQ ID NO: 149220 - DNA, 1317 bp, Artificial Sequence
  derived and/or modified sequence
atggttcaatggaagcggttgtgccagcttcattacctctgggctctgggctgctatatgctcctcgccaccgtggcgttgaaactgagctttagactgaagtgtgacagtgaccacctcggcctggaaagcagggagagccaaagccagtattgtaggaatatattatacaattttctgaagttacccgcaaagaggagcattaactgttctggcgtcacccggggtgaccaggaagcagttctccaggcgatcctgaacaatcttgaggtgaaaaaaaagcgcgaacccttcacagatactcactacttgagcctgacacgcgactgcgaacatttcaaggctgaaaggaagtttatacaattcccgctcagtaaagaggaggtggagtttcctatcgcctactctatggtaatccatgagaagatcgagaattttgagagattgctgcgcgcagtctatgccccacagaatatatactgtgtgcatgtcgatgagaagtcccctgagactttcaaagaagcagtaaaggctatcatctcatgctttccaaacgtcttcatcgctagcaaactggttcgcgtggtctatgcatcttggtcccgggttcaagcagatctaaattgtatggaagatctgctgcagagttctgtgccctggaagtattttctgaacacatgcgggaccgatttccccataaagtcaaacgccgaaatggttcaggccttgaagatgttgaatggcaggaattccatggagtcagaagtgccgcctaagcataaggaaacacggtggaagtatcacttcgaagtcgtccgcgatactttgcatctcactaacaagaagaaggacccacccccttacaacctgacaatgtttaccgggaatgcctatattgtggccagtagagacttcgttcaacatgtcctcaagaatccaaaatctcagcagctgattgaatgggtcaaagacacgtactctccggacgaacacctatgggccacactgcagcgtgcacggtggatgccgggttctgttcctaaccacccaaagtacgatatctctgatatgacctctatagcaagactcgtaaagtggcaaggacacgaaggcgacatagataagggagctccatatgcaccttgtagcggcatccaccagcgagctatttgtgtttatggagcgggagatctaaactggatgctgcaaaatcatcacctgctagctaataagtttgatccaaaggtcgacgataatgccctccagtgtctagaggagtatctaaggtacaaggccatttatggaaccgagctatag

SEQ ID NO: 149221 - DNA, 1317 bp, Artificial Sequence
  derived and/or modified sequence
atggtgcagtggaagagactgtgccagctgcactacctgtgggccctgggctgctacatgctgctggccaccgtggccctgaagctgagcttcagactgaagtgcgacagcgaccacctgggcctggagagcagagagagccagagccagtactgcagaaacatcctgtacaacttcctgaagctgcccgccaagagaagcatcaactgcagcggcgtgaccagaggcgaccaggaggccgtgctgcaggccatcctgaacaacctggaggtgaagaagaagagagagcccttcaccgacacccactacctgagcctgaccagagactgcgagcacttcaaggccgagagaaagttcatccagttccccctgagcaaggaggaggtggagttccccatcgcctacagcatggtgatccacgagaagatcgagaacttcgagagactgctgagagccgtgtacgccccccagaacatctactgcgtgcacgtggacgagaagagccccgagaccttcaaggaggccgtgaaggccatcatcagctgcttccccaacgtgttcatcgccagcaagctggtgagagtggtgtacgccagctggagcagagtgcaggccgacctgaactgcatggaggacctgctgcagagcagcgtgccctggaagtacttcctgaacacctgcggcaccgacttccccatcaagagcaacgccgagatggtgcaggccctgaagatgctgaacggcagaaacagcatggagagcgaggtgccccccaagcacaaggagaccagatggaagtaccacttcgaggtggtgagagacaccctgcacctgaccaacaagaagaaggacccccccccctacaacctgaccatgttcaccggcaacgcctacatcgtggccagcagagacttcgtgcagcacgtgctgaagaaccccaagagccagcagctgatcgagtgggtgaaggacacctacagccccgacgagcacctgtgggccaccctgcagagagccagatggatgcccggcagcgtgcccaaccaccccaagtacgacatcagcgacatgaccagcatcgccagactggtgaagtggcagggccacgagggcgacatcgacaagggcgccccctacgccccctgcagcggcatccaccagagagccatctgcgtgtacggcgccggcgacctgaactggatgctgcagaaccaccacctgctggccaacaagttcgaccccaaggtggacgacaacgccctgcagtgcctggaggagtacctgagatacaaggccatctacggcaccgagctgtag

SEQ ID NO: 149222 - DNA, 264 bp, Artificial Sequence
  derived and/or modified sequence
atggtgcagtggaagagactgtgccagctgcactacctgtgggccctgggctgctacatgctgctggccaccgtggccctgaagctgagcttcagactgaagtgcgacagcgaccacctgggcctggagagcagagagagccagagccagtactgcagaaacatcctgtacaacttcctgaagctgcccgccaagagaagcatcaactgcagcggcgtgaccagaggcgaccaggaggccgtgctgcaggccatcctgaactag

SEQ ID NO: 149223 - DNA, 462 bp, Artificial Sequence
  derived and/or modified sequence
atggtgcagtggaagagactgtgccagctgcactacctgtgggccctgggctgctacatgctgctggccaccgtggccctgaagctgagcttcagactgaagtgcgacagcgaccacctgggcctggagagcagagagagccagagccagtactgcagaaacatcctgtacaacttcctgaagctgcccgccaagagaagcatcaactgcagcggcgtgaccagaggcgaccaggaggccgtgctgcaggccatcctgaacaacctggaggtgaagaagaagagagagcccttcaccgacacccactacctgagcctgaccagagactgcgagcacttcaaggccgagagaaagttcatccagttccccctgagcaaggaggaggtggagttccccatcgcctacagcatggtgatccacgagaagatcgagaacttcgagagactgctgagagccgtgtag

SEQ ID NO: 149224 - DNA, 162 bp, Artificial Sequence
  derived and/or modified sequence
atggtgcagtggaagagactgtgccagctgcactacctgtgggccctgggctgctacatgctgctggccaccgtggccctgaagctgagcttcagactgaagtgcgacagcgaccacctgggcctggagagcagagagagccagagccagtactgcagatag

SEQ ID NO: 149225 - protein, 802 aa, Artificial Sequence
  derived and/or modified sequence
MEEEGGSSGGAAGTSADGGDGGEQLLTVKHELRTANLTGHAEKVGIENFELLKVLGTGAYGKVFLVRKISGHDTGKLYAMKVLKKATIVQKAKTTEHTRTERQVLEHIRQSPFLVTLHYAFQTETKLHLILDYINGGELFTHLSQRERFTEHEVQIYVGEIVLALEHLHKLGIIYRDIKLENILLDSNGHVVLTDFGLSKEFVADETERAYSFCGTIEYMAPDIVRGGDSGHDKAVDWWSLGVLMYELLTGASPFTVDGEKNSQAEISRRILKSEPPYPQEMSALAKDLIQRLLMKDPKKRLGCGPRDADEIKEHLFFQKINWDDLAAKKVPAPFKPVIRDELDVSNFAEEFTEMDPTYSPAALPQSSEKLFQGYSFVAPSILFKRNAAVIDPLQFHMGVERPGVTNVARSAMMKDSPFYQHYDLDLKDKPLGEGSFSICRKCVHKKSNQAFAVKIISKRMEANTQKEITALKLCEGHPNIVKLHEVFHDQLHTFLVMELLNGGELFERIKKKKHFSETEASYIMRKLVSAVSHMHDVGVVHRDLKPENLLFTDENDNLEIKIIDFGFARLKPPDNQPLKTPCFTLHYAAPELLNQNGYDESCDLWSLGVILYTMLSGQVPFQSHDRSLTCTSAVEIMKKIKKGDFSFEGEAWKNVSQEAKDLIQGLLTVDPNKRLKMSGLRYNEWLQDGSQLSSNPLMTPDILGSSGAAVHTCVKATFHAFNKYKREGFCLQNVDKAPLAKRRKMKKTSTSTETRSSSSESSHSSSSHSHGKTTPTKTLQPSNPADSNNPETLFQFSDSVA

SEQ ID NO: 149226 - protein, 723 aa, Artificial Sequence
  derived and/or modified sequence
MKVLKKATIVQKAKTTEHTRTERQVLEHIRQSPFLVTLHYAFQTETKLHLILDYINGGELFTHLSQRERFTEHEVQIYVGEIVLALEHLHKLGIIYRDIKLENILLDSNGHVVLTDFGLSKEFVADETERAYSFCGTIEYMAPDIVRGGDSGHDKAVDWWSLGVLMYELLTGASPFTVDGEKNSQAEISRRILKSEPPYPQEMSALAKDLIQRLLMKDPKKRLGCGPRDADEIKEHLFFQKINWDDLAAKKVPAPFKPVIRDELDVSNFAEEFTEMDPTYSPAALPQSSEKLFQGYSFVAPSILFKRNAAVIDPLQFHMGVERPGVTNVARSAMMKDSPFYQHYDLDLKDKPLGEGSFSICRKCVHKKSNQAFAVKIISKRMEANTQKEITALKLCEGHPNIVKLHEVFHDQLHTFLVMELLNGGELFERIKKKKHFSETEASYIMRKLVSAVSHMHDVGVVHRDLKPENLLFTDENDNLEIKIIDFGFARLKPPDNQPLKTPCFTLHYAAPELLNQNGYDESCDLWSLGVILYTMLSGQVPFQSHDRSLTCTSAVEIMKKIKKGDFSFEGEAWKNVSQEAKDLIQGLLTVDPNKRLKMSGLRYNEWLQDGSQLSSNPLMTPDILGSSGAAVHTCVKATFHAFNKYKREGFCLQNVDKAPLAKRRKMKKTSTSTETRSSSSESSHSSSSHSHGKTTPTKTLQPSNPADSNNPETLFQFSDSVA

SEQ ID NO: 149227 - DNA, 2409 bp, Artificial Sequence
  derived and/or modified sequence
atggaggaggagggcggcagcagcggcggcgccgccggcaccagcgccgacggcggcgacggcggcgagcagctgctgaccgtgaagcacgagctgagaaccgccaacctgaccggccacgccgagaaggtgggcatcgagaacttcgagctgctgaaggtgctgggcaccggcgcctacggcaaggtgttcctggtgagaaagatcagcggccacgacaccggcaagctgtacgccatgaaggtgctgaagaaggccaccatcgtgcagaaggccaagaccaccgagcacaccagaaccgagagacaggtgctggagcacatcagacagagccccttcctggtgaccctgcactacgccttccagaccgagaccaagctgcacctgatcctggactacatcaacggcggcgagctgttcacccacctgagccagagagagagattcaccgagcacgaggtgcagatctacgtgggcgagatcgtgctggccctggagcacctgcacaagctgggcatcatctacagagacatcaagctggagaacatcctgctggacagcaacggccacgtggtgctgaccgacttcggcctgagcaaggagttcgtggccgacgagaccgagagagcctacagcttctgcggcaccatcgagtacatggcccccgacatcgtgagaggcggcgacagcggccacgacaaggccgtggactggtggagcctgggcgtgctgatgtacgagctgctgaccggcgccagccccttcaccgtggacggcgagaagaacagccaggccgagatcagcagaagaatcctgaagagcgagcccccctacccccaggagatgagcgccctggccaaggacctgatccagagactgctgatgaaggaccccaagaagagactgggctgcggccccagagacgccgacgagatcaaggagcacctgttcttccagaagatcaactgggacgacctggccgccaagaaggtgcccgcccccttcaagcccgtgatcagagacgagctggacgtgagcaacttcgccgaggagttcaccgagatggaccccacctacagccccgccgccctgccccagagcagcgagaagctgttccagggctacagcttcgtggcccccagcatcctgttcaagagaaacgccgccgtgatcgaccccctgcagttccacatgggcgtggagagacccggcgtgaccaacgtggccagaagcgccatgatgaaggacagccccttctaccagcactacgacctggacctgaaggacaagcccctgggcgagggcagcttcagcatctgcagaaagtgcgtgcacaagaagagcaaccaggccttcgccgtgaagatcatcagcaagagaatggaggccaacacccagaaggagatcaccgccctgaagctgtgcgagggccaccccaacatcgtgaagctgcacgaggtgttccacgaccagctgcacaccttcctggtgatggagctgctgaacggcggcgagctgttcgagagaatcaagaagaagaagcacttcagcgagaccgaggccagctacatcatgagaaagctggtgagcgccgtgagccacatgcacgacgtgggcgtggtgcacagagacctgaagcccgagaacctgctgttcaccgacgagaacgacaacctggagatcaagatcatcgacttcggcttcgccagactgaagccccccgacaaccagcccctgaagaccccctgcttcaccctgcactacgccgcccccgagctgctgaaccagaacggctacgacgagagctgcgacctgtggagcctgggcgtgatcctgtacaccatgctgagcggccaggtgcccttccagagccacgacagaagcctgacctgcaccagcgccgtggagatcatgaagaagatcaagaagggcgacttcagcttcgagggcgaggcctggaagaacgtgagccaggaggccaaggacctgatccagggcctgctgaccgtggaccccaacaagagactgaagatgagcggcctgagatacaacgagtggctgcaggacggcagccagctgagcagcaaccccctgatgacccccgacatcctgggcagcagcggcgccgccgtgcacacctgcgtgaaggccaccttccacgccttcaacaagtacaagagagagggcttctgcctgcagaacgtggacaaggcccccctggccaagagaagaaagatgaagaagaccagcaccagcaccgagaccagaagcagcagcagcgagagcagccacagcagcagcagccacagccacggcaagaccacccccaccaagaccctgcagcccagcaaccccgccgacagcaacaaccccgagaccctgttccagttcagcgacagcgtggcctag

SEQ ID NO: 149228 - DNA, 2172 bp, Artificial Sequence
  derived and/or modified sequence
atgaaggtgctgaagaaggccaccatcgtgcagaaggccaagaccaccgagcacaccagaaccgagagacaggtgctggagcacatcagacagagccccttcctggtgaccctgcactacgccttccagaccgagaccaagctgcacctgatcctggactacatcaacggcggcgagctgttcacccacctgagccagagagagagattcaccgagcacgaggtgcagatctacgtgggcgagatcgtgctggccctggagcacctgcacaagctgggcatcatctacagagacatcaagctggagaacatcctgctggacagcaacggccacgtggtgctgaccgacttcggcctgagcaaggagttcgtggccgacgagaccgagagagcctacagcttctgcggcaccatcgagtacatggcccccgacatcgtgagaggcggcgacagcggccacgacaaggccgtggactggtggagcctgggcgtgctgatgtacgagctgctgaccggcgccagccccttcaccgtggacggcgagaagaacagccaggccgagatcagcagaagaatcctgaagagcgagcccccctacccccaggagatgagcgccctggccaaggacctgatccagagactgctgatgaaggaccccaagaagagactgggctgcggccccagagacgccgacgagatcaaggagcacctgttcttccagaagatcaactgggacgacctggccgccaagaaggtgcccgcccccttcaagcccgtgatcagagacgagctggacgtgagcaacttcgccgaggagttcaccgagatggaccccacctacagccccgccgccctgccccagagcagcgagaagctgttccagggctacagcttcgtggcccccagcatcctgttcaagagaaacgccgccgtgatcgaccccctgcagttccacatgggcgtggagagacccggcgtgaccaacgtggccagaagcgccatgatgaaggacagccccttctaccagcactacgacctggacctgaaggacaagcccctgggcgagggcagcttcagcatctgcagaaagtgcgtgcacaagaagagcaaccaggccttcgccgtgaagatcatcagcaagagaatggaggccaacacccagaaggagatcaccgccctgaagctgtgcgagggccaccccaacatcgtgaagctgcacgaggtgttccacgaccagctgcacaccttcctggtgatggagctgctgaacggcggcgagctgttcgagagaatcaagaagaagaagcacttcagcgagaccgaggccagctacatcatgagaaagctggtgagcgccgtgagccacatgcacgacgtgggcgtggtgcacagagacctgaagcccgagaacctgctgttcaccgacgagaacgacaacctggagatcaagatcatcgacttcggcttcgccagactgaagccccccgacaaccagcccctgaagaccccctgcttcaccctgcactacgccgcccccgagctgctgaaccagaacggctacgacgagagctgcgacctgtggagcctgggcgtgatcctgtacaccatgctgagcggccaggtgcccttccagagccacgacagaagcctgacctgcaccagcgccgtggagatcatgaagaagatcaagaagggcgacttcagcttcgagggcgaggcctggaagaacgtgagccaggaggccaaggacctgatccagggcctgctgaccgtggaccccaacaagagactgaagatgagcggcctgagatacaacgagtggctgcaggacggcagccagctgagcagcaaccccctgatgacccccgacatcctgggcagcagcggcgccgccgtgcacacctgcgtgaaggccaccttccacgccttcaacaagtacaagagagagggcttctgcctgcagaacgtggacaaggcccccctggccaagagaagaaagatgaagaagaccagcaccagcaccgagaccagaagcagcagcagcgagagcagccacagcagcagcagccacagccacggcaagaccacccccaccaagaccctgcagcccagcaaccccgccgacagcaacaaccccgagaccctgttccagttcagcgacagcgtggcctag

SEQ ID NO: 149229 - DNA, 2409 bp, Artificial Sequence
  derived and/or modified sequence
atggaggaggagggtgggagcagcggaggagccgccggtaccagcgctgatggcggagacgggggtgagcaacttctgacagtcaagcacgagctccgcacagctaaccttaccggtcacgcagaaaaagtcggaatcgaaaacttcgagctgctgaaagtgcttgggactggggcatatggcaaagtattcctcgtgagaaagatttccggccacgatacgggcaaactctatgccatgaaggtcctgaaaaaggcaacgatagtgcagaaagctaaaacaaccgaacatacgcgtactgagagacaggttttggagcacatcaggcaaagcccgtttctcgtgactctccattatgcgttccaaacggagacaaagctacacttgatcttggattacatcaatgggggggaactgtttacccacctgtctcagagagagcgatttactgagcatgaggtgcaaatttatgtgggggagattgtcctcgcactggaacacctccacaaattgggaattatttaccgagatattaagctggaaaatattcttctggactcgaatgggcacgtcgttctgactgacttcggcctttccaaagagtttgttgccgatgagacggagcgcgcttactctttttgtggcaccattgaatacatggcgcccgatattgtgagaggtggcgattctggacatgacaaagctgtggactggtggtccctaggagtcctcatgtatgaactgctcaccggcgcatccccgttcactgtggacggcgagaaaaactcacaggcggagatttcaaggcggattctgaagtccgagcctccatacccgcaggagatgtctgctctggccaaggacctgattcagcggctgctgatgaaggaccccaagaagcgcctggggtgtgggcctagagacgccgatgagatcaaagaacatctgttcttccaaaaaataaactgggatgacctagcagctaagaaagtgcccgctccctttaagccagtgatccgagatgagttggatgtgagcaatttcgccgaggaattcaccgagatggacccgacatatagccccgccgccctgcctcagtcctctgagaaacttttccaaggctatagctttgtcgcgccttctattttgtttaaaaggaacgcggccgtcatcgaccctctccagttccatatgggtgtggagcggcctggcgttactaacgtggctagatccgcaatgatgaaggacagccctttttaccagcactacgacctcgacctcaaggataagccgctaggtgaggggtctttcagcatttgtaggaagtgtgtgcataagaagtccaaccaggccttcgcagttaagatcatttccaaaaggatggaagccaatactcagaaagaaataactgcccttaagctgtgcgagggccatcctaacattgtgaagctccatgaagtattccacgaccagcttcataccttcctggtcatggagctcctgaacggcggcgagctgtttgagagaatcaagaagaagaaacattttagcgagactgaggccagctatatcatgaggaaattagtttccgcagtctcccatatgcacgatgtcggtgtcgtgcaccgcgatctcaaacctgagaatcttctgttcacagatgaaaacgataaccttgagataaagattatagactttggatttgccagattgaagccccccgacaatcagcccttgaagaccccatgttttactcttcactatgctgctccagaactgctgaatcagaacggctacgacgagtcctgcgacctgtggagtcttggggtgatcctgtacacaatgctttccgggcaggtcccgttccagtcccacgaccgctcgctgacctgcacctccgccgtggaaatcatgaaaaaaatcaaaaaaggagatttttcgttcgagggtgaagcctggaaaaacgtttcccaagaagccaaggacctgatacaggggctgctaacagtggacccaaacaaaaggttgaaaatgtctgggctgaggtacaacgagtggctgcaagatggctctcagctttcatcaaatcctcttatgacaccagatatcctcggtagcagcggagccgctgttcatacttgcgtgaaggccaccttccatgcgttcaacaagtacaaacgagagggtttttgtctgcagaacgtggataaagctcccctggcaaagcggcgtaagatgaaaaagaccagcacatctacggagaccagatcgtcttctagcgaaagcagccacagcagcagcagccacagtcacggcaaaaccactcccacgaaaaccttgcagcctagtaatccagcggatagtaataatccagagaccctttttcaattcagcgattccgtggcgtag

SEQ ID NO: 149230 - DNA, 2172 bp, Artificial Sequence
  derived and/or modified sequence
atgaaggtcctcaaaaaagcaaccattgtacaaaaagccaagacaactgagcatacccgcacagaaagacaggtcttagagcacatacgacagagcccgttcttggtgaccttgcattatgcttttcagacggagaccaaactccacctgatcttagactacataaatggaggcgaactgttcacacatctgtcacaacgagagaggttcactgagcacgaggtccagatatacgtgggtgaaatagtcttggccctcgaacatctgcacaagctcggcatcatttatcgtgacattaaactggaaaacatacttttagacagcaatggacacgtggtactaaccgacttcggactgagtaaggaatttgtagccgacgagaccgagcgtgcttattctttctgtggcactattgagtatatggcccctgatatcgttcggggcggggactctgggcacgacaaagcagtggattggtggagcctcggcgtcctaatgtacgagctcctcacgggggccagtccattcaccgtagatggggaaaagaactctcaggctgaaatctcacggaggatcctgaagagcgagcccccctatcctcaggaaatgtctgcgctggccaaagatctgattcaacgtctcctaatgaaggacccaaaaaagagactcggatgtggccctagagatgcagatgagatcaaggagcatctgttctttcagaaaatcaactgggacgatttggccgcaaaaaaagtgccagctccgttcaaaccagtaattagagacgagctggatgtttcaaatttcgcggaggaattcacagagatggatccaacatatagcccggccgcattgccgcagagcagtgagaagctttttcagggatatagtttcgtggctcccagtattcttttcaagcgtaacgcagccgtaattgatccactgcaatttcatatgggagtggagaggcccggtgtcactaacgttgcacgctcagcgatgatgaaagatagtcctttttatcagcactatgatctggatctcaaagataagcctcttggtgaaggatccttcagcatctgccggaagtgtgtgcacaagaagagcaatcaggccttcgccgtcaagatcatcagcaagagaatggaagctaacacgcagaaagaaattactgccctgaagctttgtgagggacatcccaatatagtcaagttgcatgaggtgtttcacgaccagctacacacgtttctggtgatggaactgctcaacggaggggagctcttcgagcggataaagaagaaaaaacatttttctgagacagaagcctcttacatcatgcgcaaactagtctccgcggtgtctcacatgcacgacgtgggcgtcgtacaccgggaccttaagccagaaaacttgctttttacagacgaaaacgacaaccttgagataaaaataatcgatttcggcttcgcccgtcttaagccccccgacaaccagcccctgaaaacgccttgcttcacactacattacgcagcgccagaactcttaaatcaaaacggatatgatgagtcttgcgatctgtggagtctcggggtaattttgtacactatgctttcaggacaggtgccctttcagagtcatgatcgaagcctcacatgcactagcgccgtcgagattatgaagaaaataaagaaaggcgattttagctttgagggcgaggcctggaagaatgtgtctcaagaggccaaggatctaatacagggtctgctgacagtcgaccccaacaaaaggctaaaaatgtcaggactcaggtacaacgagtggctgcaggatggcagtcagctgagcagtaaccctctcatgacccccgacatcctggggagcagtggtgctgccgtccacacctgtgtgaaagcgacttttcatgcttttaacaagtacaaacgggagggattctgcctccagaacgtagataaggctcctctggctaagaggagaaagatgaaaaaaacctcaacttccacagagaccaggtcctccagctcggagagcagtcatagtagctcttcccatagccacggaaagaccacgcccactaaaactctccagccctctaacccagccgacagcaacaaccccgaaacactctttcagttttccgactcggtggcctag

SEQ ID NO: 149231 - DNA, 2409 bp, Artificial Sequence
  derived and/or modified sequence
atggaggaggagggcggcagcagcggcggggccgccggcaccagcgcagatggaggagatggaggagagcagctgctgactgtgaagcatgagctgaggacagccaacctgaccggccatgctgagaaggtgggcattgaaaattttgagctgctgaaggtgctgggcactggagcctacggcaaggtgttcctggtgaggaagatcagcggccatgacaccgggaagctgtatgccatgaaggtgctgaagaaggccaccatcgtgcagaaggccaagaccacagagcacaccaggacagagcggcaggtgctggagcacatccggcagagccccttcctggtgaccctgcactacgccttccagacagagaccaagctgcacctgatcctggactacatcaatggaggagagctgttcacccacctgagccagcgggagcgcttcacagagcacgaggtgcagatctacgtgggggagatcgtgctggccctggagcacctgcacaagctgggcatcatctacagagacatcaagctggagaacatcctgctggacagcaatggccacgtggtgctgacagactttggcctgagcaaggagtttgtggctgatgaaacagagcgggcctacagcttctgtggcaccatcgagtacatggccccagacatcgtgcggggcggggacagcggccatgacaaggctgtggactggtggagcctgggcgtgctgatgtatgagctgctgaccggggccagccccttcaccgtggatggagagaagaacagccaggccgagatcagccgccgcatcctgaagtctgagcccccctacccccaggagatgtctgccctggccaaggacctgatccagaggctgctgatgaaggaccccaagaagaggctgggctgcggccccagagatgctgatgagatcaaggagcacctgttcttccagaagatcaactgggatgacctggccgccaagaaggtgcctgcccccttcaagcctgtgatcagagatgagctggatgtgagcaactttgctgaggagttcacagagatggaccccacctacagccctgctgccctgccccagagcagcgagaagctgttccagggctacagctttgtggcccccagcatcctcttcaagagaaatgctgctgtgattgaccccctgcagttccacatgggcgtggagaggcctggggtgaccaacgtggcccggagcgccatgatgaaggacagccccttctaccagcactatgacctggacctgaaggacaagcccctgggggagggcagcttcagcatctgcaggaaatgtgtgcacaagaagagcaaccaggcctttgctgtgaagatcatcagcaagaggatggaggccaacacccagaaggagatcacagccctgaagctgtgtgagggccaccccaacatcgtgaagctgcacgaggtgttccatgaccagctgcacaccttcctggtgatggagctgctgaatggaggagagctgtttgagcgcatcaagaagaagaagcacttcagcgagacagaggccagctacatcatgaggaagctggtgtctgctgtgagccacatgcatgatgtgggcgtggtgcaccgggacctgaagccagagaacctgctcttcacagatgaaaatgacaacctggagatcaagatcatcgactttggatttgcccggctgaagcccccagacaaccagcccctgaagaccccctgcttcaccctgcactatgctgcccctgagctgctgaaccagaatggctatgatgagagctgtgacctgtggagcctgggcgtcatcctgtacaccatgctgagcggccaggtgcccttccagagccatgacaggagcctgacctgcaccagcgctgtggagatcatgaagaagatcaagaagggggacttctcctttgaaggagaggcctggaagaatgtgtcccaggaggccaaggacctgatccagggcctgctgactgtggaccccaacaagaggctgaagatgagcggcctgcgctacaatgagtggctgcaggacggcagccagctgagcagcaaccccctgatgaccccagacatcctgggcagcagtggagctgctgtgcacacctgtgtgaaggccaccttccacgccttcaacaagtacaagcgggagggcttctgcctgcagaatgtggacaaggcccccctggccaagaggaggaagatgaagaagaccagcaccagcacagagaccaggagcagcagcagcgagagcagccacagcagcagcagccacagccacggcaagaccacccccaccaagaccctgcagcccagcaacccagctgacagcaacaaccctgagaccctcttccagttcagtgacagcgtggcctag

SEQ ID NO: 149232 - DNA, 2172 bp, Artificial Sequence
  derived and/or modified sequence
atgaaggtgctgaagaaggccaccatcgtgcagaaggccaagaccacagagcacaccaggacagagcggcaggtgctggagcacatccggcagagccccttcctggtgaccctgcactacgccttccagacagagaccaagctgcacctgatcctggactacatcaatggaggagagctgttcacccacctgagccagcgggagcgcttcacagaacatgaggtgcagatctacgtgggggagatcgtgctggccctggagcacctgcacaagctgggcatcatctacagagacatcaagctggagaacatcctgctggacagcaatggacatgtggtgctgacagactttggcctgagcaaggagtttgtggctgatgaaacagagcgggcctacagcttctgtggcaccatcgagtacatggccccagacatcgtgcggggcggggacagcggccatgacaaggctgtggactggtggagcctgggcgtgctgatgtatgagctgctgactggagccagccccttcaccgtggatggagagaagaacagccaggccgagatcagccgccgcatcctgaagtctgagcccccctacccccaggagatgtctgccctggccaaggacctgatccagaggctgctgatgaaggaccccaagaagaggctgggctgcggccccagagatgctgatgagatcaaggagcacctgttcttccagaagatcaactgggatgacctggccgccaagaaggtgcctgcccccttcaagcctgtgatcagagatgagctggatgtgagcaactttgctgaggagttcacagagatggaccccacctacagccctgctgccctgccccagagcagcgagaagctgttccagggctacagctttgtggcccccagcatcctcttcaagagaaatgctgctgtgattgaccccctgcagttccacatgggcgtggagaggcctggggtgaccaacgtggcccggagcgccatgatgaaggacagccccttctaccagcactatgacctggacctgaaggacaagcccctgggggagggcagcttcagcatctgcaggaaatgtgtgcacaagaagagcaaccaggcctttgctgtgaagatcatcagcaagaggatggaggccaacacccagaaggagatcacagccctgaagctgtgtgagggccaccccaacatcgtgaagctgcacgaggtgttccatgaccagctgcacaccttcctggtgatggagctgctgaatggaggagagctgtttgagcgcatcaagaagaagaagcacttcagcgagacagaggccagctacatcatgaggaagctggtgtctgctgtgagccacatgcatgatgtgggcgtggtgcaccgggacctgaagccagagaacctgctcttcacagatgaaaatgacaacctggagatcaagatcatcgactttggatttgcccggctgaagcccccagacaaccagcccctgaagaccccctgcttcaccctgcactacgccgcccctgagctgctgaaccagaatggctatgatgagagctgtgacctgtggagcctgggcgtcatcctgtacaccatgctgagcggccaggtgcccttccagagccatgacaggagcctgacctgcaccagcgctgtggagatcatgaagaagatcaagaagggggacttctcctttgaaggagaggcctggaagaatgtgtcccaggaggccaaggacctgatccagggcctgctgactgtggaccccaacaagaggctgaagatgagcggcctgcgctacaatgagtggctgcaggacggcagccagctgagcagcaaccccctgatgaccccagacatcctgggcagcagcggggctgctgtgcacacctgtgtgaaggccaccttccacgccttcaacaagtacaagcgggagggcttctgcctgcagaatgtggacaaggcccccctggccaagaggaggaagatgaagaagaccagcaccagcacagagaccaggagcagcagcagcgagagcagccacagcagcagcagccacagccacggcaagaccacccccaccaagaccctgcagcccagcaacccagctgacagcaacaaccctgagaccctcttccagttcagtgacagcgtggcctag

SEQ ID NO: 149233 - DNA, 2409 bp, Artificial Sequence
  derived and/or modified sequence
atggaggaggagggcggcagcagcggcggcgccgccggcaccagcgctgacggcggagatgggggggaacagctcttgacagtgaaacacgagctgaggactgctaatctgaccggacatgcagagaaggtgggcattgagaacttcgaattgctcaaggtccttggtactggcgcgtacggcaaggtgttcttggtgcggaagatctcaggacatgacacaggaaaattgtacgctatgaaagtgcttaaaaaggccaccattgttcaaaaggccaaaaccactgagcacacacggacagagcgacaggtgctggagcatattcgccaatccccttttttggtgaccctacactacgctttccagaccgaaacgaagctgcacctgatccttgattacatcaacggaggcgagctgtttacacatctcagccaacgggagcgcttcacggagcatgaggttcagatctatgtcggagaaatagtactggccctagaacacctgcacaagcttggcattatttatcgcgatatcaaactagaaaacattctcttggatagtaacgggcatgtagtgttaacagatttcggtctcagcaaagagtttgtcgccgacgaaactgaacgcgcatactcgttctgtggcacgatcgagtacatggctcctgacatagtcagaggtggcgattctggacacgataaggccgtggactggtggtccctcggcgtgctgatgtatgagcttctgactggcgctagcccattcacggtcgacggagagaagaactcccaagccgagatcagtcgccgtattctgaagtctgagccaccctatccccaggaaatgtctgcactcgctaaggacctcattcaacgcctgttaatgaaggatccaaaaaaacggctgggttgcggccctcgggatgccgatgaaataaaagaacacctgtttttccagaagattaattgggacgacttggccgccaaaaaagtgccagccccctttaagcccgtcatcagggacgagctcgatgtgtctaacttcgccgaggagttcactgaaatggatccaacatattcaccggcagctttgccacagagctcagaaaagttgtttcagggctacagtttcgtcgctcccagtatccttttcaagcggaacgcggcggtgatagaccctcttcagtttcatatgggcgtggagaggcctggcgtgaccaatgtcgcaagaagcgctatgatgaaagactcgcctttctatcaacattacgacctagatcttaaggacaaacctctgggggagggctcgttttccatttgccgtaagtgcgtgcataagaaatcaaaccaggccttcgctgttaagattatctccaaacggatggaggcaaatacgcaaaaagagattacagcgctcaagctgtgcgaggggcaccccaatatcgtaaagctgcatgaggtattccatgaccaattgcatactttcttggttatggagctgctcaacggcggggagctctttgaaagaattaagaagaaaaagcatttcagcgagaccgaagcctcatacatcatgagaaagctggtgagcgcagtgtctcatatgcatgatgtcggagtcgtccatcgcgatttaaagccggagaatctcttgttcacagacgaaaatgataatctcgagatcaagatcatagacttcggcttcgcaagacttaaaccacctgataatcagccactcaaaactccatgcttcaccctgcactacgctgcacctgagctcctgaatcagaacggctacgacgaatcatgcgatctttggtctcttggagtgatactttacactatgctgtctgggcaagtacctttccaaagccatgatcgtagtttgacttgtacaagcgccgttgaaattatgaagaaaatcaagaaaggcgacttttcattcgagggcgaggcctggaaaaatgtctcacaggaagccaaagacttaattcagggtttgctgacagtcgacccaaataagagactaaaaatgagtggcctgcgatataatgaatggcttcaagacgggagccagttatcctccaatcctctgatgacgcctgatattctcggaagctctggagcggctgtacatacttgtgtgaaagcaaccttccatgcgtttaacaagtacaagcgcgaaggtttttgcctgcaaaatgtggacaaagcccccttggcaaaacggcgcaagatgaaaaagacatccacttcgacagagacacgttcctctagctctgaatcaagtcacagctcctcttctcactcccatgggaaaaccacacccaccaaaacccttcagccgagtaaccctgctgacagcaataaccctgagaccctgtttcagttctccgacagtgtagcctag

SEQ ID NO: 149234 - DNA, 2172 bp, Artificial Sequence
  derived and/or modified sequence
atgaaggtgctgaagaaggccaccatcgtgcagaaggccaagaccacagaacacactcgaactgaacggcaggttttggagcatatcagacagtctcccttcctggttacgctccactacgctttccaaacagaaaccaagctgcacttgattctggactacataaacggtggtgagctgttcacccaccttagccaacgcgagcgttttactgagcatgaggtccagatctacgtgggagagattgtcctggcgctcgagcacttgcacaagctggggattatataccgggatatcaaacttgagaatattctcttggacagcaacggccatgttgtcctgacggactttggtctgtccaaagagttcgtggccgacgagactgagagggcttacagcttctgcggcacaatagaatacatggcaccagacatagttcgcggcggtgatagcggacacgataaggccgtcgactggtggtcgctgggcgttctgatgtatgagctgttgacgggagcgagcccattcactgtcgatggagaaaagaattcccaggccgaaattagccgtagaattttgaagagcgagccgccctaccctcaggagatgagcgcactggcaaaggatttgattcaaagattgctcatgaaagaccctaaaaagcgattaggttgcggtcctagagatgccgatgagataaaggagcatctctttttccaaaagatcaactgggacgatctggccgccaagaaggtgcccgctccatttaaacccgtgatcagagacgagcttgatgttagcaattttgccgaagagtttaccgagatggatcccacgtactctcccgcggctctgccgcagtcgagtgaaaagttgtttcagggctactcgtttgtcgccccctctatcctcttcaaacgtaatgcggccgtcattgatccacttcaattccatatgggagtggaacgacctggtgtaacgaacgtcgctagaagcgccatgatgaaagacagccctttttaccagcattacgatctggacctcaaggacaagccgttgggcgaaggctccttctcgatttgtcgcaagtgtgtccacaagaaatccaatcaggcctttgctgtgaagatcattagcaaaagaatggaagccaatactcagaaagagattaccgctctgaagctttgtgaggggcatccaaatattgtgaaactgcacgaagtgttccatgaccagctgcatacatttctcgtcatggagctcctgaatggaggggagctattcgaacggataaagaagaaaaagcacttcagcgaaacagaggcgtcttacattatgaggaagttggtctctgccgtctcccatatgcacgacgtgggcgtggtgcatagggatttgaagcccgagaacctcctatttactgacgagaacgacaatttagaaattaaaatcatcgactttgggttcgccagattaaagcccccagataaccaacctctcaagactccctgttttacactgcactatgctgccccagagctgctgaatcaaaatggatatgatgaaagctgtgatctttggagtctaggagtgattctctacacaatgctgagcggccaggttccattccagtctcacgatcgctccctgacttgtacctctgcagtggaaatcatgaagaagataaagaagggtgattttagcttcgagggtgaagcttggaagaacgtgagtcaggaagccaaagacttgatccaggggctccttactgtagatcccaataaacggcttaagatgtcgggactgaggtacaacgagtggctccaggacggcagtcagctcagtagcaacccgctgatgacacctgacatactcggaagtagtggcgcggctgtgcacacctgcgtgaaagccaccttccatgctttcaacaagtacaagagggaggggttctgcttgcaaaatgtcgacaaggcacctcttgccaagagaaggaagatgaagaaaaccagcacctctaccgagacgaggtcctcttcaagtgaatccagccactcgtcaagcagtcatagtcacggaaaaaccacccccactaagaccctgcagccaagcaatcctgccgacagtaacaaccctgagacactttttcagttctcggactccgtggcttag

SEQ ID NO: 149235 - DNA, 2409 bp, Artificial Sequence
  derived and/or modified sequence
atggaggaggagggaggatccagtggaggagctgctggtacaagcgccgatggcggagatggcggtgagcaactcctcactgtaaaacacgagctgaggactgcaaatcttaccggacatgcagagaaggtagggatcgagaacttcgagctgctgaaggtgctgggtaccggagcatatggaaaggtatttctcgtcaggaaaatctctggacacgataccggcaagttgtacgcgatgaaggtcctcaagaaggccaccatcgtccagaaagccaaaaccaccgagcatacacgcaccgagcgacaggtgctcgagcatatcagacagtctcctttcctcgtgactctgcactacgcatttcagaccgagacaaaactgcatctaattctcgactatatcaacggaggggagctcttcacgcatctcagtcaacgggagcggttcaccgagcatgaagtccagatttacgttggagagatagtcctggccctcgaacatctccacaagttaggaatcatctaccgggacataaagctggagaacatcctgctggatagcaatggacatgtcgtgctgacagactttggcctcagtaaagaattcgttgcagatgaaaccgaacgtgcatactccttctgcggtactatcgagtatatggcaccagacattgtaagaggcggagacagtggacatgacaaggccgtcgactggtggtcattgggcgtactgatgtatgagctgctgaccggggcatctccattcacagtggacggcgagaagaacagtcaagctgagatatcccggcgaatcctcaaatctgagcccccatatcctcaggagatgtctgccctagccaaagacctgattcagagacttctaatgaaagatccaaaaaagaggctcggctgcgggcctagagacgcagatgagatcaaagagcacctcttttttcagaagataaactgggatgatttggccgctaaaaaggtgcccgctcctttcaaacccgtgatacgcgacgagctcgatgtgtctaactttgccgaagagtttacagaaatggatccaacctactcccccgctgcactgcctcagagcagcgagaagttgttccaaggttactcatttgttgccccatctatactgtttaagagaaacgcggctgtgattgaccccctccaattccatatgggagttgagaggcccggagttactaatgtggcccgatccgccatgatgaaagatagccctttctatcagcactacgaccttgatctaaaagacaaacctctcggtgaaggctcgtttagtatttgtcgcaagtgtgtgcataaaaaatccaatcaagcgtttgctgttaagatcatctctaagaggatggaggccaacactcaaaaagaaataaccgcactgaagctgtgtgaagggcatcccaacattgttaagctgcatgaggttttccatgatcagctgcacacttttctggtgatggaattactcaatggaggcgaactgtttgagagaatcaaaaagaaaaagcactttagcgaaaccgaagcctcctacatcatgagaaaactggtgtcagccgtcagtcatatgcatgatgttggggtggtacatcgggatctcaaacccgagaaccttctcttcaccgatgagaatgataatttggagatcaagattatagatttcggattcgctcgcctcaaaccaccggataatcagccactcaaaacaccatgtttcactctgcactacgcagcaccagagctgttgaatcagaatggctatgatgagtcctgcgacctctggtctttgggggtaattctgtacaccatgttatctggacaggtccctttccagagtcacgatcgctcccttacttgtacttccgctgttgaaataatgaaaaagattaagaagggcgatttctcttttgagggggaggcctggaaaaacgtgagccaagaagccaaggatctcattcaaggtttgcttaccgtggacccaaacaaacgtctaaagatgagtggtctccggtacaacgagtggctgcaggacggaagtcagttgtcttctaatcccctcatgaccccagacatcctcgggagcagcggtgctgcagtccacacctgcgtgaaagcgactttccacgccttcaacaaatacaaacgggagggattttgcctgcagaacgtggataaagcccctctcgccaaaagacggaagatgaagaaaacatctaccagcactgagacgcgttcttccagtagcgagtcctcccacagcagctccagccactctcacggcaagacaactcctacgaagacattgcaacctagcaacccagccgactccaacaatccggagacactattccaattctctgattctgtggcctag

SEQ ID NO: 149236 - DNA, 2172 bp, Artificial Sequence
  derived and/or modified sequence
atgaaggtgctgaaaaaagccaccattgtacaaaaagcaaaaacaaccgaacacactaggaccgagagacaggtccttgagcacatccgtcagtctccattcctggtcacactccactacgcatttcaaactgagaccaaactgcacttgatcctggactacataaacgggggagaattgttcacccacctgagccagagagagcggtttaccgaacacgaagtgcagatctacgttggagaaatagtcctggctttggagcacctccacaagctaggaattatataccgcgatattaaactggagaatattctgctggacagcaatggtcacgtcgtccttaccgatttcgggttaagtaaggagtttgttgccgatgagacggagagggcttatagcttctgcgggacgatcgaatatatggcccctgacatcgttcggggtggtgacagtggccatgacaaagctgtggactggtggtcactgggggtcctcatgtacgaacttctaactggcgcttcaccattcacggttgatggggaaaagaactcccaggcagaaatttcacgacgcattttaaaatccgagcctccatatccacaggaaatgtcagccttagccaaagatctgattcagaggcttttgatgaaggaccccaagaaaagactgggctgcgggcctagagacgctgacgagataaaagagcacttgtttttccaaaagattaactgggacgacctggccgcaaaaaaagttcccgctcccttcaagcccgttattcgggatgaactcgacgtgagtaactttgccgaagagttcaccgaaatggatcctacctactcccctgcagccctgccacagtctagcgagaaactttttcaggggtacagttttgtcgccccatctatcctgttcaagaggaacgctgccgtgattgacccactccaattccatatgggggttgagcggcctggcgttactaacgttgccagatctgcaatgatgaaagattcccccttttaccagcactatgatcttgaccttaaggacaaaccattgggcgaggggagttttagcatctgcaggaaatgtgtgcacaagaagagcaaccaggccttcgccgtgaagattatttccaaacgcatggaagcaaacacacagaaggagataacagccctcaagctgtgcgaaggacatccaaacatcgtgaagcttcatgaggtgttccacgatcagctccatacttttctcgttatggagttgcttaatggcggagagctgtttgaaaggatcaaaaaaaagaagcacttttcagagaccgaggccagttacatcatgaggaagctggtttctgctgtttcgcacatgcatgacgtgggagttgtgcatcgcgatctcaaaccagaaaacctgctgttcacagacgagaacgacaaccttgagatcaaaattatcgactttggattcgccaggttgaagccacccgacaatcaacccctgaagaccccgtgctttactctgcactatgcggcaccggagctgctcaaccaaaacggctatgacgagtcctgtgatctgtggtccttgggcgtgatcctctacaccatgctgtccggccaggtcccatttcagtctcatgacaggagtctcacgtgcacctcagctgtagagatcatgaagaaaatcaagaagggagacttctcatttgagggagaagcctggaagaacgtgagccaggaagccaaagacctgatccaagggcttctcaccgtcgacccgaataagcgcttgaagatgtctggtctgaggtacaatgaatggctgcaagatggcagccaactgtctagcaacccactgatgacccctgacattctcggcagttctggtgccgcagtgcacacctgtgtgaaggccacctttcatgcttttaacaagtataagcgagaggggttctgtctgcagaacgtggacaaagccccacttgccaaacgcaggaagatgaaaaaaactagcacgagcacagaaacccgatcctccagctcagagagttcacactcctcaagcagccattcccatggtaaaaccaccccaactaagactctccagccttccaaccccgcagactcaaacaatcccgagacactgttccagttcagcgactctgtcgcatag

SEQ ID NO: 149237 - DNA, 4202 bp, Artificial Sequence
  derived and/or modified sequence
ggcgaggagcgagccgtgcggccagagcgggaaagagactcgtctttgcgtccgagttctggagccgccgcaccccgactcctggggccgcggcagcggctgcgaggggacgggcgtccgctgtctcctgggttcccctcgtagcgacccgcgggatcggaaaaaaaggagaagatggaggaggagggtggcagcagcggcggcgccgcggggaccagcgcggacggcggcgacggaggagagcagctcctcactgtcaagcacgagctgcggactgctaatttgacaggacatgctgagaaggtgggaatagaaaattttgagctcctgaaggtcctaggaactggagcttatggaaaagtatttctagttcgtaaaataagtggccatgatactggaaagctgtatgccatgaaagttttgaaaaaggcaacaatcgttcaaaaggccaaaaccacagagcatacaaggacagaacgacaagtcctggaacacattaggcagtcgccatttttggtaacattacattatgctttccagacagaaaccaaacttcatctcattttagattatataaatggtggtgaactttttactcatctttctcaaagagagcgtttcacagagcatgaggtgcagatttatgttggagagattgtgcttgccctcgaacatctccacaagttggggattatatatcgtgatattaagcttgagaatattctacttgattctaatggccatgtggtgctgacagattttggtctgagtaaggagtttgtggctgatgaaactgaaagagcatattccttttgtggaactattgaatacatggcaccagatattgtcagagggggagattcaggacatgacaaggcagttgactggtggagtttgggtgttctaatgtatgaattactaactggagcatctcctttcactgttgatggagaaaaaaattcccaagctgagatatctaggagaatattaaaaagtgagcctccatatccccaagaaatgagtgctttagcgaaagacctaattcagcgtcttttgatgaaagatcccaagaagagattgggatgtggtccacgtgatgcagatgaaatcaaagaacatctcttctttcagaaaataaattgggatgatttagccgccaaaaaagtgcctgcaccatttaagccagtcattcgagatgaattagatgtgagtaactttgcagaagagttcacagaaatggatcccacttattctcccgcagccctgccccagagttctgagaagctgtttcagggctattcctttgttgctccttccatcctattcaagcgtaatgcagctgtcatagaccctcttcagtttcacatgggagttgaacgtcctggagtgacaaatgttgccaggagtgcaatgatgaaggactctccattctatcaacactatgacctagatttgaaggacaaacccctgggagaaggtagtttttcaatttgtcgaaagtgtgtgcataaaaaaagtaaccaagcttttgcagtcaaaataatcagcaaaaggatggaagccaatactcaaaaggaaataacagctctgaaactctgtgaaggacaccccaatattgtgaagttgcatgaagtttttcatgatcagcttcacacgtttctagtgatggaacttctgaatggaggagaactgtttgagcgcattaagaaaaagaagcacttcagtgagacggaagccagctacatcatgaggaagcttgtttcagctgtaagccacatgcatgatgttggagtggtgcacagggatctgaaacctgagaatttattgttcaccgatgaaaatgacaatttggaaattaaaataattgattttggatttgcacggctaaagccaccggataatcagcccctgaagactccatgcttcacccttcattatgccgccccagagctcttgaatcagaacggctacgatgagtcctgtgacctgtggagcttgggcgtcattttgtacacaatgttgtcaggacaggttcccttccaatctcatgaccgaagtttgacgtgtaccagcgcggtggaaatcatgaagaaaattaaaaagggagatttctcctttgaaggagaagcctggaagaatgtatcccaagaggctaaagatttgatccaaggacttctcacagtagatccaaacaaaaggcttaaaatgtctggcttgaggtacaatgaatggctacaagatggaagtcagctgtcctccaatcctctgatgactccggatattctaggatcttccggagctgccgtgcatacctgtgtgaaagcaaccttccacgcctttaacaaatacaagagagaggggttttgccttcagaatgttgataaggcccctttggctaagagaagaaaaatgaaaaagactagcaccagtaccgagacgcgcagcagttccagtgagagttcccattcttcttcctctcattctcacggtaaaactacacccaccaagacactgcagcccagcaatcctgccgacagcaataacccggagaccctcttccagttctcggactcagtagcttaggcatggtaggagtgtatcagtgatccattgcacctttattccctcagcatatgcctgaggcgatcttttatgcttttaaaaatgtttcccgttggtctcattggaatctgcctcctaatgatttttttcaggaaaacctgtttggttatcctcattcaaaagcactggacagagaatgttactgtgaatagagcacatattactctttttagcaacctagcatgatgccaacaagactattcttgaaagagcaaaggttcctgtaaatttaattagggctagatttgagctgcttgtaagtcacaggttttccagatgtctgccaacaagaaatgactcatactgtgatgataccttttgctttgccttgtggacaatgtgggtttttgaaatttgcacccttcaaacaatgatttatcagagaaaggggtctgttttcaaaaaagattctgtaatgaattttatgtgtggcatatacttatttcttgagagaagattttaacttattgtttttattttatggttacatatgatgataacctgctattattaaactttttctaaaaagtgaaaaaaaaaaaaaaagatataagaactcaaggtcccatactctgtattcgggatccatctgagatgcatgctaagctatgtgtatgtttttaattttgcactgctctttcctggcaatttgttttaatggttattgcagaatattaaggtacatgtctctctgttttaagtaatattgcactttataaaaaagtatgaataaagcaaactattttataaagtgcactgtttaaagcatttgcactgtatttttgccatttattttcattttctactttaaatttgtcctcacattcctcttctactttgtatgcaacaagtagaatggggcatgttgtgtcatgtagtcagccacttatgcaccaatgtgaggaaaacctaaagggaaattaaactaaacactgtgcttcatatttgtacactgtgttgtactacagtgaggaatttcctcctgtagtcatatattatgtacataatattttagaatcatacctatgacttgtttggaaatttttctgttaaattttaaatccagaaagcatattttataaacttatgcagagcacttttattgctcaaaagttctgaattcatacagaaaacaagtactatgtgatgaaaacatttcattaaaagattgctgcatttaaaaatacaattaattcgttccctatgcaaaaaaaaaaaaaaaaaaaaaagaagtgatagggtttgtgtgttatattttcttttaaagccatcatgtgaaatgtcaggactgagaaaagtgatttttttgctttgtttacaggaatcatgcttaaagagataatgcccaacatgtttattttatagtttttgttaatgataaccttttgagcattagtttggaatttggacatgatatttatttattcctttcttgaggttatagcagcattaatttcaaccagttatgaatactaaaaatattgcactctatgtaatagtagtatatttattactaaatcaatgtatatattaatagcacaggcaaaaaatggcaaatattaaaatattttcaaaatatt

SEQ ID NO: 149238 - DNA, 2993 bp, Artificial Sequence
  derived and/or modified sequence
agttttccccagcccgggaatgagcggcgggcaccaggcatcggggccagcgcagccgccgaccgctgcccgtggcacgcacctccgaggatgtcgctgctcccccttcccgcacagctaatttgacaggacatgctgagaaggtgggaatagaaaattttgagctcctgaaggtcctaggaactggagcttatggaaaagtatttctagttcgtaaaataagtggccatgatactggaaagctgtatgccatgaaagttttgaaaaaggcaacaatcgttcaaaaggccaaaaccacagagcatacaaggacagaacgacaagtcctggaacacattaggcagtcgccatttttggtaacattacattatgctttccagacagaaaccaaacttcatctcattttagattatataaatggtggtgaactttttactcatctttctcaaagagagcgtttcacagagcatgaggtgcagatttatgttggagagattgtgcttgccctcgaacatctccacaagttggggattatatatcgtgatattaagcttgagaatattctacttgattctaatggccatgtggtgctgacagattttggtctgagtaaggagtttgtggctgatgaaactgaaagagcatattccttttgtggaactattgaatacatggcaccagatattgtcagagggggagattcaggacatgacaaggcagttgactggtggagtttgggtgttctaatgtatgaattactaactggagcatctcctttcactgttgatggagaaaaaaattcccaagctgagatatctaggagaatattaaaaagtgagcctccatatccccaagaaatgagtgctttagcgaaagacctaattcagcgtcttttgatgaaagatcccaagaagagattgggatgtggtccacgtgatgcagatgaaatcaaagaacatctcttctttcagaaaataaattgggatgatttagccgccaaaaaagtgcctgcaccatttaagccagtcattcgagatgaattagatgtgagtaactttgcagaagagttcacagaaatggatcccacttattctcccgcagccctgccccagagttctgagaagctgtttcagggctattcctttgttgctccttccatcctattcaagcgtaatgcagctgtcatagaccctcttcagtttcacatgggagttgaacgtcctggagtgacaaatgttgccaggagtgcaatgatgaaggactctccattctatcaacactatgacctagatttgaaggacaaacccctgggagaaggtagtttttcaatttgtcgaaagtgtgtgcataaaaaaagtaaccaagcttttgcagtcaaaataatcagcaaaaggatggaagccaatactcaaaaggaaataacagctctgaaactctgtgaaggacaccccaatattgtgaagttgcatgaagtttttcatgatcagcttcacacgtttctagtgatggaacttctgaatggaggagaactgtttgagcgcattaagaaaaagaagcacttcagtgagacggaagccagctacatcatgaggaagcttgtttcagctgtaagccacatgcatgatgttggagtggtgcacagggatctgaaacctgagaatttattgttcaccgatgaaaatgacaatttggaaattaaaataattgattttggatttgcacggctaaagccaccggataatcagcccctgaagactccatgcttcacccttcattatgccgccccagagctcttgaatcagaacggctacgatgagtcctgtgacctgtggagcttgggcgtcattttgtacacaatgttgtcaggacaggttcccttccaatctcatgaccgaagtttgacgtgtaccagcgcggtggaaatcatgaagaaaattaaaaagggagatttctcctttgaaggagaagcctggaagaatgtatcccaagaggctaaagatttgatccaaggacttctcacagtagatccaaacaaaaggcttaaaatgtctggcttgaggtacaatgaatggctacaagatggaagtcagctgtcctccaatcctctgatgactccggatattctaggatcttccggagctgccgtgcatacctgtgtgaaagcaaccttccacgcctttaacaaatacaagagagaggggttttgccttcagaatgttgataaggcccctttggctaagagaagaaaaatgaaaaagactagcaccagtaccgagacgcgcagcagttccagtgagagttcccattcttcttcctctcattctcacggtaaaactacacccaccaagacactgcagcccagcaatcctgccgacagcaataacccggagaccctcttccagttctcggactcagtagcttaggcatggtaggagtgtatcagtgatccattgcacctttattccctcagcatatgcctgaggcgatcttttatgcttttaaaaatgtttcccgttggtctcattggaatctgcctcctaatgatttttttcaggaaaacctgtttggttatcctcattcaaaagcactggacagagaatgttactgtgaatagagcacatattactctttttagcaacctagcatgatgccaacaagactattcttgaaagagcaaaggttcctgtaaatttaattagggctagatttgagctgcttgtaagtcacaggttttccagatgtctgccaacaagaaatgactcatactgtgatgataccttttgctttgccttgtggacaatgtgggtttttgaaatttgcacccttcaaacaatgatttatcagagaaaggggtctgttttcaaaaaagattctgtaatgaattttatgtgtggcatatacttatttcttgagagaagattttaacttattgtttttattttatggttacatatgatgataacctgctattattaaactttttctaaaaagtg

SEQ ID NO: 149239 - protein, 609 aa, Artificial Sequence
  derived and/or modified sequence
MSRSAAASGGPRRPERHLPPAPCGAPGPPETCRTEPDGAGTMNKLRQSLRRRKPAYVPEASRPHQWQADEDAVRKGTCSFPVRYLGHVEVEESRGMHVCEDAVKKLKAMGRKSVKSVLWVSADGLRVVDDKTKDLLVDQTIEKVSFCAPDRNLDKAFSYICRDGTTRRWICHCFLALKDSGERLSHAVGCAFAACLERKQRREKECGVTAAFDASRTSFAREGSFRLSGGGRPAEREAPDKKKAEAAAAPTVAPGPAQPGHVSPTPATTSPGEKGEAGTPVAAGTTAAAIPRRHAPLEQLVRQGSFRGFPALSQKNSPFKRQLSLRLNELPSTLQRRTDFQVKGTVPEMEPPGAGDSDSINALCTQISSSFASAGAPAPGPPPATTGTSAWGEPSVPPAAAFQPGHKRTPSEAERWLEEVSQVAKAQQQQQQQQQQQQQQQQQQQQAASVAPVPTMPPALQPFPAPVGPFDAAPAQVAVFLPPPHMQPPFVPAYPGLGYPPMPRVPVVGITPSQMVANAFCSAAQLQPQPATLLGKAGAFPPPAIPSAPGSQARPRPNGAPWPPEPAPAPAPELDPFEAQWAALEGKATVEKPSNPFSGDLQKTFEIEL

SEQ ID NO: 149240 - DNA, 1830 bp, Artificial Sequence
  derived and/or modified sequence
atgtcacgatcagcagctgcctctggcggtcctaggcgccctgagaggcatctgcctccggccccgtgtggagccccgggcccaccagaaacttgtcgcaccgagcccgatggggccggcaccatgaacaaattgcgacagtcactacgacggcggaaacctgcgtatgtgcccgaggccagccgaccacaccagtggcaagctgacgaagacgctgtgcggaaaggcacgtgttcctttcccgtacggtatctggggcacgtagaggtggaggaatcccgcggcatgcatgtttgtgaggacgctgtgaaaaagctgaaagctatggggcgtaagtccgttaagagcgtgttatgggtctccgccgacggtctgcgcgtggtggatgacaaaaccaaggacctacttgtcgatcagaccattgaaaaggtgtcattttgcgctcccgatcgaaatctggacaaagctttctcttacatctgtcgggacggtactactcggcgttggatctgccattgtttcctcgcactgaaggacagtggagaaaggttaagccacgccgtgggctgcgcatttgccgcctgtctcgagagaaaacagcgccgcgagaaggagtgcggcgtcactgccgcctttgacgctagtaggaccagctttgcacgagaagggtcatttcgcctatcaggaggcgggcgacccgcagagcgtgaggcccccgataagaagaaggccgaagccgccgcagcacccaccgtcgctccaggcccggcacagcctgggcacgtttcccccacgcctgcgactacctcaccaggagagaaaggtgaagctggcactccagttgccgctggcactaccgcagctgcaatccccagaagacatgctcccctcgagcagctcgttcgccagggctcctttcgcggatttcccgccctttcccagaagaattcaccttttaagcggcagctgtcactcaggttgaacgaactgcctagcacactgcagcggagaaccgactttcaggtgaaaggcacagtgccagaaatggaaccgcctggagccggtgactcagactccatcaacgccttgtgcacccagataagctcctctttcgcctccgcaggtgcaccagctcctggcccgccacccgcaactactggtacttccgcctggggggagccctccgttcccccagccgctgcttttcagccagggcacaaaaggaccccttccgaggcggagcgttggctcgaggaagtatctcaggtggctaaggcacagcagcaacaacaacagcagcagcagcagcagcagcagcagcagcagcagcagcagcaggccgccagcgtggcccctgttcccacaatgccgcccgccctgcaaccattccccgcccccgtgggacccttcgacgccgcgcctgcacaggtggctgtgttcctccccccgcctcacatgcagccacccttcgtaccagcttatccgggcctgggttatcccccaatgcccagagtgcctgtcgtcggcatcacgccctcccagatggttgccaacgcattttgtagtgctgcacagctgcagccacagcccgccaccctgctcggcaaagccggtgcctttcctccacccgccatccccagcgccccaggatcacaggcaaggccacgccccaacggagccccctggcccccagagcctgcccccgcacccgctcccgagctggatccatttgaagctcagtgggccgctcttgaaggtaaagctactgtcgagaagccctctaatccattctctggggatctccagaaaactttcgaaattgagttgtag

SEQ ID NO: 149241 - DNA, 1830 bp, Artificial Sequence
  derived and/or modified sequence
atgagccgctctgctgctgccagcggcggcccccggcggcctgagcggcacctgcccccagccccctgtggggcccctggccccccagagacctgcaggacagagccagatggagctggcaccatgaacaagctgcggcagagcctgcggcggaggaagccagcctacgtgcctgaggccagccggccccaccagtggcaggctgatgaagatgctgtgaggaagggcacctgcagcttccctgtgcgctacctgggccacgtggaggtggaggagagccggggcatgcacgtgtgtgaagatgctgtgaagaagctgaaggccatgggcaggaagtctgtgaagtctgtgctgtgggtgtctgcagatggcctgcgggtggtggatgacaagaccaaggacctgctggtggaccagaccatcgagaaggtgtccttctgtgccccagacaggaacctggacaaggccttctcctacatctgcagagatggcaccacccggcgctggatctgccactgcttcctggccctgaaggacagcggggagcggctgagccatgctgtgggctgtgcctttgctgcctgcctggagaggaagcagaggcgggagaaggaatgtggggtgacagctgcctttgatgccagcaggaccagctttgcccgggagggcagcttccggctgagcggcggcggccggcctgctgagcgggaggccccagacaagaagaaggccgaggccgccgccgcccccaccgtggcccctggccctgcccagcccggccacgtgagccccaccccagccaccaccagccctggagagaagggggaggccggcacccctgtggccgccggcaccacagctgctgccatccccaggagacatgcccccctggagcagctggtgcggcagggcagcttccggggcttccctgccctgagccagaagaacagccccttcaagaggcagctgagcctgcggctgaatgagctgcccagcaccctgcagaggagaacagacttccaggtgaagggcaccgtgcctgagatggagcccccaggggccggggacagcgacagcatcaatgccctgtgcacccagatcagcagcagctttgccagcgctggggccccagcccctggccccccaccagccaccaccggcaccagcgcctggggcgagcccagcgtgcccccagctgctgccttccagcccggccacaagaggaccccatctgaggccgagcgctggctggaggaggtgtcccaggtggccaaggcccagcagcagcagcagcagcagcagcagcagcagcagcagcagcagcagcagcagcagcaggccgcctctgtggcccctgtgcccaccatgcccccagccctgcagcccttccctgcccctgtgggcccctttgatgctgccccagcccaggtggccgtgttcctgcccccaccccacatgcagcccccatttgtgcctgcctacccaggcctgggctacccacccatgccccgggtgcctgtggtgggcatcacccccagccagatggtggccaatgccttctgcagcgctgcccagctgcagccccagcctgccaccctgctgggcaaggccggggccttccccccaccagccatccccagcgcccctggcagccaggcccggccccggcccaacggggccccctggcccccagagcccgccccagccccagcccctgagctggacccctttgaggcccagtgggccgccctggagggcaaggccaccgtggagaagcccagcaaccccttcagcggggacctgcagaagacctttgaaattgagctgtag

SEQ ID NO: 149242 - DNA, 1830 bp, Artificial Sequence
  derived and/or modified sequence
atgagccggagcgccgccgccagcggcggcccccggcggcccgagagacatctaccacccgccccttgcggagcacctggaccgccagagacatgcagaaccgagcccgatggagctgggactatgaacaaactccgacaaagtttgcgccggcgcaagcccgcatacgtgccagaggctagcagaccacatcagtggcaggcagatgaggacgcagtgcgcaagggcacttgttcgtttcccgtcaggtatttaggacacgtagaagtcgaggaaagccgaggtatgcacgtttgcgaagacgctgtgaaaaaacttaaggcaatggggagaaagtcggtcaaatcggtgctctgggtgtctgccgacggcttgcgtgtcgtcgacgacaaaacgaaggacctcttagtagatcagacaatagaaaaggtgtccttctgtgcgcccgaccgcaaccttgacaaagccttcagttacatatgcagggatgggacaacccgtcgctggatctgccactgcttcctagcattaaaagattccggcgaacggcttagtcacgcagtgggctgtgcctttgcagcttgtctggagcgtaagcaacggcgagaaaaggagtgcggggttaccgcagcttttgacgccagtagaacctcttttgccagggagggatcctttcgcctgtccggaggaggccgccccgcagagcgtgaagccccggacaaaaaaaaagctgaggccgcggccgctccgactgtcgcacctggacctgcgcaacccgggcatgtgtcgcctacccccgcgaccactagtccgggagaaaagggagaagccggcacacctgtagccgccggcacgactgcagctgctattccccggaggcatgcacccctagagcaactggtgcgccagggatcgttccgaggcttccctgctctgagccagaaaaactcccccttcaagaggcagctgtcactgaggctcaacgaactgccctccactctgcaacgcagaacagattttcaagtaaaaggtactgtcccagagatggagccccctggcgccggcgacagcgacagcataaatgcactgtgtacgcagatcagcagttccttcgcttcagctggagcccctgccccgggtccacccccagccaccaccgggaccagcgcctggggggagcctagtgtaccacctgctgcagccttccagccaggacataagagaaccccctcagaagctgagcgctggctcgaggaagtgtcacaggtcgccaaagcacaacagcagcagcagcaacagcagcaacagcagcagcagcagcagcaacagcagcagcaggcagcttctgtagcacctgtgcccacaatgccacctgctctgcagcccttcccggctcctgtgggccctttcgatgctgcccctgctcaggttgctgtttttttacccccgccacacatgcagcctcctttcgtacctgcctaccccgggttgggctatcccccaatgcctagggttcctgttgtcgggattacaccatctcagatggtggccaatgccttttgcagcgcagcccaactgcagccacagccggcaaccttattagggaaagctggcgccttccctccccctgccattcctagcgccccaggctctcaggcgaggccacgtcctaacggggcgccctggcccccagagcctgccccggcccctgcccctgaactagaccctttcgaagctcagtgggccgctctcgaggggaaggctaccgttgaaaagcctagtaatccattcagtggggatctgcaaaaaacttttgagatcgagctttag

SEQ ID NO: 149243 - DNA, 3561 bp, Artificial Sequence
  derived and/or modified sequence
aatcctcccgggagccgaggaggctcgcgcgcgtgcatcccgcaccatcccccggccccgggccctggccggcgtcagaccgagctgccgccgccaccaccgcagcagcagcagtcggggagccaggcccagccagggccgcgggaggcgggggcgcccgggccctggatgtcccgcagcgcggcggccagcggcggaccccggaggcctgagcggcacctgcccccagccccctgtggggccccggggcccccagaaacctgcaggacggagccagacggggcgggcaccatgaacaagttacggcagagcctgcggcggaggaagccagcctacgtgcccgaggcgtcgcgcccgcaccagtggcaggcagacgaggacgcggtgcggaagggcacgtgcagcttcccggtcaggtacctgggtcacgtggaggtagaggagtcccggggaatgcacgtgtgtgaagatgcggtgaagaagctgaaggcgatgggccgaaagtccgtgaagtctgtcctgtgggtgtcagccgatgggctccgagtggtggacgacaaaaccaaggatcttctggtcgaccagaccatcgaaaaggtctccttttgtgctcctgaccgcaacctggacaaggctttctcctatatctgtcgtgacgggactacccgccgctggatctgccactgttttctggcactgaaggactccggcgagaggctgagccacgctgtgggctgtgcttttgccgcctgcctggagcgaaaacagcgacgggagaaggaatgtggggtcacggccgccttcgatgccagccgcaccagcttcgcccgcgagggctccttccgcctgtctgggggtgggcggcctgctgagcgagaggccccggacaagaagaaagcagaggcagcagctgcccccactgtggctcctggccctgcccagcctgggcacgtgtccccgacaccagccaccacatcccctggtgagaagggtgaggcaggcacccctgtggctgcaggcaccactgcggccgccatcccccggcgccatgcacccctggagcagctggttcgccagggctccttccgtgggttcccagcactcagccagaagaactcgcctttcaaacggcagctgagcctacggctgaatgagctgccatccacgctgcagcgccgcactgacttccaggtgaagggcacagtgcctgagatggagcctcctggtgccggcgacagtgacagcatcaacgctctgtgcacacagatcagttcatcttttgccagtgctggagcgccagcaccagggccaccacctgccacaacagggacttctgcctggggtgagccctccgtgccccctgcagctgccttccagcctgggcacaagcggacaccttcagaggctgagcgatggctggaggaggtgtcacaggtggccaaggcccagcagcagcagcagcagcaacagcaacagcagcagcagcagcagcagcaacagcagcaagcagcctcagtggccccagtgcccaccatgcctcctgccctgcagcctttccccgcccccgtggggccctttgacgctgcacctgcccaagtggccgtgttcctgccacccccacacatgcagcccccttttgtgcccgcctacccgggcttgggctacccaccgatgccccgggtgcccgtggtgggcatcacaccctcacagatggtggcaaacgccttctgctcagccgcccagctccagcctcagcctgccactctgcttgggaaagctggggccttcccgccccctgccatacccagtgcccctgggagccaggcccgccctcgccccaatggggccccctggccccctgagccagcgcctgccccagctccagagttggacccctttgaggcccagtgggcggcattagaaggcaaagccactgtagagaaaccctccaaccccttttctggcgacctgcaaaagacattcgagattgaactgtagcccgagccgccccacccactccatcatctccaggtgccccacgcctgggggtggaggcacaacctctcccctaaccctgctccctggggctgcgcccctcaacaccctctcaacacccccctccctcaaccaccccgacaaccactacagaaccaacattgtgacgcccaggttgcaacaggatggaattcagggacggacccagcctggctaagggaaccatttcactgccggacttaggctggcaatgcccccttccccaaccccagacacaggggttggccacaatcccactgaatgcccttggttcacactccatttcccagtttctgttgacccccaccttccagtgttggacaggatggaggggggacacttgcttaggggctctcctgggccccacaccagtgcccaccccaaatctggtcgtctcctccccccatgcacagcacaagctaagggctgccctctgcccacacgctgcgttcactgccaatgctgtactcacctccatcaccctccaactttggggcccatgtcttccttgggccaaggtctcatgggggctagggccaagttgggggcccaggaggcggggagggaggaggaggagaagatgcgcagttacctcatgtcggtgcccgctggggaggggtccgggaagaaggggaaggggtgcctggcgggtacttttctatcttttatttccagattttttttgtatctaaacttgaagatttgtattatacaaggacagccaataaaggaagaatataatggtgcccctcgggaaacgagggtgtgtgtagggcgctggtgaggccctagaacctttcctcctgagtcatggactgaaacagagtcagaaggatgtccctgagtgataacctctgagtcatagcgtggtaacaggtaccactgactcagcacctgccaggcgggtattaaaggagccaaaattaatcaccccatttctattccttacagagttagaatcaaggaataaaaaacaaatattatgaactgctggctgggcacagtggctcacgcctgtaatcccagcactttgggaggtcgaggcaggcagatcacttaaggtcaggagttcgagaccagcctggccgccatggagaaacccagtctctaccaaaaattcaaaaattagccgggcgtggtggcaggcgcctgtaattccaggaggctgaggcacaagaatcgcttgaacccaggcagcagaggttgcagtgacctgaggtcacaccattgcactcctgcctgggcaacagaatgagactctgtctcaaaaaaaaaaaacaaaaaaaaaaaaactacttctaattagctcaatattaatattttaacaagttgggttggtaacagtatatctttgcccatgctggcaaattcttgttttgtcagcattttccataactctggccaaagtgtcacctgatgtggcaacgttttacagtcttgctattgtttcttgagtcctttaatctataagatgtatttttaaaaatatataacatataaattttgtttcgttatagctctttaaaa

SEQ ID NO: 149244 - DNA, 1931 bp, Artificial Sequence
  derived and/or modified sequence
aaaccaaggcctccaggacgcgattccagacacaatccctacctctccctgcctaagggggtctcagcacaacaactgcctagacggggcgggcaccatgaacaagttacggcagagcctgcggcggaggaagccagcctacgtgcccgaggcgtcgcgcccgcaccagtggcaggcagacgaggacgcggtgcggaagggcacgtgcagcttcccggtcaggtacctgggtcacgtggaggtagaggagtcccggggaatgcacgtgtgtgaagatgcggtgaagaagctgaaggcgatgggccgaaagtccgtgaagtctgtcctgtgggtgtcagccgatgggctccgagtggtggacgacaaaaccaaggatcttctggtcgaccagaccatcgaaaaggtctccttttgtgctcctgaccgcaacctggacaaggctttctcctatatctgtcgtgacgggactacccgccgctggatctgccactgttttctggcactgaaggactccggcgagaggctgagccacgctgtgggctgtgcttttgccgcctgcctggagcgaaaacagcgacgggagaaggaatgtggggtcacggccgccttcgatgccagccgcaccagcttcgcccgcgagggctccttccgcctgtctgggggtgggcggcctgctgagcgagaggccccggacaagaagaaagcagaggcagcagctgcccccactgtggctcctggccctgcccagcctgggcacgtgtccccgacaccagccaccacatcccctggtgagaagggtgaggcaggcacccctgtggctgcaggcaccactgcggccgccatcccccggcgccatgcacccctggagcagctggttcgccagggctccttccgtgggttcccagcactcagccagaagaactcgcctttcaaacggcagctgagcctacggctgaatgagctgccatccacgctgcagcgccgcactgacttccaggtgaagggcacagtgcctgagatggagcctcctggtgccggcgacagtgacagcatcaacgctctgtgcacacagatcagttcatcttttgccagtgctggagcgccagcaccagggccaccacctgccacaacagggacttctgcctggggtgagccctccgtgccccctgcagctgccttccagcctgggcacaagcggacaccttcagaggctgagcgatggctggaggaggtgtcacaggtggccaaggcccagcagcagcagcagcagcaacagcaacagcagcagcagcagcagcagcaacagcagcaagcagcctcagtggccccagtgcccaccatgcctcctgccctgcagcctttccccgcccccgtggggccctttgacgctgcacctgcccaagtggccgtgttcctgccacccccacacatgcagcccccttttgtgcccgcctacccgggcttgggctacccaccgatgccccgggtgcccgtggtgggcatcacaccctcacagatggtggcaaacgccttctgctcagccgcccagctccagcctcagcctgccactctgcttgggaaagctggggccttcccgccccctgccatacccagtgcccctgggagccaggcccgccctcgccccaatggggccccctggccccctgagccagcgcctgccccagctccagagttggacccctttgaggcccagtgggcggcattagaaggcaaagccactgtagagaaaccctccaaccccttttctggcgacctgcaaaagacattcgagattgaactgtagcccgagccgccccacccactccatcatctccaggtgccccacgcctgggggtggaggcacaacctctcccctaaccctgctccctggggctgcgcccctcaacaccctctcaacacccccctccctc

SEQ ID NO: 149245 - DNA, 1830 bp, Artificial Sequence
  derived and/or modified sequence
atgtcgagatctgccgcagcttccggaggccctaggagaccggaacgtcacttgccaccggctccctgcggcgctccaggtccacctgagacttgccgcacggagccagatggagccggaactatgaataagctgagacagtcattaagacgcagaaaacccgcatatgtgcctgaagcgagtcggccacatcaatggcaggctgacgaagatgctgttcgcaaaggcacttgtagtttcccagttaggtacctgggacatgtcgaggttgaggaaagtcgcggtatgcacgtctgcgaagatgccgtgaaaaagttgaaggccatgggccgaaagagcgtgaagtctgttttatgggtcagtgctgacggactcagggtggtcgacgataagactaaagatctgttggtggaccaaacaatcgagaaggtcagcttttgtgcccctgataggaacctcgacaaagcattctcatacatttgcagagacggtacaacacggcgatggatttgccattgttttctggccttaaaggactccggcgaacgtctctcacatgctgtggggtgcgcgttcgccgcatgcctggaacgaaaacagaggcgagagaaggagtgtggggttacagcggcttttgacgccagtcgaacgtctttcgccagggaaggcagctttagattaagtgggggtggccgacccgctgagagggaagcccctgataagaagaaggccgaggcagctgcagctccaacagtcgctcccggacctgcccaaccaggtcacgtgtcccccacccctgctacaacgtcacctggagagaagggtgaggctgggacgcctgtggctgctggaacgactgcggcagctatcccccgacgccacgccccactggagcagctggttagacaaggaagcttcaggggcttccccgctctttcgcaaaagaactctccttttaaacggcaattatcactgcggctcaatgagttgcccagcactctgcagcgccgaactgattttcaggttaaagggacagttcctgagatggagcctcctggcgctggagactccgactctattaacgccctgtgtactcagatctccagcagcttcgcttccgcaggagcacctgcaccaggtccacctccggctaccactgggaccagtgcctggggcgagcccagtgttcctcctgccgcagccttccagcccggtcacaagaggacgcctagcgaggccgaaaggtggctggaggaagtatcgcaggtggctaaggcccagcagcaacagcagcaacagcagcagcagcagcagcagcaacaacaacaacagcagcaagcagcttcagtcgccccagtgcctactatgccacctgccctgcagccttttcctgccccagtagggcctttcgatgccgcacccgctcaggtggctgtcttcttgccccctccccatatgcaacctccctttgttccagcataccctggacttggctacccccctatgccaagagtgccagtggtagggattacaccctcccagatggttgccaatgcattttgttcagcagcgcagctgcagccccagcctgccaccttgctggggaaagcaggcgcattccccccacccgcaatccccagcgccccaggcagtcaggcccgacctaggcccaatggagctccttggcccccagagccggctcccgctccagccccagagctggatcctttcgaggcacagtgggccgctcttgaaggtaaggccaccgtcgagaaacccagtaatcccttctctggcgatctgcagaagacttttgaaatagaactttag

SEQ ID NO: 149246 - DNA, 1830 bp, Artificial Sequence
  derived and/or modified sequence
atgagcagaagcgccgccgccagcggcggccccagaagacccgagagacacctgccccccgccccctgcggcgcccccggcccccccgagacctgcagaaccgagcccgacggcgccggcaccatgaacaagctgagacagagcctgagaagaagaaagcccgcctacgtgcccgaggccagcagaccccaccagtggcaggccgacgaggacgccgtgagaaagggcacctgcagcttccccgtgagatacctgggccacgtggaggtggaggagagcagaggcatgcacgtgtgcgaggacgccgtgaagaagctgaaggccatgggcagaaagagcgtgaagagcgtgctgtgggtgagcgccgacggcctgagagtggtggacgacaagaccaaggacctgctggtggaccagaccatcgagaaggtgagcttctgcgcccccgacagaaacctggacaaggccttcagctacatctgcagagacggcaccaccagaagatggatctgccactgcttcctggccctgaaggacagcggcgagagactgagccacgccgtgggctgcgccttcgccgcctgcctggagagaaagcagagaagagagaaggagtgcggcgtgaccgccgccttcgacgccagcagaaccagcttcgccagagagggcagcttcagactgagcggcggcggcagacccgccgagagagaggcccccgacaagaagaaggccgaggccgccgccgcccccaccgtggcccccggccccgcccagcccggccacgtgagccccacccccgccaccaccagccccggcgagaagggcgaggccggcacccccgtggccgccggcaccaccgccgccgccatccccagaagacacgcccccctggagcagctggtgagacagggcagcttcagaggcttccccgccctgagccagaagaacagccccttcaagagacagctgagcctgagactgaacgagctgcccagcaccctgcagagaagaaccgacttccaggtgaagggcaccgtgcccgagatggagccccccggcgccggcgacagcgacagcatcaacgccctgtgcacccagatcagcagcagcttcgccagcgccggcgcccccgcccccggccccccccccgccaccaccggcaccagcgcctggggcgagcccagcgtgccccccgccgccgccttccagcccggccacaagagaacccccagcgaggccgagagatggctggaggaggtgagccaggtggccaaggcccagcagcagcagcagcagcagcagcagcagcagcagcagcagcagcagcagcagcagcaggccgccagcgtggcccccgtgcccaccatgccccccgccctgcagcccttccccgcccccgtgggccccttcgacgccgcccccgcccaggtggccgtgttcctgccccccccccacatgcagccccccttcgtgcccgcctaccccggcctgggctacccccccatgcccagagtgcccgtggtgggcatcacccccagccagatggtggccaacgccttctgcagcgccgcccagctgcagccccagcccgccaccctgctgggcaaggccggcgccttccccccccccgccatccccagcgcccccggcagccaggccagacccagacccaacggcgccccctggccccccgagcccgcccccgcccccgcccccgagctggaccccttcgaggcccagtgggccgccctggagggcaaggccaccgtggagaagcccagcaaccccttcagcggcgacctgcagaagaccttcgagatcgagctgtag

SEQ ID NO: 149247 - protein, 1857 aa, Artificial Sequence
  derived and/or modified sequence
MEQLTTLPRPGDPGAMEPWALPTWHSWTPGRGGEPSSAAPSIADTPPAALQLQELRSEESSKPKGDGSSRPVGGTDPEGAEACLPSLGQQASSSGPACQRPEDEEVEAFLKAKLNMSFGDRPNLELLRALGELRQRCAILKEENQMLRKSSFPETEEKVRRLKRKNAELAVIAKRLEERARKLQETNLRVVSAPLPRPGTSLELCRKALARQRARDLSETASALLAKDKQIAALQRECRELQARLTLVGKEGPQWLHVRDFDRLLRESQREVLRLQRQIALRNQRETLPLPPSWPPGPALQARAGAPAPGAPGEATPQEDADNLPVILGEPEKEQRVQQLESELSKKRKKCESLEQEARKKQRRCEELELQLRQAQNENARLVEENSRLSGRATEKEQVEWENAELRGQLLGVTQERDSALRKSQGLQSKLESLEQVLKHMREVAQRRQQLEVEHEQARLSLREKQEEVRRLQQAQAEAQREHEGAVQLLESTLDSMQARVRELEEQCRSQTEQFSLLAQELQAFRLHPGPLDLLTSALDCGSLGDCPPPPCCCSIPQPCRGSGPKDLDLPPGSPGRCTPKSSEPAPATLTGVPRRTAKKAESLSNSSHSESIHNSPKSCPTPEVDTASEVEELEADSVSLLPAAPEGSRGGARIQVFLARYSYNPFEGPNENPEAELPLTAGEYIYIYGNMDEDGFFEGELMDGRRGLVPSNFVERVSDDDLLTSLPPELADLSHSSGPELSFLSVGGGGSSSGGQSSVGRSQPRPEEEDAGDELSLSPSPEGLGEPPAVPYPRRLVVLKQLAHSVVLAWEPPPEQVELHGFHICVNGELRQALGPGAPPKAVLENLDLWAGPLHISVQALTSRGSSDPLRCCLAVGARAGVVPSQLRVHRLTATSAEITWVPGNSNLAHAIYLNGEECPPASPSTYWATFCHLRPGTPYQAQVEAQLPPQGPWEPGWERLEQRAATLQFTTLPAGPPDAPLDVQIEPGPSPGILIISWLPVTIDAAGTSNGVRVTGYAIYADGQKIMEVASPTAGSVLVELSQLQLLQVCREVVVRTMSPHGESADSIPAPITPALAPASLPARVSCPSPHPSPEARAPLASASPGPGDPSSPLQHPAPLGTQEPPGAPPASPSREMAKGSHEDPPAPCSQEEAGAAVLGTSEERTASTSTLGEKDPGPAAPSLAKQEAEWTAGEACPASSSTQGARAQQAPNTEMCQGGDPGSGLRPRAEKEDTAELGVHLVNSLVDHGRNSDLSDIQEEEEEEEEEEEEELGSRTCSFQKQVAGNSIRENGAKSQPDPFCETDSDEEILEQILELPLQQFCSKKLFSIPEEEEEEEEDEEEEKSGAGCSSRDPGPPEPALLGLGCDSGQPRRPGQCPLSPESSRAGDCLEDMPGLVGGSSRRRGGGSPEKPPSRRRPPDPREHCSRLLSNNGPQASGRLGPTRERGGLPVIEGPRTGLEASGRGRLGPSRRCSRGRALEPGLASCLSPKCLEISIEYDSEDEQEAGSGGISITSSCYPGDGEAWGTATVGRPRGPPKANSGPKPYPRLPAWEKGEPERRGRSATGRAKEPLSRATETGEARGQDGSGRRGPQKRGVRVLRPSTAELVPARSPSETLAYQHLPVRIFVALFDYDPVSMSPNPDAGEEELPFREGQILKVFGDKDADGFYQGEGGGRTGYIPCNMVAEVAVDSPAGRQQLLQRGYLSPDILLEGSGNGPFVYSTAHTTGPPPKPRRSKKAESEGPAQPCPGPPKLVPSADLKAPHSMVAAFDYNPQESSPNMDVEAELPFRAGDVITVFGGMDDDGFYYGELNGQRGLVPSNFLEGPGPEAGGLDREPRTPQAESQRTRRRRVQC

SEQ ID NO: 149248 - DNA, 7706 bp, Artificial Sequence
  derived and/or modified sequence
ctgaggctcagccctcctcggagcccaccatctcgaggctcctggactgtaagggacccctgcagtccccagagcagaggccagcaggggctgagactatgaggcaagcagcccatcgacccaggcctccttaggaccagcccagccacccagcaagcgaaagagcagcagcagagagcagagccggagataaaggaccacagcggaccactggggatcacccccagcagctcctgaagcctctggccgggctgaggggttgcgacagacggccagacccacagacactgacagacacacaacgacaccgatgcacacagctgcacgacactgacacactcagatacaaccagggacagcatcacatactgccacagccctgcaatacagacacccacacacacacacacaaacaactggcaactctgaaatgggcagacagtgacacacagcaccacccccctcaacacacagaagtgggggcacccatcttcccaacacatgagacagcattgacctgcacggacagacctggagacacacacacgcaccctcacccaggcgcagctgtcggtggcctctgcacatcctccctacccccacagggacaccctcgctcctccacatactcgcgcacacacacagctaccagcaaacatagctcacatacccctggctccagctccagcagccctggcgccttctgcagcctcctttgtgggtggggaagagctcagccaaccttggatggagcgtcggtgaagcaagagctcagaggggagaggggctggcctggcatgaccctcgccagtccccccacctggctgggtgatgtcccccggcccgggttctggggccccttggcagtaccatggagcaactgacaaccctcccacggcctggggaccctggagccatggagccatgggcactgcccacctggcatagctggactccaggtcgagggggtgaacctagcagtgcagccccaagcatcgctgatactcctccggcagctctgcagcttcaagaactgaggtctgaggagagttccaagcccaaaggagacgggagctccaggcccgtggggggaactgaccctgaaggagcagaggcttgtctgcccagcctgggccagcaagcatccagctctggacccgcctgccagaggccagaggatgaggaagtggaggctttcctgaaggccaagctgaatatgagctttggggacaggcccaatctggagctgctgagggccctgggggagctgcggcagcgctgtgccatccttaaggaggaaaaccagatgctgaggaagagcagcttccctgagacagaagagaaggtgcggaggctgaagaggaagaacgccgagctggcggtcattgccaagcgcctggaggagagggcccgaaagctgcaggaaacgaacctgagggtggtgagtgcccccttgccccggccggggaccagcttggagttgtgtcggaaggccctagcccgccagcgagcccgggacctcagtgagacagccagtgcactgctggccaaggacaagcagattgctgccttgcagcgggagtgcagggagctgcaggccaggctcactctggtgggcaaggagggtccccagtggctccacgtgcgggacttcgatcggctgctgcgcgagtcccagcgggaggtgctgcggctgcagaggcagatcgcgctgcgcaaccagcgggagacgctcccgctcccgccgtcctggcccccgggccctgctctccaggccagagcaggggcgcctgctcccggggccccgggagaggccacgccccaggaggatgcggacaacctacccgtgattctaggggagccagagaaagagcagagggtgcagcagctggaatcggagctcagcaagaagcggaagaaatgcgagagcctggagcaggaagcccggaaaaagcagaggcgatgtgaggagctggaactgcagctgagacaagcgcagaatgagaatgcccgcctggtggaggagaactcccggctcagtgggagagccacagagaaggagcaggtggagtgggagaatgcggagctgaggggccagctcctgggggtgacacaggagagggactcagcccttcgcaagagccagggcctgcagagcaagctggagagcctggagcaagtgctgaagcacatgcgggaggtggcccagcggcggcagcagctggaggtggagcatgaacaggctcggctcagcctacgggagaagcaggaggaggtccggagactgcagcaggcccaggctgaagcccagagggaacatgaaggagccgtgcagctgctggagtctaccttggattccatgcaggcccgggttcgagagctcgaagaacagtgccgcagccaaaccgagcagttcagcctcctggcacaggaactccaggctttccgcctgcacccgggccccttggatctgctcacatctgccctggactgtgggagccttggagactgcccaccacccccctgctgctgctccattccccagccttgccgggggtctggccccaaagaccttgacctcccgccgggctcccctgggcgctgcaccccaaagtcttccgagcctgcccctgccactctcactggggtccctcgaaggacagccaagaaggcagagtctctctccaactcctcccactccgagtccatccacaacagccccaagtcatgccctacacctgaggtggacacagccagtgaggtagaggagctggaggcagacagtgtctccctgctcccagctgcgccagagggcagccggggaggagccaggatccaggtcttcctagcacgttatagctacaacccctttgagggtcccaatgagaatccagaagcagagcttccgctgacagctggcgagtacatctacatctatggcaacatggatgaggatggcttttttgaaggagagctcatggatggccgaaggggcctggtcccttccaattttgtagagcgtgtgtcggatgatgacctcctgacctccctccctccagagctggccgatttgtcccacagctcaggccctgaactcagtttcctgagtgtaggtgggggtggcagcagtagcgggggccaaagcagtgtgggaaggagccagcccagacctgaggaggaggatgcaggggacgagctcagtctgagcccatcaccggagggcctgggcgagcctcctgccgtgccttacccccgccgtctggtggtcctcaagcagctggcccacagcgtggtgctggcctgggagccgcctcctgagcaagtggagctacacggcttccatatctgtgtgaatggggagctgcgacaggccctggggcctggggcgccacccaaggccgtgctggagaacctggacctgtgggccgggccccttcacatttctgtccaggccctgactagccggggcagctctgacccactgcgctgttgcttggcggtgggtgcccgggccggagtggtgcccagccagctgcgggtccatcggttgacagccacatctgctgagatcacctgggtgcccggcaatagcaacttggcccatgccatctacctcaatggggaagagtgcccacctgccagccccagtacctactgggccaccttctgccacttacggcctggcacaccctatcaggcccaagtggaggctcagctcccaccccaagggccctgggaaccaggctgggagaggctggagcagcgggctgccaccctgcagttcaccacactcccagcaggcccacctgatgcccctctggatgtgcagatcgagcctgggccctcccctgggatcttgatcatcagttggctcccagtcaccatcgatgctgctggcacatccaacggtgtccgggtcacaggctatgccatctacgctgatgggcagaagatcatggaggtggcctcacccacggcaggcagtgtactggtggagttgtcccagctgcagctgctgcaggtgtgtcgtgaggtggtcgtgcgcaccatgtcgccccacggggagtcggcggactccatcccggctcctatcactcccgccctggctccggccagcctgccagcccgagtctcctgcccctcaccgcacccaagcccagaggccagagcgccccttgcttcagcctccccagggcctggagaccccagctctcctctccagcaccctgctccccttggaactcaagagcctccaggagcaccccctgcaagcccttccagagagatggcaaaagggtcccacgaggaccctccagcaccttgctcccaggaggaggctggggcagcagtgctgggcacctcagaggagaggacagccagcacatctaccctgggtgagaaggaccctggccccgcagctccctcactggccaagcaggaggccgagtggactgcaggagaggcctgtccggcctccagctccacccagggagcacgggcccagcaggcgccaaataccgagatgtgccaaggaggagacccagggtctgggctgaggcccagggctgagaaggaggacacagcagagcttggggttcatctggtgaactccctcgtggaccacggccgcaactcagacctgtcagacatccaggaggaagaggaagaggaggaggaggaggaggaagaggagctgggttccaggacttgctccttccagaagcaggttgctggcaacagcatcagggagaatggggccaagtcccagcccgaccccttttgtgagactgacagcgatgaggagatcttggagcagatcctggagctgcccctccagcagttctgtagcaagaagctctttagcatcccggaggaggaggaagaggaagaggaggacgaggaggaggagaagtcaggggcaggctgttcttcccgagaccctggcccgcctgaacctgcattgctggggctgggctgtgacagtggtcagccccgaagacctggccagtgtcccttgtctcctgagtcctccagggctggagactgcctggaagacatgcctggattagttggtggaagcagccggaggagaggagggggctcccctgagaagcccccaagccgcaggcggcctccagatccccgagaacactgcagccgacttctcagcaacaatgggccccaggcctctggacgactgggccccacacgggagaggggtggcctccccgtaattgagggccccaggactggactagaggctagcgggagaggccggctgggcccttcccggaggtgctcccgtggccgggcgctggagcctggcctggccagctgcctttcccccaagtgcttggaaatcagcattgaatatgattcggaggatgagcaggaggcgggcagcgggggcatcagcatcaccagctcctgctaccctggagatggggaggcctggggcacagcaactgtaggaaggcccagggggcctccgaaggccaattcaggccccaagccctacccacgcctcccagcctgggagaaaggggaaccagagcggagaggccgcagtgcgacgggcagagccaaggagccactctcccgggcaacagagaccggagaggccagagggcaggacggctctgggcggaggggcccccagaagagaggtgtccgagtcctcaggccaagcactgcagagctagtccctgcgaggagcccctcagaaacactggcttaccagcacctacccgtcaggatctttgtggctctgtttgactatgaccccgtgtcaatgtcgcccaatcctgatgctggagaagaagagcttcccttccgagagggtcagatcctgaaggtgtttggggacaaggatgccgatggcttctaccagggcgaaggtgggggccggacaggctacattccctgcaacatggtggctgaggtggctgtggacagccctgctgggagacagcaactgctccagcggggttatttgtccccagatattctccttgagggctcagggaatggtccgtttgtgtactccacagcccacacaactgggcctcctcccaagccccgccgctccaagaaagctgagtcggaaggccctgcccagccctgtccaggcccccctaagctggtcccctctgctgacctgaaagctccccactccatggtggctgcatttgactacaacccccaggagagttcccccaatatggacgtggaggcagagctgcccttccgggcaggggatgtcattactgtgtttgggggcatggacgatgacggtttctactatggggaattaaatggacaaaggggcctggttccatccaacttcctggagggccctgggcctgaggcaggcggcctggacagggaacccaggacaccccaggctgagagtcagagaacgaggaggagaagagtccagtgctagatggagatagatatatgtagagagagcaacatgactggggctgcaccacacaagggtccccagggcccccaggtgggccttgtacccccagctctggcagcgcccccaggattgaacgtggggagccccagggcagaagcgagaaggtgtggggtttcttctccaaggggaagcagctcctcaggaggctgggctctgggaagaaggagtgaagctgtggcccatcctgcaggcagaagaggccctgagaggcccccagatcactgtctctgctgagcagggaaggctcagactgggcccagagcccccgttcttctgcgttaacactgtggcattcagagggaatcaaagagccttggtgaaggtcagagctaaatggctccttaaggatgaactctctagagaagcaccttcctcctacaggaggggaaactgagcccacagtgagtatgtaacttgaccaaggtcactgagccaggactggacccaggaccctcgcgtcctggtccacccacctcgtctactagtgtcccacagtgctgcgctagtcccttctgccacccttcccagtcccaggacgggccctggagggagaaaggagcctgtgccccctgatggctctggctgtcctgatcctgtcttccctcccctgaaggaaagtttgcactggattttattggagccccatctccccagcgggcaggcgggcggagcctgtatatatgtatatactcagtgcctcagttcagcttcctccacctcgcttccactgcacaggcccaggaaggagaaaggccaagccaaagtgggccccaccctgcccccgtcgtgctccatccttccctgccggggcctgctggcccctgtaaggtcccgcccccaaagaccctggggccagcggggccgaaagcggagttgggtttgccttattttgctcattggattcaagttcttttgcatagttttcttctaacccctgttggagtccaggggctggagaaaaggacagatttatgcagctattttcatacattccctgttcagagtggggtaggggttctccgccgttacccgatccactccatcccccaccctctgaggggtgagtgtgtctttgcatgtttcctttgctgtggtgggagatagtttgactgaacccccaccttgaccttggtctccaggggtgtggaatggtgggggaatttgtttaaaaagacattttattataataaagtctattttcacaaaaaaaaaaaaaaaa

SEQ ID NO: 149249 - DNA, 5574 bp, Artificial Sequence
  derived and/or modified sequence
atggagcaacttaccaccctcccgcgaccgggcgacccaggcgcgatggaaccgtgggccctcccgacgtggcattcctggactcctggcagggggggcgaacctagttctgccgcccctagtatcgccgatacccctcctgcggctcttcaattgcaggaactgcgaagcgaggagagctcaaagcccaaaggcgatggctcatctaggcccgtgggcggtacggatccagagggcgcggaggcatgtctgcccagtctggggcagcaagctagtagtagcgggcccgcctgtcaaaggcccgaggacgaagaagtcgaggcttttttgaaggctaaactgaatatgtcttttggtgatcggcctaacctagagcttttgcgagcgctcggtgaactgagacagaggtgtgctattttaaaggaagaaaatcaaatgctgcgcaagtccagctttccagagacggaggaaaaagtccgccgtctgaagagaaaaaatgctgagcttgccgtgatagccaagcgactcgaagagcgagctcggaagctgcaggagactaatttaagagtcgtttccgctcccctgcctcgaccgggaaccagcctagaactgtgtagaaaagcgctcgcgagacaaagagctcgtgacctgtcggagaccgcttccgccctgctcgctaaggataagcagatcgcagctctccagagggagtgtcgcgaactccaggcccgcttgacactggttgggaaggaaggaccacaatggctacacgtgagagactttgataggctcctgcgtgaatcacagcgggaagtgctcaggttacagcggcagatagctctccggaaccaaagagagactctcccactccccccatcctggccgcctggccccgctctgcaggccagggcaggcgctcccgctccaggggctcctggagaggccaccccccaggaggacgctgataatctgcccgtcatcctcggggagccggagaaagaacaaagagtccagcagctggagtcggagctgagtaagaaaaggaagaagtgtgagtccttggaacaggaggccagaaaaaagcagcggagatgtgaagagcttgagctacagctgagacaggctcagaacgaaaacgccagactagttgaggaaaactcgaggctctcggggcgggctacagaaaaggagcaggtggagtgggagaacgcggagctgagaggccagctcctgggtgtgactcaggagcgtgattcagctctcagaaagtctcaaggtctgcagtccaagctggaatctctcgagcaagttttgaagcatatgcgtgaagtcgcccaacggcgtcagcagctcgaagtcgaacacgagcaggccagactcagtttgcgcgagaagcaggaagaggtgagacgccttcagcaagcacaggctgaggcacagcgtgagcacgagggggcggtgcagctgctcgagagcacgctggacagcatgcaagctcgggttcgcgaactcgaggagcagtgccggtctcagactgagcagttcagcctgctcgcacaggagttgcaggcatttaggttgcatcccgggcccctcgatcttctcactagcgcattggattgcggcagcctcggggactgcccaccgccaccatgctgctgtagcatccctcaaccctgcaggggcagcggcccaaaggatcttgatcttccgcccggtagtccgggacgatgcacgccaaagagctccgagccggcgccagccacgctgacaggggtgcctagacgaaccgccaagaaagccgagtcactttccaacagcagccatagcgaatctattcataactctcctaaaagttgtcctacccctgaggttgacactgcaagtgaggtagaagagctcgaagctgacagcgtctcactcctgcctgctgctcctgaagggtcccggggaggagcaaggatccaggttttcctggctcggtatagctacaatccattcgagggacccaacgaaaatccagaggctgagctgcctctcactgcaggagagtatatctacatttacggaaacatggacgaagatgggtttttcgagggtgaactcatggacggcagaagagggcttgttccaagcaattttgtagaaagggtctctgacgatgacctgctcacaagtttgcctccagaactggcagacttgtcccacagcagcggccctgagctgagcttcctgtcagtggggggtggtggctcctcttctggcggccagtctagtgtcggccggtctcagcctagacccgaggaggaggatgccggagatgaattaagtctgtcaccaagccccgaaggccttggggagccccccgcagtgccctatccgcgtcgtctcgtggtgctcaagcaactggcccacagtgtagtgctggcatgggaaccaccacccgagcaggtggagctccacggcttccatatctgcgttaacggtgaactccggcaagcattgggccccggagcacctccaaaggccgtcttggagaacttggacctgtgggcgggtcccttgcacatctctgtgcaggctctcacctcacgaggctcctctgatcccttgcgctgctgcttggccgtcggtgctcgagccggagttgtccccagtcaactgcgcgtgcatcggttgacggccacctccgcagagatcacgtgggtccccgggaacagtaacttagcccacgcaatctatctgaatggcgaggagtgtccgcccgcctcaccctccacatattgggccactttttgccatctgaggcccggcacgccgtatcaggctcaggtcgaggcacaactgcctcctcaggggccatgggaaccggggtgggagcggctggaacagcgcgcggcgaccctccagttcaccaccctcccagctggcccacccgacgctcctctagatgtgcagatcgaacccggaccttccccaggcatacttattatctcctggctgcctgtcaccattgacgcggcaggaacttccaacggcgtgagggtgactgggtacgccatttatgccgatggtcagaaaatcatggaagtggcatcccccactgccggctccgtgctggtggagctatcacagctccagctgctgcaagtatgtcgcgaagtcgtagtgaggacaatgagtccgcatggcgaaagcgccgactccatcccagcccctattactcctgccctggctccagccagcctgccagcgcgagtgagctgcccgtccccccaccccagtcccgaggctagagcacccctggcatccgcttctcctggacctggggatcccagctcccccttacagcatcccgcacctcttggcactcaggagccccctggcgcccctccagcgagtcccagtagagagatggcgaaggggagtcacgaggatcccccagcgccctgctcacaggaggaagctggcgccgcagtgctgggcacctccgaggaacgcaccgcaagcacctccaccttgggcgagaaggatccaggtcccgctgcaccctctctggcaaagcaggaggccgagtggaccgctggagaggcctgccccgccagcagtagtacacagggcgcacgtgcccagcaggcccctaataccgagatgtgtcaaggtggggacccaggtagcggactgcggcctcgggctgagaaggaagatactgccgagttgggcgtgcacctagtgaactccttagtggaccacggcaggaactctgacctcagtgacattcaagaggaggaggaggaagaggaggaagaggaggaggaagagctaggctcccgaacatgcagcttccagaagcaagtcgcgggcaattcaatccgagaaaatggagccaaatcccaaccggaccccttctgtgagaccgattctgatgaggagattctggaacagatccttgagctgcctctacagcagttctgttccaagaagctgttctccatacctgaagaagaagaggaggaagaggaggacgaggaggaagagaagagcggagctggatgttcctcccgggacccaggcccaccagaacctgcactgttgggcctcggctgtgactccgggcagcctcggagaccaggccagtgccctctgtctccggagagcagtcgcgctggcgactgcttggaagatatgccgggactggtcggcggctcctccagacgacgcggtggtggctcgcctgagaagcccccgtctcgacgcaggccacccgatcctagggagcactgcagccgattactctctaataacggtccccaggcatcaggacgcctgggtccaaccagagagcgcggcggactccccgtgatagagggacctcggactggcctggaagcctccggcaggggacgccttggaccttctaggagatgttctagaggaagggctttggagcccggcctcgcgtcctgtctgtcaccgaagtgcctcgaaatttcaatagaatacgattcagaggacgagcaagaggcgggatctggcggaatcagcattacgagtagctgttacccaggggatggcgaggcatgggggaccgcgacggttggcaggcctcgtggaccaccgaaggctaactctggccctaagccgtaccctaggttgccagcctgggaaaagggtgaacctgagaggaggggccggagcgccaccggtagggccaaggaacccctgagcagggcgactgaaaccggagaggccagagggcaggacggaagtgggcgtagaggtccgcagaagcggggagtgcgcgttctgcgaccaagcaccgccgaattagttccagccaggagtccaagcgaaacactggcttaccagcacttgccagtgaggattttcgtggcactgtttgactacgaccctgtgtccatgtcccctaatccagatgctggcgaagaagagttgcccttcagggaaggacagatcctaaaagtcttcggggataaagatgccgatggcttctatcaaggagagggaggaggtagaaccgggtatatcccatgtaacatggttgcagaggtagccgtagactctcctgctggacgtcagcagctactccaaaggggatacctgagcccggacattctgctcgaaggttctggaaacggaccctttgtatactctacggcacataccacaggcccacctcccaagccccggcggagcaaaaaggccgaaagcgaagggccagctcagccctgcccaggtcctccaaaactggttccatccgccgacctgaaggctccgcacagtatggtggctgccttcgactacaatccccaagaaagctctcctaatatggacgtggaagccgaattacctttccgggccggggacgttatcactgtattcgggggaatggacgatgacggcttctactacggggagcttaatggccagcgggggcttgtgccgagcaacttcttagagggtccagggcctgaagctggcgggttagaccgggaacccaggactccccaggctgagtcacagaggacacggcgccggcgcgtccaatgttag

SEQ ID NO: 149250 - DNA, 5574 bp, Artificial Sequence
  derived and/or modified sequence
atggagcagctgaccaccctgcccaggcctggggaccccggggccatggagccctgggccctgcccacctggcacagctggaccccaggccggggcggggagcccagcagcgctgcccccagcattgctgacaccccacctgctgccctgcagctgcaggagctgcggtctgaggagagcagcaagcccaagggagatggcagcagcaggcctgtgggcggcacagatcctgagggcgctgaggcctgcctgcccagcctgggccagcaggccagcagcagcggccctgcctgccagaggccagaagatgaggaggtggaggccttcctgaaggccaagctgaacatgagctttggagaccggcccaacctggagctgctgcgggccctgggggagctgcggcagagatgtgccatcctgaaggaggagaaccagatgctgaggaagagcagcttccctgagacagaggagaaggtgcggcggctgaagaggaagaatgctgagctggccgtcatcgccaagaggctggaggagcgggccaggaagctgcaggagaccaacctgcgggtggtgtctgcccccctgccccggcccggcaccagcctggagctgtgcaggaaggccctggcccggcagagggcccgggacctgtctgaaacagccagcgccctgctggccaaggacaagcagattgctgccctgcagagagaatgtcgggagctgcaggcccggctgaccctggtgggcaaggagggcccccagtggctgcacgtgcgggactttgaccggctgctgcgggagagccagcgggaggtgctgcggctgcagaggcagatcgccctgaggaaccagcgggagaccctgcccctgcccccatcctggcccccaggccctgccctgcaggcccgggccggggccccagcccctggggcccctggagaggccaccccccaggaggatgctgacaacctgcctgtgatcctgggggagcctgagaaggagcagagggtgcagcagctggagagcgagctgagcaagaagaggaagaagtgtgagagcctggagcaggaggccaggaagaagcagaggcgctgtgaggagctggagctgcagctgcggcaggcccagaatgaaaatgcccggctggtggaggagaacagccggctgagcggccgggccacagagaaggagcaggtggagtgggagaatgctgagctgcggggccagctgctgggcgtgacccaggagcgggacagcgccctgaggaagagccagggcctgcagagcaagctggagagcctggagcaggtgctgaagcacatgagggaggtggcccagaggcggcagcagctggaggtggagcacgagcaggcccggctgagcctgcgggagaagcaggaggaggtgcggcggctgcagcaggcccaggccgaggcccagcgggagcatgaaggagctgtgcagctgctggagagcaccctggacagcatgcaggcccgggtgcgggagctggaggagcagtgccgcagccagacagagcagttcagcctgctggcccaggagctgcaggccttccggctgcaccctggccccctggacctgctgaccagcgccctggactgtggcagcctgggggactgccccccaccaccctgctgctgcagcatcccccagccctgccggggcagcggccccaaggacctggacctgcccccaggcagccctggccgctgcacccccaagagcagcgagcccgccccagccaccctgactggagtgcccaggagaacagccaagaaggccgagagcctgagcaacagcagccacagcgagagcatccacaacagccccaagagctgccccaccccagaggtggacacagccagcgaggtggaggagctggaggccgacagcgtgtccctgctgcctgctgcccctgagggcagcagaggaggagcccgcatccaggtgttcctggcccgctacagctacaacccctttgagggccccaatgaaaatcctgaggccgagctgcccctgacagctggggagtacatctacatctacggcaacatggatgaagatggcttctttgaaggagagctgatggatggccggcggggcctggtgcccagcaactttgtggagcgggtgtctgatgatgacctgctgaccagcctgcccccagagctggccgacctgagccacagcagcggccctgagctgtccttcctgtctgtgggcggcggcggcagcagcagcggcggccagagctctgtgggccgcagccagcccaggcctgaggaggaggatgctggagatgagctgagcctgagccccagccctgagggcctgggggagcccccagctgtgccctacccccggcggctggtggtgctgaagcagctggcccacagcgtggtgctggcctgggagcccccacctgagcaggtggagctgcacggcttccacatctgtgtgaatggagagctgcggcaggccctgggccctggggccccacccaaggctgtgctggagaacctggacctgtgggccggccccctgcacatctctgtgcaggccctgaccagccggggcagcagtgaccccctgcgctgctgcctggccgtgggcgcccgggccggcgtggtgcccagccagctgcgggtgcaccggctgacagccaccagcgctgagatcacctgggtgcccggcaacagcaacctggcccacgccatctacctgaatggagaagaatgtcctccagccagccccagcacctactgggccaccttctgccacctgcggcccggcaccccctaccaggcccaggtggaggcccagctgcccccccagggcccctgggagcccggctgggagcggctggagcagagagctgccaccctgcagttcaccaccctgcctgctggccccccagatgcccccctggatgtgcagatcgagcccggccccagccctggcatcctgatcatctcctggctgcctgtgaccattgatgctgctggcaccagcaatggagtgcgggtgacaggctacgccatctatgcagatggccagaagatcatggaggtggccagccccacagctggctctgtgctggtggagctgagccagctgcagctgctgcaggtgtgccgggaggtggtggtgaggaccatgagcccccatggagagagcgctgacagcatcccagcccccatcaccccagccctggccccagccagcctgcctgcccgggtgtcctgccccagcccccaccccagccctgaggcccgggcccccctggccagcgccagccctggccctggggaccccagcagccccctgcagcacccagcccccctgggcacccaggagcccccaggggcccccccagccagccccagccgggagatggccaagggcagccatgaagatcctccagccccctgcagccaggaggaggccggggctgctgtgctgggcaccagcgaggagaggacagccagcaccagcaccctgggggagaaggaccccggccctgctgcccccagcctggccaagcaggaggccgagtggacagctggggaggcctgcccagccagcagcagcacccagggcgcccgggcccagcaggcccccaacacagagatgtgccagggcggggaccccggcagcggcctgcggcccagggctgagaaggaggacacagctgagctgggcgtgcacctggtgaacagcctggtggaccatggaagaaacagcgacctgagtgacatccaggaggaggaggaggaggaggaggaggaggaggaggaggagctgggcagcaggacctgcagcttccagaagcaggtggccggcaacagcatcagagaaaatggagccaagagccagcctgaccccttctgtgaaacagacagtgatgaggagatcctggagcagatcctggagctgcccctgcagcagttctgcagcaagaagctgttcagcatccctgaggaggaggaggaggaggaggaggatgaggaggaggagaagagcggggccggctgcagcagccgggaccccggccccccagagcccgccctgctgggcctgggctgtgacagcggccagcccaggaggcctggccagtgccccctgagccctgagagcagcagagctggggactgcctggaggacatgcctggcctggtgggcggcagcagcagaagaagaggaggcggcagccctgagaagccacccagcagaagaagacctccagacccccgggagcactgcagccggctgctgagcaacaacggcccccaggccagcggccgcctgggccccacccgggagcggggcggcctgcctgtgattgagggccccaggacaggcctggaggccagcggccggggccgcctgggccccagccgccgctgcagccggggccgggccctggagcccggcctggccagctgcctgagccccaagtgcctggagatcagcattgaatatgattctgaagatgagcaggaggccggcagcggcggcatcagcatcaccagcagctgctacccaggagatggagaggcctggggcacagccaccgtgggccggccccggggcccccccaaggccaacagcggccccaagccctacccccggctgcctgcctgggagaagggggagcctgagcggcggggccgcagcgccaccggccgggccaaggagcccctgagccgggccacagaaacaggagaggcccggggccaggacggcagcggccggcggggcccccagaagaggggcgtgcgggtgctgcggcccagcacagctgagctggtgcctgcccggagccccagcgagaccctggcctaccagcacctgcctgtgcgcatctttgtggccctgtttgattatgaccctgtgtccatgagccccaacccagatgctggggaggaggagctgcccttccgggagggccagatcctgaaggtgtttggagacaaggatgctgatggcttctaccagggcgagggcggcggccgcacaggctacatcccctgcaacatggtggccgaggtggccgtggacagccctgctggccggcagcagctgctgcagaggggctacctgagcccagacatcctgctggagggcagcggaaatggcccctttgtgtacagcacagcccacaccaccggccccccacccaagcccaggaggagcaagaaggccgagagcgagggccctgcccagccctgccccggcccccccaagctggtgcccagcgctgacctgaaggccccccacagcatggtggccgcctttgactacaacccccaggagagcagccccaacatggatgtggaggccgagctgcccttccgggctggagatgtgatcaccgtgtttggaggcatggatgatgatggcttctactatggagagctgaatggccagaggggcctggtgcccagcaacttcctggagggccctggccctgaggccggcggcctggaccgggagcccaggaccccccaggccgagagccagaggaccaggagaagaagagtgcagtgctag

SEQ ID NO: 149251 - DNA, 5574 bp, Artificial Sequence
  derived and/or modified sequence
atggagcagctgaccaccctgccccggcccggcgaccccggcgccatggagccctgggccctgccaacctggcacagttggactcccggccgaggtggggagccatctagcgcagccccgagtatcgcggatacccctcccgcggcattacagcttcaggagctaagatcggaggagagttctaagccgaagggagatggtagctctcgcccagtgggcgggacagacccggagggcgccgaggcttgcctgccctccctgggacagcaagcttcgtcctcaggacccgcctgccagaggcctgaagacgaagaagtggaggcctttctgaaggcaaagctgaacatgagcttcggggatagacccaacctcgagcttcttcgggccttgggcgagctgcgccagcgctgcgctatcctgaaagaggaaaatcaaatgttgcggaaatcgtctttccctgaaaccgaagagaaggttagaagactcaaacgcaagaacgcggagctcgctgttatcgcgaagcggctcgaagaaagggcacgcaagctgcaagaaactaaccttcgggtagtcagcgcacccctgcctaggcccggaacctctcttgaactgtgcaggaaagccttggccaggcagagggcccgggatctttccgagaccgcatctgcattactcgccaaagataagcagatcgccgctttacagcgagagtgccgcgagctccaggcacggctaacccttgttggcaaagagggccctcagtggctgcacgtgagagacttcgacagattactcagggaatcacaacgggaagttctgcgactgcagagacagatagcgctcagaaatcaacgcgaaaccctgcccctgccaccttcatggccccccggccctgcattgcaggcacgtgctggcgcaccggccccaggcgcaccaggggaggctacgcctcaggaagatgctgataacttgcctgttattctcggcgagccagaaaaagagcagcgagtacagcaactagaaagtgagctgtccaaaaagcgaaagaagtgcgagtccctcgagcaggaggctcgcaagaagcaaagacgatgcgaggagcttgagttgcaattgagacaggcacagaatgaaaatgctcgcctcgtcgaggaaaactcgagacttagcggcagggcaacagagaaggagcaggtagagtgggaaaacgccgagctcaggggacagcttttaggcgttacccaggagagagactcagctctacgtaaatcacagggacttcagtctaaactggaatcattggagcaagtattaaaacatatgagagaagttgcccagaggcggcagcagctggaggtggagcatgagcaagcccggctttccctgcgggagaaacaggaggaagtgagaaggctgcagcaggcccaggccgaagcccaacgagagcacgagggcgccgtgcaactacttgaatcgacccttgatagcatgcaggctagggtgcgtgagctggaggaacagtgcaggtcccagacggaacagtttagcctgctggcacaagaattgcaggcatttagactgcaccctgggcctctagaccttttaacaagcgcgttggattgtggaagtttgggagattgccctccaccaccatgctgttgctccatcccccagccctgcagaggttcaggaccgaaggacttggacctaccccctgggtctcccgggagatgcacacccaagagcagtgagcccgcccccgccaccctgaccggggtaccacgccggactgcaaagaaggctgagtcattgtccaatagtagccactcagagagtatccataactcacccaagtcatgtcccactcctgaggtggataccgcaagcgaagtggaggagctcgaagcagattcagttagccttctccccgcagctccagaaggcagcagagggggagcccgcatccaggtgttcttggctcggtacagctacaatccttttgagggacccaatgaaaatcccgaggcggaactgccactgaccgcaggtgagtacatctacatatatgggaatatggatgaagatggctttttcgagggcgagcttatggacggcaggaggggcctggtgccttccaacttcgtcgagcgggtctctgacgacgacctgcttaccagtctgccgcccgaactagcggatttatcacactcttccggccctgagcttagctttctgtctgtgggaggcggagggtcttcctccgggggtcagagttcagtgggtaggagtcagccccgaccagaagaagaagacgcaggagatgagctctcccttagtcccagccctgaggggctgggtgagccacctgcagttccctatccccggcgtctggtggtgctcaaacagcttgctcacagtgtggtactcgcttgggaacccccgcccgagcaagttgaattacacggcttccacatctgcgtgaacggcgagttgcgccaagcacttggtcccggcgcccctccaaaagccgtgttagagaatctagatctgtgggccgggcccctgcatatctcagttcaggctctaaccagtcggggtagctctgatcctctgaggtgttgcctggccgtaggcgctagagctggcgttgtaccaagccaactgcgtgttcatcgcctaaccgctacaagcgcggaaatcacttgggttcctgggaactctaatcttgcgcatgctatttaccttaatggcgaagaatgccctccggcatcgccttccacctattgggccaccttctgtcatctgaggcccggcaccccataccaggctcaagtggaagcacagctgcctccacagggcccatgggaacccgggtgggaacgattggaacagagggccgccacccttcagttcacaaccctcccagcgggcccacccgacgctccactcgatgtccagatcgagcccggcccctcccctgggattctgatcatttcatggctgccagtaactattgatgccgccggaacgagtaatggcgttcgcgtgaccggatacgccatctacgcagacggacagaagatcatggaggtcgctagccccactgccggatcagtccttgtcgaattaagccagttgcagcttttgcaggtgtgccgggaggtggtggtcagaacaatgtcccctcacggagagtccgccgactctattcctgcacccattacaccggccctcgcccccgcgtctctcccagcgagagtttcttgccccagcccccacccatcaccagaagcccgagctccactcgctagcgcctctccgggccctggtgacccttcatcaccacttcagcacccggccccactaggcacccaggagccgcccggagctccgccagccagtcctagtcgggagatggccaagggtagccatgaggacccacccgccccctgctcccaggaggaagcgggcgctgccgtactgggcacaagcgaggagaggactgcaagcacttccactctcggtgagaaggaccctggacctgccgccccttcactggcaaagcaggaggccgagtggacagccggtgaggcctgtccggccagctcctccacccagggagctcgagctcagcaggctccaaatacagaaatgtgccagggcggagacccagggagtgggttgagacctcgcgcagaaaaggaagacaccgctgagctgggggtgcatcttgtcaatagtctggtggatcatgggcggaattccgatctatctgacatccaagaggaggaggaagaagaggaagaggaggaagaggaagaactgggaagccgcacctgttcattccagaagcaagttgctggcaattccattagagaaaacggagccaagagccagccggacccattctgcgaaaccgatagcgatgaggaaatacttgaacagattctggagctgcccttgcagcaattttgctccaagaagttgtttagtattcccgaggaagaggaagaggaagaggaggatgaagaggaagagaaaagtggcgctggatgttcttcccgtgacccgggcccacccgaaccagcactgctgggcctcggctgcgactcagggcagccacggagaccaggacaatgtcctttaagccctgagtcgagccgcgccggcgactgccttgaagatatgccaggactggtcggcgggtcttctcggaggcggggaggcggtagtccagagaagcccccaagcagaaggcgcccacctgatcccagggaacactgctccaggcttctatcgaacaatggaccccaagcttcgggccgacttgggccgacccgggagcgcggtggcctgcccgttatcgagggcccccggacggggctggaggcatcgggccgtgggcggctgggccccagtaggaggtgctcccggggccgggcccttgaacccgggctggcaagttgcctgagccccaaatgcctcgagatcagcatcgaatatgactccgaggatgagcaggaggcgggttccggcggcatcagcatcacaagttcttgttatcccggtgatggtgaggcttggggcactgcgacagtcgggcggcccaggggtcctcctaaagctaattccggacctaagccctatccacgacttcctgcttgggagaagggcgaaccagagaggcgcggacggtcagccacaggccgtgccaaggaacccctatcccgcgctaccgaaactggtgaggccaggggacaagacggctcaggccggagaggcccgcagaagcggggcgtccgagtgttgaggccttctaccgctgagctggtacctgcgcgatccccatccgaaacgctcgcttatcagcatctccctgtgcggatctttgtggcactgtttgactatgatcccgtgagcatgagcccaaacccggatgccggcgaggaggagctgccctttcgtgaagggcagattttaaaggtcttcggggataaagatgcagatggtttttatcaaggagagggcggcggccgaaccgggtatattccatgtaacatggttgcagaggtcgcggtggattcccccgccggccgacagcagcttctccagagggggtatctgtcacccgatatactcttggaaggcagtgggaatggccccttcgtgtattccacagcacatacaactggccccccacccaagccaagacggagcaagaaggctgagagtgagggccccgcacagccctgccccgggccacctaagctggtacccagtgccgatctaaaagccccacatagcatggtggcagcattcgattataacccacaggaatcgtctccaaacatggatgtggaagctgaactaccttttcgagcaggagatgtcatcacagtattcgggggtatggatgatgatggtttttattatggtgaactcaacggtcagcggggcctcgtgccaagcaactttctcgagggccccggtcctgaggctgggggattagatcgcgaacccaggaccccccaggccgagtctcagcgcactaggcgccgtagggtgcagtgctag

SEQ ID NO: 149252 - DNA, 5573 bp, Artificial Sequence
  derived and/or modified sequence
atggagcagctgacaaccctgcctcgaccaggcgaccctggagccatggaaccttgggctctgcccacttggcacagttggacacctggcaggggaggcgagcctagttccgctgcgccatcgatcgctgatacaccacccgctgccttgcaacttcaggagctgagatccgaagaaagcagtaagcccaagggggatggctctagccggcctgtcggtggcaccgatcccgaaggagccgaagcgtgcttgcctagtttgggacagcaagctagtagctccggccctgcctgccagcgcccagaagatgaagaggtggaagctttcctgaaagcaaagctgaacatgtcgttcggcgacaggcccaacctcgagctgcttcgtgcccttggggagctgcgtcaacgttgtgccatcctgaaagaagagaatcagatgctcagaaaatcatcctttcccgagaccgaagaaaaagtgaggcggctgaaaaggaagaacgcagagctggcggtcatagcaaaaagactggaggagagagctcgtaagttgcaggaaacaaacctgcgtgtggtctcagcccctctgcccaggcccggtacatctctggaactttgtcgtaaggcactcgctaggcagcgggcacgcgacttaagcgagactgcttccgctctgctagcgaaagacaaacagattgctgcactgcagcgcgaatgcagggagcttcaggctcgactcacactggttggaaaggaaggccctcagtggctgcatgtccgcgattttgatagactcctacgggaaagtcagcgggaggttttacgactgcagcgccagatcgcgctgcggaatcagagagaaaccctccccctgccaccatcttggccgcctgggcctgcactccaggcaagagctggagcccctgctccaggggcacctggtgaggctacaccccaggaagacgcagacaacttaccagtaattctgggcgagcccgaaaaggagcagcgcgtgcagcaactggagtcggaactgagcaaaaaacggaaaaaatgtgaatcattggagcaggaggctagaaagaagcaaaggcgttgcgaagagctggagctgcagcttagacaggctcaaaacgagaatgccaggctagtcgaggaaaattccaggctaagtgggcgagctaccgagaaggagcaggtcgaatgggaaaacgccgaactgcggggtcagcttctcggcgtgactcaggagagggactccgctctccgcaagagccaaggcctacaatcaaaactcgaaagcttggagcaggtgttaaaacacatgagagaggttgcacaaaggcggcagcaacttgaggtcgaacatgagcaggccagactgtctctgcgagaaaaacaggaagaagtacggcgtctgcagcaggcgcaagccgaggctcagagagagcacgaaggcgctgtgcagctgctggagagcactctcgatagcatgcaggctcgtgtaagggagctggaagaacaatgccgaagccaaactgagcagttttctctgctcgcccaagagttacaggcgtttaggctgcatccaggtcctcttgatctgctgacctccgccctggattgcggttcgttaggggactgcccacctccaccttgctgctgctcaatccctcagccctgtagaggatcaggtcccaaggatctggacctaccacctggaagtccaggtaggtgcacccccaagagcagcgagcccgctccagccacactgactggagttcctaggcgcacagccaaaaaggcagaatccctgagtaatagcagtcattctgagtccatccacaattcaccaaagagctgccctactcccgaggtcgacaccgcctcagaagtcgaggaactggaggccgactccgtaagtttgctaccagccgctcctgaaggcagtcgtggtggagcccgaattcaggtgtttctggccaggtactcctataaccctttcgagggaccgaatgagaaccccgaagctgagttgccgcttacagcaggagaatacatatacatttatgggaacatggacgaggacggcttctttgaaggcgagcttatggatggaagacgcggtctcgttccctctaatttcgtggaacgcgtgagcgatgacgacttgctcaccagtttgccaccagaactagcagacctctctcactctagcggtccagagctgtcctttctttccgtggggggaggcggtagctcgtctggcggacagtcatctgtgggtcgctcccagcccagaccggaggaggaggatgctggtgatgaactaagcctgtcgccatcccctgagggtctgggcgaaccacccgctgttccctatcccagaagactcgtcgtgctgaaacagctggctcactccgtggtcctcgcttgggagcctcctcccgaacaggtggaactgcatggtttccacatctgtgtgaacggcgagctcagacaggcattaggtcccggtgcccctcctaaagcagttctcgaaaatttggatctgtgggcaggacctctacacatctcggtgcaggccctaactagtagaggctccagcgaccctttaagatgttgcctagcggtgggggcacgcgcaggtgtggtgccgagccagctcagagttcacaggctgacagctacttctgctgaaataacctgggtgccaggcaattctaacctcgctcacgcgatttacctgaacggggaagagtgcccaccagcttctccatctacgtattgggccacattctgccacctgcgtcctgggacaccctaccaggcccaagtggaggctcaactgccccctcagggaccgtgggagcccggatgggaacgtctggagcagcgggctgctacccttcagttcactactctccctgcgggaccaccagacgcccctttggatgtgcagattgagcccggaccaagccccggaattctcataattagttggctgcctgtaaccattgatgcagctggcacctctaacggggtgcgagttaccggctatgcaatttatgctgacgggcagaagatcatggaagtcgcgagtcccacggccggatctgtcctggtagaactgagtcagctccagctgctgcaagtgtgcagagaggtcgtggttcggaccatgagcccccacggcgagtcggccgattccatccctgcccctatcacaccagcactggcaccagcttccctgcccgctagggtgagctgtccgagtcctcacccctccccagaggcaagggccccattagcctccgctagtccgggaccaggggacccctcatcacccctgcagcatcccgctcctcttggcacccaggagccccctggggctcccccagcgtctcccagcagagagatggctaagggaagccacgaggatccccctgcaccctgctctcaagaggaggcgggtgccgctgtcctaggaaccagtgaagaacggactgcatctacttcgacacttggggaaaaagacccagggccagcggctccgtctcttgccaagcaggaggcagagtggactgcaggtgaggcttgtcccgcttcctcttctactcagggagcacgggcacaacaggcccctaatacggagatgtgtcaaggtggcgatccagggagtgggcttcgtccaagggctgagaaggaagatactgctgagctcggggtgcatctggtcaacagcctggttgaccacggtcggaattctgatcttagcgatatccaggaggaagaagaagaggaggaagaggaagaggaagaagagctgggttctcgcacctgctctttccagaagcaggtggcaggtaattccatacgcgagaacggtgccaaatcccagccagatccattttgtgagactgacagtgacgaggaaatcctggaacagattctagaactacctcttcagcagttttgctcaaagaagctgttctccatccctgaagaagaggaggaggaagaggaggatgaggaggaagagaagagcggagccggttgcagctctagagacccagggccaccagagcccgcactcctgggcctcggctgcgatagtggccagccaagaaggcccggtcagtgtccactgtcgcctgagtcgtcgagagccggtgattgccttgaggacatgccagggctcgtgggtggctcttctcgcagacggggtggcggaagccctgagaaaccacctagccgcagaagaccaccagatccacgggaacactgctctcggctactgagtaacaatggccctcaagcttccggcaggctcggaccaacacgcgaaagaggcggtctccctgtgatagagggaccgagaactgggctggaagctagcggcaggggcaggcttggccctagccgccgatgcagccgagggagagcgctagagcctgggctcgcttcatgtcttagtccgaagtgccttgaaattagtatcgaatatgattcagaggatgagcaggaggccggtagtggagggatctcaatcacttcatcctgctaccctggcgatggagaagcctggggtactgccaccgtcggtcgacctaggggcccaccaaaagccaacagcggaccaaagccttacccaaggctcccagcctgggaaaagggcgaaccagagaggagaggcagaagcgcaaccgggagagccaaagaacccttatcacgggctacagaaacgggggaagcacgtggccaagacggtagtgggcgacgtggtccccagaagaggggtgtgagagtgcttcgaccgtctacggcagagctcgtaccagctcgcagcccaagcgaaacactggcttaccagcatctgcctgtgcggatcttcgtcgcacttttcgactacgatccagtgtcaatgtcacccaatcctgacgccggagaagaggaacttccattcagagaaggccaaatactgaaagtgttcggagacaaggatgcggacggcttctatcaaggcgaggggggaggtaggactggatacattccttgtaacatggtcgctgaagttgccgttgattctcctgctgggcgacagcagctactgcagcgaggatatttgtcacccgacatcttattagagggaagtggtaatggtccgtttgtttactctaccgcacataccaccggtcctccgccaaaacctaggcgaagcaagaaggcagaaagtgaaggcccagctcagccctgcccgggtcccccaaagctagtccctagcgctgacctgaaggcgcctcattctatggtggcggcattcgactataatccacaagaatccagcccaaacatggacgtggaggcagagctaccttttagagcaggcgacgtgatcacagtgttcgggggaatggacgatgatgggttctactatggggagctgaatggccagagggggctggtcccaagcaattttctggaaggacccggtccagaagccggaggactggaccgggaaccaaggaccccccaggctgagtcacagcggaccaggcgacgccgtgtacagtgcta

SEQ ID NO: 149253 - DNA, 7688 bp, Artificial Sequence
  derived and/or modified sequence
ctgaggctcagccctcctcggagcccaccatctcgaggctcctggactgtaagggacccctgcagtccccagagcagaggccagcaggggctgagactatgaggcaagcagcccatcgacccaggcctccttaggaccagcccagccacccagcaagcgaaagagcagcagcagagagcagagccggagataaaggaccacagcggaccactggggatcacccccagcagctcctgaagcctctggccgggctgaggggttgcgacagacggccagacccacagacactgacagacacacaacgacaccgatgcacacagctgcacgacactgacacactcagatacaaccagggacagcatcacatactgccacagccctgcaatacagacacccacacacacacacacaaacaactggcaactctgaaatgggcagacagtgacacacagcaccacccccctcaacacacagaagtgggggcacccatcttcccaacacatgagacagcattgacctgcacggacagacctggagacacacacacgcaccctcacccaggcgcagctgtcggtggcctctgcacatcctccctacccccacagggacaccctcgctcctccacatactcgcgcacacacacagctaccagcaaacatagctcacatacccctggctccagctccagcagccctggcgccttctgcagcctcctttgtgggtggggaagagctcagccaaccttggatggagcgtcggtgaagcaagagctcagaggggagaggggctggcctggcatgaccctcgccagtccccccacctggctgggtgatgtcccccggcccgggttctggggccccttggcagtaccatggagcaactgacaaccctcccacggcctggggaccctggagccatggagccatgggcactgcccacctggcatagctggactccaggtcgagggggtgaacctagcagtgcagccccaagcatcgctgatactcctccggcagctctgcagcttcaagaactgaggtctgaggagagttccaagcccaaaggagacgggagctccaggcccgtggggggaactgaccctgaaggagcagaggcttgtctgcccagcctgggccagcaagcatccagctctggacccgcctgccagaggccagaggatgaggaagtggaggctttcctgaaggccaagctgaatatgagctttggggacaggcccaatctggagctgctgagggccctgggggagctgcggcagcgctgtgccatccttaaggaggaaaaccagatgctgaggaagagcagcttccctgagacagaagagaaggtgcggaggctgaagaggaagaacgccgagctggcggtcattgccaagcgcctggaggagagggcccgaaagctgcaggaaacgaacctgagggtggtgagtgcccccttgccccggccggggaccagcttggagttgtgtcggaaggccctagcccgccagcgagcccgggacctcagtgagacagccagtgcactgctggccaaggacaagcagattgctgccttgcagcgggagtgcagggagctgcaggccaggctcactctggtgggcaaggagggtccccagtggctccacgtgcgggacttcgatcggctgctgcgcgagtcccagcgggaggtgctgcggctgcagaggcagatcgcgctgcgcaaccagcgggagacgctcccgctcccgccgtcctggcccccgggccctgctctccaggccagagcaggggcgcctgctcccggggccccgggagaggccacgccccaggaggatgcggacaacctacccgtgattctaggggagccagagaaagagcagagggtgcagcagctggaatcggagctcagcaagaagcggaagaaatgcgagagcctggagcaggaagcccggaaaaagcagaggcgatgtgaggagctggaactgcagctgagacaagcgcagaatgagaatgcccgcctggtggaggagaactcccggctcagtgggagagccacagagaaggagcaggtggagtgggagaatgcggagctgaggggccagctcctgggggtgacacaggagagggactcagcccttcgcaagagccagggcctgcagagcaagctggagagcctggagcaagtgctgaagcacatgcgggaggtggcccagcggcggcagcagctggaggtggagcatgaacaggctcggctcagcctacgggagaagcaggaggaggtccggagactgcagcaggcccaggctgaagcccagagggaacatgaaggagccgtgcagctgctggagtctaccttggattccatgcaggcccgggttcgagagctcgaagaacagtgccgcagccaaaccgagcagttcagcctcctggcacaggaactccaggctttccgcctgcacccgggccccttggatctgctcacatctgccctggactgtgggagccttggagactgcccaccacccccctgctgctgctccattccccagccttgccgggggtctggccccaaagaccttgacctcccgccgggctcccctgggcgctgcaccccaaagtcttccgagcctgcccctgccactctcactggggtccctcgaaggacagccaagaaggcagagtctctctccaactcctcccactccgagtccatccacaacagccccaagtcatgccctacacctgaggtggacacagccagtgaggtagaggagctggaggcagacagtgtctccctgctcccagctgcgccagagggcagccggggaggagccaggatccaggtcttcctagcacgttatagctacaacccctttgagggtcccaatgagaatccagaagcagagcttccgctgacagctggcgagtacatctacatctatggcaacatggatgaggatggcttttttgaaggagagctcatggatggccgaaggggcctggtcccttccaattttgtagagcgtgtgtcggatgatgacctcctgacctccctccctccagagctggccgatttgtcccacagctcaggccctgaactcagtttcctgagtgtaggtgggggtggcagcagtagcgggggccaaagcagtgtgggaaggagccagcccagacctgaggaggaggatgcaggggacgagctcagtctgagcccatcaccggagggcctgggcgagcctcctgccgtgccttacccccgccgtctggtggtcctcaagcagctggcccacagcgtggtgctggcctgggagccgcctcctgagcaagtggagctacacggcttccatatctgtgtgaatggggagctgcgacaggccctggggcctggggcgccacccaaggccgtgctggagaacctggacctgtgggccgggccccttcacatttctgtccaggccctgactagccggggcagctctgacccactgcgctgttgcttggcggtgggtgcccgggccggagtggtgcccagccagctgcgggtccatcggttgacagccacatctgctgagatcacctgggtgcccggcaatagcaacttggcccatgccatctacctcaatggggaagagtgcccacctgccagccccagtacctactgggccaccttctgccacttacggcctggcacaccctatcaggcccaagtggaggctcagctcccaccccaagggccctgggaaccaggctgggagaggctggagcagcgggctgccaccctgcagttcaccacactcccagcaggcccacctgatgcccctctggatgtgcagatcgagcctgggccctcccctgggatcttgatcatcagttggctcccagtcaccatcgatgctgctggcacatccaacggtgtccgggtcacaggctatgccatctacgctgatgggcagaagatcatggaggtggcctcacccacggcaggcagtgtactggtggagttgtcccagctgcagctgctgcaggtgtgtcgtgaggtggtcgtgcgcaccatgtcgccccacggggagtcggcggactccatcccggctcctatcactcccgccctggctccggccagcctgccagcccgagtctcctgcccctcaccgcacccaagcccagaggccagagcgccccttgcttcagcctccccagggcctggagaccccagctctcctctccagcaccctgctccccttggaactcaagagcctccaggagcaccccctgcaagcccttccagagagatggcaaaagggtcccacgaggaccctccagcaccttgctcccaggaggaggctggggcagcagtgctgggcacctcagaggagaggacagccagcacatctaccctgggtgagaaggaccctggccccgcagctccctcactggccaagcaggaggccgagtggactgcaggagaggcctgtccggcctccagctccacccagggagcacgggcccagcaggcgccaaataccgagatgtgccaaggaggagacccagggtctgggctgaggcccagggctgagaaggaggacacagcagagcttggggttcatctggtgaactccctcgtggaccacggccgcaactcagacctgtcagacatccaggaggaagaggaagaggaggaggaggaggaggaagaggagctgggttccaggacttgctccttccagaagcaggttgctggcaacagcatcagggagaatggggccaagtcccagcccgaccccttttgtgagactgacagcgatgaggagatcttggagcagatcctggagctgcccctccagcagttctgtagcaagaagctctttagcatcccggaggaggaggaagaggaagaggaggacgaggaggaggagaagtcaggggcaggctgttcttcccgagaccctggcccgcctgaacctgcattgctggggctgggctgtgacagtggtcagccccgaagacctggccagtgtcccttgtctcctgagtcctccagggctggagactgcctggaagacatgcctggattagttggtggaagcagccggaggagaggagggggctcccctgagaagcccccaagccgcaggcggcctccagatccccgagaacactgcagccgacttctcagcaacaatgggccccaggcctctggacgactgggccccacacgggagaggggtggcctccccgtaattgagggccccaggactggactagaggctagcgggagaggccggctgggcccttcccggaggtgctcccgtggccgggcgctggagcctggcctggccagctgcctttcccccaagtgcttggaaatcagcattgaatatgattcggaggatgagcaggaggcgggcagcgggggcatcagcatcaccagctcctgctaccctggagatggggaggcctggggcacagcaactgtaggaaggcccagggggcctccgaaggccaattcaggccccaagccctacccacgcctcccagcctgggagaaaggggaaccagagcggagaggccgcagtgcgacgggcagagccaaggagccactctcccgggcaacagagaccggagaggccagagggcaggacggctctgggcggaggggcccccagaagagaggtgtccgagtcctcaggccaagcactgcagagctagtccctgcgaggagcccctcagaaacactggcttaccagcacctacccgtcaggatctttgtggctctgtttgactatgaccccgtgtcaatgtcgcccaatcctgatgctggagaagaagagcttcccttccgagagggtcagatcctgaaggtgtttggggacaaggatgccgatggcttctaccagggcgaaggtgggggccggacaggctacattccctgcaacatggtggctgaggtggctgtggacagccctgctgggagacagcaactgctccagcggggttatttgtccccagatattctccttgagggctcagggaatggtccgtttgtgtactccacagcccacacaactgggcctcctcccaagccccgccgctccaagaaagctgagtcggaaggccctgcccagccctgtccaggcccccctaagctggtcccctctgctgacctgaaagctccccactccatggtggctgcatttgactacaacccccaggagagttcccccaatatggacgtggaggcagagctgcccttccgggcaggggatgtcattactgtgtttgggggcatggacgatgacggtttctactatggggaattaaatggacaaaggggcctggttccatccaacttcctggagggccctgggcctgaggcaggcggcctggacagggaacccaggacaccccaggctgagagtcagagaacgaggaggagaagagtccagtgctagatggagatagatatatgtagagagagcaacatgactggggctgcaccacacaagggtccccagggcccccaggtgggccttgtacccccagctctggcagcgcccccaggattgaacgtggggagccccagggcagaagcgagaaggtgtggggtttcttctccaaggggaagcagctcctcaggaggctgggctctgggaagaaggagtgaagctgtggcccatcctgcaggcagaagaggccctgagaggcccccagatcactgtctctgctgagcagggaaggctcagactgggcccagagcccccgttcttctgcgttaacactgtggcattcagagggaatcaaagagccttggtgaaggtcagagctaaatggctccttaaggatgaactctctagagaagcaccttcctcctacaggaggggaaactgagcccacagtgagtatgtaacttgaccaaggtcactgagccaggactggacccaggaccctcgcgtcctggtccacccacctcgtctactagtgtcccacagtgctgcgctagtcccttctgccacccttcccagtcccaggacgggccctggagggagaaaggagcctgtgccccctgatggctctggctgtcctgatcctgtcttccctcccctgaaggaaagtttgcactggattttattggagccccatctccccagcgggcaggcgggcggagcctgtatatatgtatatactcagtgcctcagttcagcttcctccacctcgcttccactgcacaggcccaggaaggagaaaggccaagccaaagtgggccccaccctgcccccgtcgtgctccatccttccctgccggggcctgctggcccctgtaaggtcccgcccccaaagaccctggggccagcggggccgaaagcggagttgggtttgccttattttgctcattggattcaagttcttttgcatagttttcttctaacccctgttggagtccaggggctggagaaaaggacagatttatgcagctattttcatacattccctgttcagagtggggtaggggttctccgccgttacccgatccactccatcccccaccctctgaggggtgagtgtgtctttgcatgtttcctttgctgtggtgggagatagtttgactgaacccccaccttgaccttggtctccaggggtgtggaatggtgggggaatttgtttaaaaagacattttattataataaagtctattttc

SEQ ID NO: 149254 - DNA, 5574 bp, Artificial Sequence
  derived and/or modified sequence
atggagcagctgaccaccctgcccagacccggcgaccccggcgccatggagccctgggccctgcccacctggcacagctggacccccggcagaggcggcgagcccagcagcgccgcccccagcatcgccgacaccccccccgccgccctgcagctgcaggagctgagaagcgaggagagcagcaagcccaagggcgacggcagcagcagacccgtgggcggcaccgaccccgagggcgccgaggcctgcctgcccagcctgggccagcaggccagcagcagcggccccgcctgccagagacccgaggacgaggaggtggaggccttcctgaaggccaagctgaacatgagcttcggcgacagacccaacctggagctgctgagagccctgggcgagctgagacagagatgcgccatcctgaaggaggagaaccagatgctgagaaagagcagcttccccgagaccgaggagaaggtgagaagactgaagagaaagaacgccgagctggccgtgatcgccaagagactggaggagagagccagaaagctgcaggagaccaacctgagagtggtgagcgcccccctgcccagacccggcaccagcctggagctgtgcagaaaggccctggccagacagagagccagagacctgagcgagaccgccagcgccctgctggccaaggacaagcagatcgccgccctgcagagagagtgcagagagctgcaggccagactgaccctggtgggcaaggagggcccccagtggctgcacgtgagagacttcgacagactgctgagagagagccagagagaggtgctgagactgcagagacagatcgccctgagaaaccagagagagaccctgcccctgccccccagctggccccccggccccgccctgcaggccagagccggcgcccccgcccccggcgcccccggcgaggccaccccccaggaggacgccgacaacctgcccgtgatcctgggcgagcccgagaaggagcagagagtgcagcagctggagagcgagctgagcaagaagagaaagaagtgcgagagcctggagcaggaggccagaaagaagcagagaagatgcgaggagctggagctgcagctgagacaggcccagaacgagaacgccagactggtggaggagaacagcagactgagcggcagagccaccgagaaggagcaggtggagtgggagaacgccgagctgagaggccagctgctgggcgtgacccaggagagagacagcgccctgagaaagagccagggcctgcagagcaagctggagagcctggagcaggtgctgaagcacatgagagaggtggcccagagaagacagcagctggaggtggagcacgagcaggccagactgagcctgagagagaagcaggaggaggtgagaagactgcagcaggcccaggccgaggcccagagagagcacgagggcgccgtgcagctgctggagagcaccctggacagcatgcaggccagagtgagagagctggaggagcagtgcagaagccagaccgagcagttcagcctgctggcccaggagctgcaggccttcagactgcaccccggccccctggacctgctgaccagcgccctggactgcggcagcctgggcgactgccccccccccccctgctgctgcagcatcccccagccctgcagaggcagcggccccaaggacctggacctgccccccggcagccccggcagatgcacccccaagagcagcgagcccgcccccgccaccctgaccggcgtgcccagaagaaccgccaagaaggccgagagcctgagcaacagcagccacagcgagagcatccacaacagccccaagagctgccccacccccgaggtggacaccgccagcgaggtggaggagctggaggccgacagcgtgagcctgctgcccgccgcccccgagggcagcagaggcggcgccagaatccaggtgttcctggccagatacagctacaaccccttcgagggccccaacgagaaccccgaggccgagctgcccctgaccgccggcgagtacatctacatctacggcaacatggacgaggacggcttcttcgagggcgagctgatggacggcagaagaggcctggtgcccagcaacttcgtggagagagtgagcgacgacgacctgctgaccagcctgccccccgagctggccgacctgagccacagcagcggccccgagctgagcttcctgagcgtgggcggcggcggcagcagcagcggcggccagagcagcgtgggcagaagccagcccagacccgaggaggaggacgccggcgacgagctgagcctgagccccagccccgagggcctgggcgagccccccgccgtgccctaccccagaagactggtggtgctgaagcagctggcccacagcgtggtgctggcctgggagcccccccccgagcaggtggagctgcacggcttccacatctgcgtgaacggcgagctgagacaggccctgggccccggcgccccccccaaggccgtgctggagaacctggacctgtgggccggccccctgcacatcagcgtgcaggccctgaccagcagaggcagcagcgaccccctgagatgctgcctggccgtgggcgccagagccggcgtggtgcccagccagctgagagtgcacagactgaccgccaccagcgccgagatcacctgggtgcccggcaacagcaacctggcccacgccatctacctgaacggcgaggagtgcccccccgccagccccagcacctactgggccaccttctgccacctgagacccggcaccccctaccaggcccaggtggaggcccagctgcccccccagggcccctgggagcccggctgggagagactggagcagagagccgccaccctgcagttcaccaccctgcccgccggcccccccgacgcccccctggacgtgcagatcgagcccggccccagccccggcatcctgatcatcagctggctgcccgtgaccatcgacgccgccggcaccagcaacggcgtgagagtgaccggctacgccatctacgccgacggccagaagatcatggaggtggccagccccaccgccggcagcgtgctggtggagctgagccagctgcagctgctgcaggtgtgcagagaggtggtggtgagaaccatgagcccccacggcgagagcgccgacagcatccccgcccccatcacccccgccctggcccccgccagcctgcccgccagagtgagctgccccagcccccaccccagccccgaggccagagcccccctggccagcgccagccccggccccggcgaccccagcagccccctgcagcaccccgcccccctgggcacccaggagccccccggcgccccccccgccagccccagcagagagatggccaagggcagccacgaggacccccccgccccctgcagccaggaggaggccggcgccgccgtgctgggcaccagcgaggagagaaccgccagcaccagcaccctgggcgagaaggaccccggccccgccgcccccagcctggccaagcaggaggccgagtggaccgccggcgaggcctgccccgccagcagcagcacccagggcgccagagcccagcaggcccccaacaccgagatgtgccagggcggcgaccccggcagcggcctgagacccagagccgagaaggaggacaccgccgagctgggcgtgcacctggtgaacagcctggtggaccacggcagaaacagcgacctgagcgacatccaggaggaggaggaggaggaggaggaggaggaggaggaggagctgggcagcagaacctgcagcttccagaagcaggtggccggcaacagcatcagagagaacggcgccaagagccagcccgaccccttctgcgagaccgacagcgacgaggagatcctggagcagatcctggagctgcccctgcagcagttctgcagcaagaagctgttcagcatccccgaggaggaggaggaggaggaggaggacgaggaggaggagaagagcggcgccggctgcagcagcagagaccccggcccccccgagcccgccctgctgggcctgggctgcgacagcggccagcccagaagacccggccagtgccccctgagccccgagagcagcagagccggcgactgcctggaggacatgcccggcctggtgggcggcagcagcagaagaagaggcggcggcagccccgagaagccccccagcagaagaagaccccccgaccccagagagcactgcagcagactgctgagcaacaacggcccccaggccagcggcagactgggccccaccagagagagaggcggcctgcccgtgatcgagggccccagaaccggcctggaggccagcggcagaggcagactgggccccagcagaagatgcagcagaggcagagccctggagcccggcctggccagctgcctgagccccaagtgcctggagatcagcatcgagtacgacagcgaggacgagcaggaggccggcagcggcggcatcagcatcaccagcagctgctaccccggcgacggcgaggcctggggcaccgccaccgtgggcagacccagaggcccccccaaggccaacagcggccccaagccctaccccagactgcccgcctgggagaagggcgagcccgagagaagaggcagaagcgccaccggcagagccaaggagcccctgagcagagccaccgagaccggcgaggccagaggccaggacggcagcggcagaagaggcccccagaagagaggcgtgagagtgctgagacccagcaccgccgagctggtgcccgccagaagccccagcgagaccctggcctaccagcacctgcccgtgagaatcttcgtggccctgttcgactacgaccccgtgagcatgagccccaaccccgacgccggcgaggaggagctgcccttcagagagggccagatcctgaaggtgttcggcgacaaggacgccgacggcttctaccagggcgagggcggcggcagaaccggctacatcccctgcaacatggtggccgaggtggccgtggacagccccgccggcagacagcagctgctgcagagaggctacctgagccccgacatcctgctggagggcagcggcaacggccccttcgtgtacagcaccgcccacaccaccggccccccccccaagcccagaagaagcaagaaggccgagagcgagggccccgcccagccctgccccggcccccccaagctggtgcccagcgccgacctgaaggccccccacagcatggtggccgccttcgactacaacccccaggagagcagccccaacatggacgtggaggccgagctgcccttcagagccggcgacgtgatcaccgtgttcggcggcatggacgacgacggcttctactacggcgagctgaacggccagagaggcctggtgcccagcaacttcctggagggccccggccccgaggccggcggcctggacagagagcccagaaccccccaggccgagagccagagaaccagaagaagaagagtgcagtgctag

SEQ ID NO: 149255 - protein, 370 aa, Artificial Sequence
  derived and/or modified sequence
MLSNSQGQSPPVPFPAPAPPPQPPTPALPHPPAQPPPPPPQQFPQFHVKSGLQIKKNAIIDDYKVTSQVLGLGINGKVLQIFNKRTQEKFALKMLQDCPKARREVELHWRASQCPHIVRIVDVYENLYAGRKCLLIVMECLDGGELFSRIQDRGDQAFTEREASEIMKSIGEAIQYLHSINIAHRDVKPENLLYTSKRPNAILKLTDFGFAKETTSHNSLTTPCYTPYYVAPEVLGPEKYDKSCDMWSLGVIMYILLCGYPPFYSNHGLAISPGMKTRIRMGQYEFPNPEWSEVSEEVKMLIRNLLKTEPTQRMTITEFMNHPWIMQSTKVPQTPLHTSRVLKEDKERWEDVKGCLHDKNSDQATWLTRL

SEQ ID NO: 149256 - DNA, 1113 bp, Artificial Sequence
  derived and/or modified sequence
atgctgagcaacagccagggccagagcccccccgtgcccttccccgcccccgccccccccccccagccccccacccccgccctgccccacccccccgcccagcccccccccccccccccccagcagttcccccagttccacgtgaagagcggcctgcagatcaagaagaacgccatcatcgacgactacaaggtgaccagccaggtgctgggcctgggcatcaacggcaaggtgctgcagatcttcaacaagagaacccaggagaagttcgccctgaagatgctgcaggactgccccaaggccagaagagaggtggagctgcactggagagccagccagtgcccccacatcgtgagaatcgtggacgtgtacgagaacctgtacgccggcagaaagtgcctgctgatcgtgatggagtgcctggacggcggcgagctgttcagcagaatccaggacagaggcgaccaggccttcaccgagagagaggccagcgagatcatgaagagcatcggcgaggccatccagtacctgcacagcatcaacatcgcccacagagacgtgaagcccgagaacctgctgtacaccagcaagagacccaacgccatcctgaagctgaccgacttcggcttcgccaaggagaccaccagccacaacagcctgaccaccccctgctacaccccctactacgtggcccccgaggtgctgggccccgagaagtacgacaagagctgcgacatgtggagcctgggcgtgatcatgtacatcctgctgtgcggctacccccccttctacagcaaccacggcctggccatcagccccggcatgaagaccagaatcagaatgggccagtacgagttccccaaccccgagtggagcgaggtgagcgaggaggtgaagatgctgatcagaaacctgctgaagaccgagcccacccagagaatgaccatcaccgagttcatgaaccacccctggatcatgcagagcaccaaggtgccccagacccccctgcacaccagcagagtgctgaaggaggacaaggagagatgggaggacgtgaagggctgcctgcacgacaagaacagcgaccaggccacctggctgaccagactgtag

SEQ ID NO: 149257 - DNA, 1113 bp, Artificial Sequence
  derived and/or modified sequence
atgctgtcaaacagccagggccagtctccgccagtcccgttccctgcccccgccccccctccgcaacccccgaccccagcattaccccacccaccggctcaaccccctcccccccccccacagcaatttcctcaatttcacgttaagtccgggttgcagattaaaaaaaacgcaatcattgacgactacaaagtgacatcccaggtgttgggactgggcattaatggtaaggtactacagatttttaataaaagaacccaagaaaagttcgcattaaaaatgctgcaggactgccctaaagccaggagggaggtagaactgcattggcgggcctcacaatgtccgcacatagtgcgcatcgtcgatgtgtacgagaatctctacgcaggtagaaaatgtctgctgatcgttatggagtgcctcgacgggggagaactctttagccgaatacaggacagaggagatcaggcatttaccgaaagggaggcctcagaaattatgaagtccattggggaggccatacagtacctgcactctattaacatcgcacatagagacgttaagcctgagaatttgctctacacctccaagcgcccaaacgccattcttaaactgactgactttggattcgccaaggaaacgacctcccacaactcacttactacaccttgttacacgccttattacgtggcaccagaggtgctcgggcctgaaaagtacgataagtcttgtgatatgtggtccttgggagtcattatgtacattctcctgtgtggatacccccctttttattctaatcacgggctggctatttcaccagggatgaagacgcgcatccgcatgggccaatacgaatttccaaatccggagtggagtgaggtgtcagaggaagttaagatgttaataaggaacttgcttaagactgaacctacgcagcgaatgacgatcacagagttcatgaaccacccctggattatgcaaagtaccaaggtgccacagactcctttacacactagtcgagtgctgaaggaggataaagaacgatgggaagatgttaaaggttgtcttcatgataaaaatagcgatcaggctacttggctcactcggctctag

SEQ ID NO: 149258 - DNA, 1113 bp, Artificial Sequence
  derived and/or modified sequence
atgctgagcaacagccagggccagagcccccctgtgcccttccctgccccagcccccccaccccagccccccaccccagccctgccccaccccccagcccagcccccacctcctccaccccagcagttcccccagttccacgtgaagagcggcctgcagatcaagaagaatgccatcattgatgactacaaggtgaccagccaggtgctgggcctgggcatcaatggcaaggtgctgcagatcttcaacaagaggacccaggagaagtttgccctgaagatgctgcaggactgccccaaggcccggcgggaggtggagctgcactggagggccagccagtgcccccacatcgtgcgcatcgtggatgtgtatgagaacctgtatgccggcaggaagtgcctgctgattgtgatggagtgcctggatggaggagagctgttcagccgcatccaggacagaggagaccaggccttcacagagcgggaggccagcgagatcatgaagagcatcggggaggccatccagtacctgcacagcatcaacatcgcccacagagatgtgaagccagagaacctgctgtacaccagcaagaggcccaatgccatcctgaagctgacagactttggatttgccaaggagaccaccagccacaacagcctgaccaccccctgctacaccccctactacgtggcccctgaggtgctgggccctgagaagtatgacaagagctgtgacatgtggagcctgggcgtcatcatgtacatcctgctgtgtggctacccacccttctacagcaaccacggcctggccatcagccctggcatgaagacccgcatccgcatgggccagtatgagttccccaaccctgagtggagcgaggtgtctgaggaggtgaagatgctgatccggaacctgctgaagacagagcccacccagaggatgaccatcacagagttcatgaaccacccctggatcatgcagagcaccaaggtgccccagacccccctgcacaccagccgggtgctgaaggaggacaaggagcgctgggaggatgtgaagggctgcctgcatgacaagaacagcgaccaggccacctggctgacccggctgtag

SEQ ID NO: 149259 - DNA, 1113 bp, Artificial Sequence
  derived and/or modified sequence
atgctgagcaacagccagggccagagcccccccgtgcccttccccgcgccggccccaccgcctcagccccccacaccagcactgccacacccacctgctcagccccctcctccaccaccccagcagttcccccagttccacgtgaaaagtggcctccagatcaagaaaaatgctatcatcgatgattacaaagtcacatcacaggtgctcggactaggaatcaatggtaaggtgttgcagattttcaataagaggacgcaggagaagttcgcactgaagatgttacaagactgtcctaaggcccgcagagaggtggagttacactggcgcgcttctcaatgccctcacatcgttcggatcgttgacgtttatgaaaacttatacgcagggcgcaagtgcctgctgatagtgatggagtgcctcgacggaggtgaattattctcaagaatacaagatcgcggcgatcaggcattcaccgaaagggaggccagtgagatcatgaagtcaattggtgaggccatccagtatctccactcaattaacatcgctcaccgggacgtgaaaccagagaacttgttgtatacatcgaagcggccaaacgcaatactgaagctcaccgatttcggttttgccaaagagaccacaagtcataacagtttaacaacaccatgctacacgccttattacgtcgcgccggaagtattaggacccgagaagtatgacaagtcttgtgatatgtggagtctcggcgttatcatgtacatccttctgtgcggctatccacccttttacagtaaccatggcctcgcaatttcacccgggatgaagacacggattcgcatgggccagtacgaatttccaaatcccgaatggtctgaagtcagtgaggaggtcaaaatgctaatcagaaatctccttaaaacggagccaactcagagaatgacaatcacggagttcatgaatcacccctggataatgcagagtactaaggttccccagactccacttcacacatcccgcgttttgaaagaggataaggaacgatgggaggatgtgaaaggctgcctacatgacaagaattcagatcaggccacctggctgacaaggctgtag

SEQ ID NO: 149260 - DNA, 2171 bp, Artificial Sequence
  derived and/or modified sequence
gcggccgcttccccccggccgggcccccgccgccccgcggtccccagagcgccaggcccccggggggagggagggagggcgccgggccggtgggagccagcggcgcgcggtgggacccacggagccccgcgacccgccgagcctggagccgggccgggtcggggaagccggctccagcccggagcgaacttcgcagcccgtcggggggcggcggggagggggcccggagccggaggagggggcggccgcgggcacccccgcctgtgccccggcgtccccgggcaccatgctgtccaactcccagggccagagcccgccggtgccgttccccgccccggccccgccgccgcagccccccacccctgccctgccgcaccccccggcgcagccgccgccgccgcccccgcagcagttcccgcagttccacgtcaagtccggcctgcagatcaagaagaacgccatcatcgatgactacaaggtcaccagccaggtcctggggctgggcatcaacggcaaagttttgcagatcttcaacaagaggacccaggagaaattcgccctcaaaatgcttcaggactgccccaaggcccgcagggaggtggagctgcactggcgggcctcccagtgcccgcacatcgtacggatcgtggatgtgtacgagaatctgtacgcagggaggaagtgcctgctgattgtcatggaatgtttggacggtggagaactctttagccgaatccaggatcgaggagaccaggcattcacagaaagagaagcatccgaaatcatgaagagcatcggtgaggccatccagtatctgcattcaatcaacattgcccatcgggatgtcaagcctgagaatctcttatacacctccaaaaggcccaacgccatcctgaaactcactgactttggctttgccaaggaaaccaccagccacaactctttgaccactccttgttatacaccgtactatgtggctccagaagtgctgggtccagagaagtatgacaagtcctgtgacatgtggtccctgggtgtcatcatgtacatcctgctgtgtgggtatccccccttctactccaaccacggccttgccatctctccgggcatgaagactcgcatccgaatgggccagtatgaatttcccaacccagaatggtcagaagtatcagaggaagtgaagatgctcattcggaatctgctgaaaacagagcccacccagagaatgaccatcaccgagtttatgaaccacccttggatcatgcaatcaacaaaggtccctcaaaccccactgcacaccagccgggtcctgaaggaggacaaggagcggtgggaggatgtcaaggggtgtcttcatgacaagaacagcgaccaggccacttggctgaccaggttgtgagcagaggattctgtgttcctgtccaaactcagtgctgtttcttagaatccttttattccctgggtctctaatgggaccttaaagaccatctggtatcatcttctcattttgcagaagagaaactgaggcccagaggcggagggcagtctgctcaaggtcacgcagctggtgactggttggggcagaccggacccaggtttcctgactcctggcccaagtctcttcctcctatcctgcgggatcactggggggctctcagggaacagcagcagtgccatagccaggctctctgctgcccagcgctggggtgaggctgccgttgtcagcgtggaccactaaccagcccgtcttctctctctgctcccacccctgccgccctcaccctgcccttgttgtctctgtctctcacgtctctcttctgctgtctctcctacctgtcttctggctctctctgtacccttcctggtgctgccgtgcccccaggaggagatgaccagtgccttggccacaatgcgcgttgactacgagcagatcaagataaaaaagattgaagatgcatccaaccctctgctgctgaagaggcggaagaaagctcgggccctggaggctgcggctctggcccactgagccaccgcgccctcctgcccacgggaggacaagcaataactctctacaggaatatattttttaaacgaagagacagaactgtccacatctgcctcctctcctcctcagctgcatggagcctggaactgcatcagtgactgaattc

SEQ ID NO: 149261 - DNA, 1113 bp, Artificial Sequence
  derived and/or modified sequence
atgctttcaaactcccaggggcaatcccctccagtgccttttccagcccctgctcccccaccccagccgccaactcccgctctccctcacccgccagcccaaccccctccccctcctccccagcagttcccccagttccacgtgaagagcgggctacaaatcaaaaaaaacgcgattattgatgattataaagttacctcccaggtactgggactcgggattaacggcaaagtgcttcagatctttaataaaagaactcaggaaaaattcgcattaaagatgctacaggactgcccaaaagctcggagagaggtcgagctgcattggcgtgccagccagtgtccgcacatagtccgaatcgttgacgtttatgagaatctgtatgctggcaggaagtgtctgcttatagtgatggaatgcctcgacggcggtgagctgttttcccgcattcaagacaggggtgatcaggcgtttacagagcgggaggcaagcgaaatcatgaaatctatcggggaagcaatccagtacctgcactcgattaacatagcccatagggatgtgaaacccgagaaccttctctatactagcaaacgcccaaatgctatcctcaagctgacggacttcggattcgccaaggaaactacatcccacaacagcctcactacaccttgctacactccttattatgtagcgcctgaggtgctgggacccgaaaagtacgacaagagctgcgacatgtggtctctgggtgtcatcatgtatattttgctgtgcggatatccccctttctatagcaatcatggcctcgctatatctccaggaatgaagaccagaataagaatgggtcaatacgagtttcctaatccagagtggtcagaggtcagcgaggaggtgaagatgctgattaggaacctcctgaagaccgagccaacccagaggatgaccataactgagttcatgaaccatccctggatcatgcagtctacgaaggtgccccagacacccctacatacaagcagggttctcaaagaggacaaggagaggtgggaggacgtgaagggatgtctgcacgacaaaaacagtgaccaggcaacctggctgactcgactttag

SEQ ID NO: 149262 - DNA, 333 bp, Artificial Sequence
  derived and/or modified sequence
atgagctgtcagcaaaaccagcagcagtgtcagccccctcctaaatgtccccctaagtgcactccgaagtgtcctcctaagtgtcctcccaaatgccttccacagtgcccagccccatgctcccctgccgtgtcttcatgttgcgggccaatttccggcggatgctgcgggcctagctctggcggatgttgcaattcgggcgcaggcggttgttgtctgagtcaccaccggccaagactgttccacaggaggagacatcagagcccggactgttgcgaatcagagccttctgggggttctgggtgttgccatagttctggtggctgttgctag

SEQ ID NO: 149263 - protein, 414 aa, Artificial Sequence
  derived and/or modified sequence
MIPLEKPGSGGSSPGATSGSGRAGRGLSGPCRPPPPPQARGLLTEIRAVVRTEPFQDGYSLCPGRELGRGKFAVVRKCIKKDSGKEFAAKFMRKRRKGQDCRMEIIHEIAVLELAQDNPWVINLHEVYETASEMILVLEYAAGGEIFDQCVADREEAFKEKDVQRLMRQILEGVHFLHTRDVVHLDLKPQNILLTSESPLGDIKIVDFGLSRILKNSEELREIMGTPEYVAPEILSYDPISMATDMWSIGVLTYVMLTGISPFLGNDKQETFLNISQMNLSYSEEEFDVLSESAVDFIRTLLVKKPEDRATAEECLKHPWLTQSSIQEPSFRMEKALEEANALQEGHSVPEINSDTDKSETKESIVTEELIVVTSYTLGQCRQSEKEKMEQKAISKRFKFEEPLLQEIPGEFIY

SEQ ID NO: 149264 - DNA, 1245 bp, Artificial Sequence
  derived and/or modified sequence
atgattcctctagaaaaacctggaagcggggggagctcgcctggcgctactagcggatcaggccgagctgggcggggactctccgggccgtgcaggcctcctcctccccctcaggcaagggggcttcttacggaaatccgcgcagtggtgaggactgaaccttttcaagacgggtattccctctgccccggccgcgaactaggtagaggcaaattcgctgtggtgaggaaatgcattaaaaaggatagcgggaaggagtttgccgccaaattcatgcgaaaacggagaaagggacaggattgcagaatggagatcattcatgagatagccgttctggagctcgcccaagataacccctgggtcattaacctgcacgaggtgtatgaaactgccagcgagatgatcctggttcttgaatacgccgctggcggcgaaatcttcgaccagtgcgtggccgatcgggaagaggcatttaaagagaaagatgtacagcggctgatgcgccagattctggaaggcgtccatttcttgcacactcgggatgtggtacacttggacctcaagcctcaaaacatcctgttaacctccgagagtcccctcggcgacatcaaaattgtggatttcgggcttagccgaatcctcaaaaacagcgaagaactgagagagatcatggggacaccagagtacgtggcaccagagattctgtcctacgaccccattagtatggctacagacatgtggtctatcggggtgttaacctacgtcatgcttacaggaatttccccgtttctgggcaatgataaacaggagactttcttaaacatttcgcaaatgaatttaagctactcagaggaagaattcgatgtgttatccgagagcgccgtggattttattcgtaccctgttggtgaagaaacctgaggaccgcgcaactgcagaagagtgcctgaaacacccatggctgacccaaagcagcatccaggagccttctttccggatggaaaaggcactggaggaggccaacgctctgcaggagggccacagtgtcccggaaataaactcggatacggacaaaagtgaaactaaggaatcgatcgtgactgaagaactcatcgttgtgactagctacaccctgggccaatgtcgacagtctgaaaaggagaagatggagcaaaaggctattagcaaaagatttaagtttgaagaaccgcttctgcaggagatcccaggcgagtttatctactag

SEQ ID NO: 149265 - DNA, 1245 bp, Artificial Sequence
  derived and/or modified sequence
atgatccccctggagaagccaggcagcggcggcagcagccctggggccaccagcggcagcggccgggccggccggggcctgagcggcccctgcaggcctcctcctccaccccaggcccggggcctgctgacagagatccgggctgtggtgaggacagagcccttccaggacggctacagcctgtgccccggccgggagctgggccggggcaagtttgctgtggtgaggaagtgcatcaagaaggacagcggcaaggagtttgctgccaagttcatgaggaagaggaggaagggccaggactgcaggatggagatcatccatgaaattgctgtgctggagctggcccaggacaacccctgggtgatcaacctgcacgaggtgtatgaaacagccagcgagatgatcctggtgctggagtatgctgctggaggagagatctttgaccagtgtgtggccgaccgggaggaggccttcaaggagaaggatgtgcagaggctgatgaggcagatcctggagggcgtgcacttcctgcacaccagagatgtggtgcacctggacctgaagccccagaacatcctgctgaccagcgagagccccctgggggacatcaagatcgtggactttggcctgagccgcatcctgaagaacagcgaggagctgcgggagatcatgggcaccccagaatatgtggcccctgagatcctgtcctatgaccccatctccatggccacagacatgtggagcattggagtgctgacctacgtgatgctgaccggcatcagccccttcctgggcaatgacaagcaggagaccttcctgaacatcagccagatgaacctgagctacagcgaggaggagtttgatgtgctgtctgagagcgctgtggacttcatccgcaccctgctggtgaagaagccagaagatcgggccacagctgaggagtgcctgaagcacccctggctgacccagagcagcatccaggagcccagcttcaggatggagaaggccctggaggaggccaatgccctgcaggagggccacagcgtgcctgagatcaacagcgacacagacaagtctgagaccaaggagagcatcgtgacagaggagctgattgtggtgaccagctacaccctgggccagtgccggcagagcgagaaggagaagatggagcagaaggccatcagcaagcgcttcaagtttgaggagcccctgctgcaggagatccctggagagttcatctactag

SEQ ID NO: 149266 - DNA, 1245 bp, Artificial Sequence
  derived and/or modified sequence
atgatccccctggagaagcccggcagcggcggcagcagccccggcgccacatcaggctctggacgcgctggacggggtctgtccggtccgtgtcgaccccccccaccaccccaagcccgtggactcttgaccgaaattcgtgctgtggtcaggaccgaaccattccaagatggatacagtttatgtcctggaagagagctaggaaggggaaaatttgcagtggtgcgcaagtgtataaaaaaggacagtggtaaagaatttgctgcaaaattcatgagaaagcgacgcaagggacaagattgtcgaatggaaatcattcacgaaatcgctgtgctggagctggcccaggacaacccctgggtgatcaaccttcacgaggtttacgaaacagcctctgagatgatccttgtcctcgagtacgcagcagggggcgagatctttgatcaatgcgtggccgaccgagaagaggccttcaaggaaaaagacgttcagagacttatgcggcagatcctggagggcgtccattttctgcatacccgtgacgttgttcaccttgatctgaagccccaaaatatcttgctgacctccgaaagcccattgggagatataaaaattgtagatttcggcctgagccggatcctaaagaatagtgaggagctgagagagatcatgggaacccctgagtatgtcgcacctgagatcctgtcctatgatccaatctccatggcgacagacatgtggtccataggagtcctcacttatgtgatgctaacagggatcagccctttcctcgggaacgacaaacaggagaccttcttgaacattagtcaaatgaatttgagctattccgaggaggagtttgacgtcctcagtgaatctgccgtcgacttcataagaaccttgcttgtgaagaaacccgaagatagggctactgcagaggaatgtctcaagcacccatggttgacgcaatcttcgattcaagaacccagtttccgcatggaaaaggctctcgaggaggctaacgccttgcaggaagggcacagtgtaccagaaatcaactcagataccgacaaatccgaaaccaaagagtccatcgtaacagaagagttgatcgttgtgacaagttacacgctgggccagtgcaggcagtcggagaaggagaagatggaacaaaaagctatcagcaaacgattcaaatttgaagagcccctgctccaggaaattcctggcgaattcatctattag

SEQ ID NO: 149267 - DNA, 3368 bp, Artificial Sequence
  derived and/or modified sequence
gcggggcgcggggcgggcccgagctaccggtagtctgcctgccgcagtccgagcgccgcgctggggagagcgggtgtttgaaggctccgcggaccggcactaggagccgggggcgggtccgtgaccctccggctgctcggagtgaacaggcggccaggaaagaagcgggcctgaacaccatgatccctttggagaagccaggcagcggcggctcctccccaggcgccacctcaggctcgggccgggcaggccggggtctgagcgggccgtgccggccgccgccgccgccccaggcccgcgggctgctgacagagatacgcgccgtggtgcgcaccgagcccttccaggacggctacagcctgtgcccgggccgggagctgggcagggggaaatttgcagtggtgagaaaatgtataaagaaagattctgggaaagaatttgctgcaaagttcatgagaaaaagaagaaaaggccaagattgtcggatggaaataattcatgagattgctgtacttgaactagcacaagacaatccttgggtcattaatttacatgaagtttatgagactgcatcagaaatgatcttagttctggaatatgctgctgggggtgaaatctttgaccagtgtgttgcagacagagaagaagcctttaaagaaaaagatgttcaaagacttatgcgacagattttagaaggtgttcactttttacacactcgtgatgtagttcatcttgatttgaagcctcagaatattctgttgacaagtgaatctccattgggtgacattaagattgttgattttggcctttcaagaatattgaagaacagtgaagagctccgagaaattatgggtacccctgaatatgtggctcctgaaattcttagttatgatcctataagcatggcaacagatatgtggagcattggagtgttaacatatgtcatgcttacaggaatatcacctttcttaggcaatgataaacaagaaacattcttaaacatctcacagatgaatttaagttattctgaggaagaatttgatgttttgtctgagtcggctgttgatttcatcaggacacttttagttaagaaacctgaagatcgagccactgctgaagaatgtctaaagcacccctggttgacacagagcagtattcaagagccttctttcaggatggaaaaggcactagaagaagcaaatgccctccaagaaggtcattctgtgcctgaaattaattcggataccgacaaatcagaaaccaaggaatccattgtaaccgaagagttaattgtagttacttcatatactctaggacaatgcagacagtctgaaaaagagaaaatggagcaaaaggccatttccaaacgatttaaatttgaggaacctttgctacaagaaattccaggagaatttatctactgagcaatatttccctttagaacttcaagatttctacattgaaaatgttaatattatttatggacctctggccaaatggtacatgtactggaagtggataaccagtatcacttacacaaacaaaaataactttgtcaaatttgtggagttaggtggaagccagattttaaaagttgccaaccaggagatttaacaggtacagttacccgtttcaatgttatttttaagaagggagatgttggcacctttgaattctacatcctgtttctccagaatgagaatttgtgtacaaagatatttgtattcactttctttaaaaaatccaagtaaaagtgccaaaactacacttctgtaaatctcttgcattattcatatgtgtatctatatctgcataatgtttgttaatgtctactaaaattgctactttttcactttggatttgtttttggcaaaattttagtctaaacagacatctaaattttcgagacttagaataacattcactaaagtttgataatgtcttttttaaatattttcttactgctttatagtgacttgatttggtttctgttgtgtttttgcctaaatactagtaacatatcagtgaaaaaccctaattttttttctcttcaatgtcactagtaagagaggtggtaatttttcacctctgaaattattctgggtttaggtgtcagctcttgagctgcttccctcatcacaccacactcacatgcatctgttctctctcacactctatacccctgccacttcctggcacctccccccatgcttgtcatttaattttggccacttgtaggtatcagtgtgatctgatcaacactctggttaccttggtcagtgaaaagatgctactatattgcttttgtcccaaagtgagtaaaatcccctagagcagagagagagagagagagagagagtgtcttcatgccaaccacagcctgtttctgctgagtttcttatcagccctcaagctatgctaggaaaagttataaaatgccaaaatatttataaacatttactttgtccataaaaaatttacattggatactctgtaagtaggaggtactttgtcccaaaaagatgtataagaatgtactaatagttttatttgattaggattgaacagttcagttgtatctatgccccacagtgaccagtaaagtccaattaaaatatggaaatgtaaaagtgtatgccgaataccttaaagtaactaattatccttacacacaaaaggctcagtgcattaaatatttgcctatcacctgtgtgctgtgtaccgtggccatgcctcgctctgcactatgaacaactcagacctgtcccttcacggtctgattagggtgtcacacaaagctctctccctaacatggtttctcaactgtcaaaatcatgaaaatgacagcacctaaccactattttaaagtatgtacagtaaatacccaaatgtgtgtaaatgtcatagacatatacaaagtcagtaatctcacccagtcctgctgtgtgaacctgtcaaagcacctgggagtgccctttacaccattaggtgaaattcatcaggcacttcagacaaccaggttgcactgttttctcactaaattggctttatttatacagtttcctggaacctagcattcctaaacaagctccaaaatgcagaagaagaaattgtgccacagtgatagagtttttaatgaatatccatggccacagttttgagtctcaggtaagtcttggaagaagttaaacacagtattaggcaaatatttatctctctgaaaaaatagggaggaggtgaccaggaaaaaataaccactattgaatgacacgtttgtacttgatggatctgtcatcaagttttaaaatcagaatcatttgggctttttaaaaaccattttatactcgtaataaatatatttaatataa

SEQ ID NO: 149268 - DNA, 1245 bp, Artificial Sequence
  derived and/or modified sequence
atgattcccctggagaagcccggatcgggcggttcaagcccgggagcgacgtccggatccggtcgtgctggaaggggtctgtcgggcccttgtcgcccacccccaccgccacaggctagggggcttctcactgagatcagagccgtggtgcggactgagccctttcaggatgggtattctctgtgccctggccgagagctgggcagaggaaagtttgccgtagttaggaagtgtattaaaaaggacagcggaaaggagttcgcagctaaattcatgcgaaagcgccgaaaagggcaagactgccggatggagatcatccacgagatcgccgtgttagagctggcacaagacaacccttgggtcatcaacctacatgaagtgtacgagacagcttctgaaatgattctggtgctcgagtatgccgcaggcggagaaatctttgaccagtgcgtggccgaccgtgaagaagccttcaaggaaaaggacgtgcagcggctgatgcgccagatactcgaaggcgtgcacttcttgcataccagggacgtcgtgcatctggacctgaaaccacaaaacatcctgcttacgtcggagagcccactcggcgacatcaagattgtggactttggtctttctcggattctgaaaaactcagaagaattgagagaaatcatgggaacgcctgaatacgtggcccctgaaatactgtcatacgaccctatctcaatggctacagatatgtggtctataggagtgctcacctacgtgatgctgaccggaatctccccattcctaggcaatgacaagcaggagaccttcctgaatatctcacagatgaatcttagctatagcgaggaggaattcgatgtgctttccgagtcagctgtcgacttcatcagaaccctgctagttaagaagccagaggatagagccacagcagaggaatgcctcaaacacccctggttaacccaaagctctattcaagagccttccttccggatggagaaagccttagaagaggccaacgcgctccaggagggacacagcgtgccggaaatcaatagtgacaccgataaatccgaaaccaaagaatctattgtaaccgaggagctaatcgttgttacatcttataccctgggccaatgccggcagtccgagaaagagaaaatggagcagaaggctatctccaaacgcttcaagtttgaggagccactgctgcaggagattcccggtgagtttatctactag

SEQ ID NO: 149269 - DNA, 1245 bp, Artificial Sequence
  derived and/or modified sequence
atgatccccctggagaagcccggcagcggcggcagcagccccggcgccaccagcggcagcggcagagccggcagaggcctgagcggcccctgcagaccccccccccccccccaggccagaggcctgctgaccgagatcagagccgtggtgagaaccgagcccttccaggacggctacagcctgtgccccggcagagagctgggcagaggcaagttcgccgtggtgagaaagtgcatcaagaaggacagcggcaaggagttcgccgccaagttcatgagaaagagaagaaagggccaggactgcagaatggagatcatccacgagatcgccgtgctggagctggcccaggacaacccctgggtgatcaacctgcacgaggtgtacgagaccgccagcgagatgatcctggtgctggagtacgccgccggcggcgagatcttcgaccagtgcgtggccgacagagaggaggccttcaaggagaaggacgtgcagagactgatgagacagatcctggagggcgtgcacttcctgcacaccagagacgtggtgcacctggacctgaagccccagaacatcctgctgaccagcgagagccccctgggcgacatcaagatcgtggacttcggcctgagcagaatcctgaagaacagcgaggagctgagagagatcatgggcacccccgagtacgtggcccccgagatcctgagctacgaccccatcagcatggccaccgacatgtggagcatcggcgtgctgacctacgtgatgctgaccggcatcagccccttcctgggcaacgacaagcaggagaccttcctgaacatcagccagatgaacctgagctacagcgaggaggagttcgacgtgctgagcgagagcgccgtggacttcatcagaaccctgctggtgaagaagcccgaggacagagccaccgccgaggagtgcctgaagcacccctggctgacccagagcagcatccaggagcccagcttcagaatggagaaggccctggaggaggccaacgccctgcaggagggccacagcgtgcccgagatcaacagcgacaccgacaagagcgagaccaaggagagcatcgtgaccgaggagctgatcgtggtgaccagctacaccctgggccagtgcagacagagcgagaaggagaagatggagcagaaggccatcagcaagagattcaagttcgaggagcccctgctgcaggagatccccggcgagttcatctactag

SEQ ID NO: 149270 - protein, 777 aa, Artificial Sequence
  derived and/or modified sequence
MLPRPLRLLLDTSPPGGVVLSSFRSRDPEEGGGPGGLVVGGGQEEEEEEEEEAPVSVWDEEEDGAVFTVTSRQYRPLDPLVPMPPPRSSRRLRAGTLEALVRHLLDTRTSGTDVSFMSAFLATHRAFTSTPALLGLMADRLEALESHPTDELERTTEVAISVLSTWLASHPEDFGSEAKGQLDRLESFLLQTGYAAGKGVGGGSADLIRNLRSRVDPQAPDLPKPLALPGDPPADPTDVLVFLADHLAEQLTLLDAELFLNLIPSQCLGGLWGHRDRPGHSHLCPSVRATVTQFNKVAGAVVSSVLGATSTGEGPGEVTIRPLRPPQRARLLEKWIRVAEECRLLRNFSSVYAVVSALQSSPIHRLRAAWGEATRDSLRVFSSLCQIFSEEDNYSQSRELLVQEVKLQSPLEPHSKKAPRSGSRGGGVVPYLGTFLKDLVMLDAASKDELENGYINFDKRRKEFAVLSELRRLQNECRGYNLQPDHDIQRWLQGLRPLTEAQSHRVSCEVEPPGSSDPPAPRVLRPTLVISQWTEVLGSVGVPTPLVSCDRPSTGGDEAPTTPAPLLTRLAQHMKWPSVSSLDSALESSPSLHSPADPSHLSPPASSPRPSRGHRRSASCGSPLSGGAEEASGGTGYGGEGSGPGASDCRIIRVQMELGEDGSVYKSILVTSQDKAPSVISRVLKKNNRDSAVASEYELVQLLPGERELTIPASANVFYAMDGASHDFLLRQRRRSSTATPGVTSGPSASGTPPSEGGGGSFPRIKATGRKIARALF

SEQ ID NO: 149271 - protein, 146 aa, Artificial Sequence
  derived and/or modified sequence
MLPRPLRLLLDTSPPGGVVLSSFRSRDPEEGGGPGGLVVGGGQEEEEEEEEEAPVSVWDEEEDGAVFTVTSRQYRPLDPLVPMPPPRSSRRLRAGTLEALVRHLLDTRTSGTDVSFMSAFLATHRAFTSTPALLGLMADRLEALES

SEQ ID NO: 149272 - DNA, 2334 bp, Artificial Sequence
  derived and/or modified sequence
atgctgcccagacccctgagactgctgctggacaccagcccccccggcggcgtggtgctgagcagcttcagaagcagagaccccgaggagggcggcggccccggcggcctggtggtgggcggcggccaggaggaggaggaggaggaggaggaggaggcccccgtgagcgtgtgggacgaggaggaggacggcgccgtgttcaccgtgaccagcagacagtacagacccctggaccccctggtgcccatgcccccccccagaagcagcagaagactgagagccggcaccctggaggccctggtgagacacctgctggacaccagaaccagcggcaccgacgtgagcttcatgagcgccttcctggccacccacagagccttcaccagcacccccgccctgctgggcctgatggccgacagactggaggccctggagagccaccccaccgacgagctggagagaaccaccgaggtggccatcagcgtgctgagcacctggctggccagccaccccgaggacttcggcagcgaggccaagggccagctggacagactggagagcttcctgctgcagaccggctacgccgccggcaagggcgtgggcggcggcagcgccgacctgatcagaaacctgagaagcagagtggacccccaggcccccgacctgcccaagcccctggccctgcccggcgacccccccgccgaccccaccgacgtgctggtgttcctggccgaccacctggccgagcagctgaccctgctggacgccgagctgttcctgaacctgatccccagccagtgcctgggcggcctgtggggccacagagacagacccggccacagccacctgtgccccagcgtgagagccaccgtgacccagttcaacaaggtggccggcgccgtggtgagcagcgtgctgggcgccaccagcaccggcgagggccccggcgaggtgaccatcagacccctgagacccccccagagagccagactgctggagaagtggatcagagtggccgaggagtgcagactgctgagaaacttcagcagcgtgtacgccgtggtgagcgccctgcagagcagccccatccacagactgagagccgcctggggcgaggccaccagagacagcctgagagtgttcagcagcctgtgccagatcttcagcgaggaggacaactacagccagagcagagagctgctggtgcaggaggtgaagctgcagagccccctggagccccacagcaagaaggcccccagaagcggcagcagaggcggcggcgtggtgccctacctgggcaccttcctgaaggacctggtgatgctggacgccgccagcaaggacgagctggagaacggctacatcaacttcgacaagagaagaaaggagttcgccgtgctgagcgagctgagaagactgcagaacgagtgcagaggctacaacctgcagcccgaccacgacatccagagatggctgcagggcctgagacccctgaccgaggcccagagccacagagtgagctgcgaggtggagccccccggcagcagcgacccccccgcccccagagtgctgagacccaccctggtgatcagccagtggaccgaggtgctgggcagcgtgggcgtgcccacccccctggtgagctgcgacagacccagcaccggcggcgacgaggcccccaccacccccgcccccctgctgaccagactggcccagcacatgaagtggcccagcgtgagcagcctggacagcgccctggagagcagccccagcctgcacagccccgccgaccccagccacctgagcccccccgccagcagccccagacccagcagaggccacagaagaagcgccagctgcggcagccccctgagcggcggcgccgaggaggccagcggcggcaccggctacggcggcgagggcagcggccccggcgccagcgactgcagaatcatcagagtgcagatggagctgggcgaggacggcagcgtgtacaagagcatcctggtgaccagccaggacaaggcccccagcgtgatcagcagagtgctgaagaagaacaacagagacagcgccgtggccagcgagtacgagctggtgcagctgctgcccggcgagagagagctgaccatccccgccagcgccaacgtgttctacgccatggacggcgccagccacgacttcctgctgagacagagaagaagaagcagcaccgccacccccggcgtgaccagcggccccagcgccagcggcaccccccccagcgagggcggcggcggcagcttccccagaatcaaggccaccggcagaaagatcgccagagccctgttctag

SEQ ID NO: 149273 - DNA, 441 bp, Artificial Sequence
  derived and/or modified sequence
atgctgcccagacccctgagactgctgctggacaccagcccccccggcggcgtggtgctgagcagcttcagaagcagagaccccgaggagggcggcggccccggcggcctggtggtgggcggcggccaggaggaggaggaggaggaggaggaggaggcccccgtgagcgtgtgggacgaggaggaggacggcgccgtgttcaccgtgaccagcagacagtacagacccctggaccccctggtgcccatgcccccccccagaagcagcagaagactgagagccggcaccctggaggccctggtgagacacctgctggacaccagaaccagcggcaccgacgtgagcttcatgagcgccttcctggccacccacagagccttcaccagcacccccgccctgctgggcctgatggccgacagactggaggccctggagagctag

SEQ ID NO: 149274 - DNA, 2334 bp, Artificial Sequence
  derived and/or modified sequence
atgcttcccagacctctgcgcctactgcttgacacatcccctcccgggggcgtcgtcctgtctagtttcaggagcagagaccccgaggaaggcggaggccccggcggtttggttgtcggcggcgggcaggaggaagaagaggaagaggaggaggaggcccccgtgagcgtgtgggacgaagaggaagatggagccgtgttcaccgtgacttcacgccaatataggccgctggacccgttggtacccatgcctccaccgcgatcctcaaggcgcctccgagccggcacccttgaagctttagtacgtcatctactcgacacccgcacgagcggcactgacgtgagtttcatgtccgctttcctcgctacccaccgcgctttcacctccacgcctgcccttctgggcctgatggccgataggctggaggccctggagtcacatccaactgacgagctcgagcgcaccactgaggttgctatcagtgtcttgtcaacatggctcgcatcacacccagaggacttcggctctgaggccaaaggacagctcgatcggctcgagtcgttcttactccagaccggatatgccgccggtaaaggtgtcggaggggggtctgcggatttaattcgcaacctgcggtcccgtgtggacccgcaggcgcccgatctgcccaagcccctggcattacccggtgacccaccagcagaccccaccgacgtgttggtgttcctggctgatcatctggctgaacaactaactttgttggacgcagagttatttctaaatttgatcccaagccagtgcctgggaggactgtggggccacagggatagacctgggcactctcacttgtgcccttccgtccgcgctactgtgactcagttcaacaaagtggccggcgccgtggtgagtagcgttttgggcgccaccagtaccggtgaagggccaggcgaggttacaatacgcccactgaggcctccccagagggccaggctgctggagaaatggatccgggtcgcagaggagtgtcggttgctgagaaacttctcatctgtttacgcggttgtgtcagcgcttcagagcagtcctatccataggctgcgagccgcgtggggggaggccacgagagactctctgcgcgtgtttagcagcctgtgtcagatatttagcgaagaggacaattacagccagtctcgcgaattgctcgtgcaggaggttaagctccagtcaccactggaacctcactctaaaaaagcccctcgctccggctccagaggtggcggagtggtgccttatctgggtaccttcctgaaagatttggtaatgctggatgccgcctctaaagatgagctggagaatggatacatcaacttcgataagcgcaggaaagaatttgccgtgctatccgaactcagaaggctgcagaacgagtgtcgaggttacaatttgcagccagatcacgacatccagcggtggttacagggcttacgacccctcacagaggcccagtctcacagagtgtcctgcgaggtcgaacctccgggctcgtcagacccccctgcaccacgggtgctcagacctacactggttatcagtcagtggaccgaagttctgggatctgtgggggtacctactccactggtctcatgcgataggcccagtacggggggcgacgaagctccaaccacgcctgcaccactactgacacgactggcccagcatatgaagtggccctcagtgtccagcctggacagcgcactcgagtccagtccgtccctgcatagccctgcagaccccagccacctgagcccaccagcatcttctccgagaccgtcccggggccaccgccggtccgcttcatgcggatctcccctctccggcggcgccgaagaagcatctggtggcactggatatggcggggagggtagcgggcccggagcaagtgactgcagaatcattcgagtgcaaatggaactcggagaagatgggtccgtgtacaagtcaattctggtcacaagtcaggataaggctccaagcgtgatttctagggtactcaaaaagaataatcgcgattccgccgtggcgagtgaatacgagctcgttcagcttctacctggggagcgtgagctgacaattcctgcatccgcaaacgtgttttatgccatggatggagcaagccacgacttcttgctccgacaaagaaggcgtagctcaacagcaacgccaggtgtgaccagcggcccatccgctagcggcactcccccaagtgagggcggcggggggtcatttcctcggatcaaagccactgggcgtaagattgcccgcgcccttttttag

SEQ ID NO: 149275 - DNA, 441 bp, Artificial Sequence
  derived and/or modified sequence
atgctgcccaggcctcttcgtctgctcctggacacaagcccaccaggtggggtagtgctgtcctcctttcgctctagagatcctgaagaaggcggtggtcctggtggcctagttgtcggtgggggccaggaagaggaagaagaggaggaggaggaggccccagtgagcgtgtgggatgaggaggaggacggggcagtgttcacagtgaccagcagacagtatagaccactcgatcctctggtcccaatgccacctcccagatcctccagaagattgcgggctggaaccctcgaggcactggtgaggcaccttctggatacgcgcacatcaggaaccgacgtgagctttatgagtgccttcttagcaacacatcgtgcatttacaagcactcctgctctgctgggactcatggccgatcgtctggaggccttggagtcttag

SEQ ID NO: 149276 - DNA, 2334 bp, Artificial Sequence
  derived and/or modified sequence
atgctgccccgaccattgcggctgttactcgacaccagtccacccggaggcgtggtgctgagtagttttcggtctcgtgacccagaggaaggtggcggaccaggaggtttggtagtaggagggggccaggaagaagaagaagaagaggaggaggaggcccccgtcagcgtttgggatgaagaagaagatggcgcagtcttcaccgtaacctcaagacaatatcgaccactcgaccctctggttccgatgcctccgcccaggtcctcccggagattgcgggcaggcacactcgaagcactggtgagacatttactggatacgcggaccagtggcacagatgtatcgtttatgtccgcatttcttgccactcaccgtgctttcaccagtaccccagcattgttggggctaatggccgatcggttggaagctctggagtctcatccgactgacgaacttgagcggacaactgaggtggcaatctctgtgctatctacatggttggcaagtcatccagaagatttcggaagcgaggccaagggccaacttgatcggcttgagtcattcctattgcagaccggctacgctgcaggcaaaggcgtgggaggaggcagcgctgacctcattagaaacctgagaagcagggttgatccacaggcacctgacctgccaaaacctctggcccttccgggagaccctcccgccgatcccacagacgtcctcgtctttctggctgatcacctagcagaacagttaactttgcttgatgccgaacttttcctaaacctaataccctcccagtgtctgggcggcctttgggggcacagggatcggcctggccactcccatctctgtccgtcagtacgtgcgacagtgacgcagtttaataaagtcgccggggcagttgtaagttctgtgctcggagcaacgtcaactggcgaaggccccggcgaagttaccattaggcctctcaggcctcctcagcgggccaggttgttagagaagtggattagggtggccgaagaatgtcgcctgcttagaaacttcagttcagtgtatgcagttgtcagtgcgctgcagtcgtcacctatacacaggctccgcgcggcctggggtgaagccacgagggacagcttaagggtgttcagtagcctttgtcaaatcttctccgaagaggataactattcccagtcacgtgaactgctcgtccaggaagtgaagctgcaatcccccctggagccgcactcgaagaaggcacccaggtccggttctaggggcggcggtgttgtgccttacttggggacatttctgaaagacttggtgatgctggacgctgcaagcaaggacgagctggaaaacggatacataaatttcgacaaacgtcgtaaagaatttgcggtgttatctgagctgcgcagactccaaaatgagtgccgcgggtataacctgcagcccgaccacgatatccagcgctggctacaaggactgcgccctctgaccgaagctcagtcacatcgcgttagttgcgaggtcgaaccgcctggaagctccgacccacccgcgccaagggtgcttaggcctacacttgtaatctcacagtggacagaggtgctcggctctgtgggagtgcccacgccgctcgtgtcatgtgaccgcccaagcacaggtggagacgaggctcctactacacctgcaccactactcaccagactcgcccagcacatgaagtggcccagtgtgtcctccctggattcagcgctcgagtctagtcccagtttacacagccccgctgacccctctcacctgagtccaccggccagctcccctagaccaagccggggccaccgccggagcgctagttgcggctcacctctgagcggaggagcagaagaggcttccgggggaaccggttacggcggtgaggggagcggaccgggagccagcgattgtagaataatacgcgtacagatggaacttggagaggatgggtccgtgtataagtccatcctagtcacatcgcaggataaggctccttcggtcatatctcgcgtactcaaaaaaaacaacagggactcagcagttgcatccgagtatgagctcgtgcagttacttccgggagagcgagagctgacaatcccggcaagtgcgaacgtgttttacgccatggatggggccagccatgatttcctgctccgccagagaagacgaagttccacggcaacacctggagtcacatcaggcccgtctgcctccgggacgccaccttctgaaggcgggggcgggtctttcccacgaattaaggccaccggccgcaagattgcacgcgcgttattttag

SEQ ID NO: 149277 - DNA, 2334 bp, Artificial Sequence
  derived and/or modified sequence
atgctgcctcgacctttacgactgctactcgacacctctccccccggcggggtcgtgctcagcagttttcgatcccgggacccagaagagggaggaggcccgggaggcttggtggttggcggcgggcaggaggaggaagaagaagaggaagaagaagccccagtctcagtgtgggatgaggaggaggacggagctgtgttcaccgttaccagccgccagtacagaccgctggatcctctggtgcccatgccccccccccggtcctctcgcagactcagggctgggacactcgaggctcttgttagacatcttctggatacaaggacctccggtaccgacgtgagctttatgagcgcatttctagctactcaccgggcctttacgagtacccctgcgcttttgggcctcatggcggacagactcgaagcactcgagtctcatcctactgacgaactcgagagaacaacggaggtggccatttcggtgctatccacctggctggccagtcaccctgaagactttggatcggaggctaagggccagctcgaccgtctggagtcattcttgttgcagacaggttacgccgccggcaaaggcgtcggcggcggaagcgctgatctgatccgtaacctccgcagtcgggtcgaccctcaggcacccgacctcccgaaacccctggccctgccaggcgaccctcctgcagatccaaccgatgtgctggtgttcctggccgaccacctcgctgagcagttaaccctgctagatgccgaactgtttcttaacttgattccatcgcagtgtttgggtggactttggggacaccgggacagaccaggccacagccacctttgtccgagtgtgcgcgcgaccgtgacgcagttcaataaggtagctggcgccgtggtcagttcagttctcggggccacatctacgggtgagggacccggggaagtcaccattaggcccctgcggcccccccagcgcgcccgactgcttgagaagtggatcagggtagccgaggagtgcaggctgctccgaaactttagctcagtatatgcggtcgtaagcgccctacagtcaagcccgatccaccggctcagggctgcttggggagaagctacgagagattcactgcgagtcttcagctccctatgtcagatttttagcgaagaggataactatagccaatcacgggaactcttggtccaggaagtaaaactacaatccccattggagcctcatagcaaaaaggccccacgctcaggaagtcgcggaggtggtgtcgtgccttaccttggaacatttttgaaagacctcgtcatgcttgacgctgccagtaaagatgaactggagaacggctacatcaactttgataagcgtcggaaggaatttgcagtcctgtccgagctccgtaggctgcaaaacgagtgcagaggctataatttgcaacctgatcacgatattcagagatggcttcaaggcctcagacctctcactgaagcccaatcccaccgggtctcctgcgaggtagaacctccaggttctagcgatccgcccgccccacgcgttttgcgccccacactggttatcagccagtggacagaagtactgggatcagttggcgtgccaaccccactggtgtcatgcgacagaccctccacagggggcgatgaagctcctacaacacccgctccccttctaacccggctcgcccagcacatgaaatggccctccgtgtcatccttggactctgcccttgagtccagccctagtctccactcccccgctgaccccagtcacctgagcccgccggctagctccccaagaccttctagagggcacagacgaagcgcctcatgcggttcgcctctgtcggggggcgctgaggaggcctccggtggcacggggtatggaggtgagggctcgggaccaggggcctcggactgtcgcattattagggtacaaatggagctgggtgaggatgggtcggtgtataagtcgatcctggtgactagtcaggacaaagcgccatccgtgatctcccgcgtgctgaagaaaaacaacagggattcagctgtggcctcggaatacgagctagtgcagctgctgcctggcgagcgggagctgaccatcccggcctctgccaacgtgttctacgcaatggatggcgccagtcatgatttccttttacgccagcggagacgtagcagcacagcaaccccgggagtgacaagcggaccttcagcaagcggtactccccctagcgaaggcggaggcggctctttccctcgcatcaaagcaacaggccggaaaattgcaagagcgttattctag

SEQ ID NO: 149278 - DNA, 441 bp, Artificial Sequence
  derived and/or modified sequence
atgctgccccgacccctgcggttattgttggacacatcaccgccgggaggcgtggtgctgtcgtcttttcggagtcgtgatccagaggaaggggggggtccaggaggcctggtagtgggaggaggccaagaggaggaggaagaggaagaggaagaggcaccagtttctgtatgggacgaagaggaagacggtgccgtctttacagtcacatctcgccagtacaggccactggacccattggttccaatgcctccccctagaagttctcggcgcttgcgagctgggaccctcgaggccctcgtacgtcacctcctggatactcggacctcgggcaccgatgtttcatttatgagcgcttttctcgcaactcatagggcttttacatccacgccagccctgctggggctcatggcggaccgcctggaagccctagagtcttag

SEQ ID NO: 149279 - DNA, 441 bp, Artificial Sequence
  derived and/or modified sequence
atgcttcctcgaccactgcgcctcctgctggacacgtcccccccaggcggcgtcgttctgtcttcgtttaggtctcgtgatcccgaagaaggcggtgggcccggaggcctcgtagttggaggaggacaggaggaggaggaggaagaagaggaggaagctcctgtcagcgtatgggacgaagaagaggatggtgctgtgtttacagtgacttccaggcagtatcggccccttgatcctctggtgcctatgccacccccgcggtcttcacgcaggcttcgggccggcacattggaggctctagtgaggcacctgctggacacgaggacttccggaaccgatgtgtcattcatgtctgcattcctggcaacacacagagccttcactagtacccctgctctgttaggcctcatggctgaccgattagaagctctggagagctag

SEQ ID NO: 149280 - DNA, 441 bp, Artificial Sequence
  derived and/or modified sequence
atgctgccgcgtcccctgaggttattgctggacacgagtccccccgggggagtggttctttcgagcttcaggagtcgcgaccctgaggaagggggcggacccgggggactggtggtgggcggtgggcaagaagaggaggaggaggaagaagaagaggccccagttagtgtctgggatgaagaggaagatggcgccgtgttcaccgtaacgtccaggcagtaccgaccacttgatccgctcgtgccaatgcctccccctcggtcctcccggagactgcgggcgggaacattggaagctcttgtgcggcatttgctcgacacaaggacatctggcactgacgtgtctttcatgtccgcttttctggcaactcatagggcttttactagtacccccgctctactaggtctcatggctgacagacttgaggctctggagtcctag

SEQ ID NO: 149281 - DNA, 2334 bp, Artificial Sequence
  derived and/or modified sequence
atgctcccaaggccgctgagactgctcctcgacacatcccctccaggtggcgtagttctctcaagtttccggtcaagggatcccgaagaaggaggaggaccgggaggcctcgtcgtgggcggagggcaggaagaggaagaggaggaggaggaggaggccccagttagcgtgtgggacgaagaagaagatggagctgtgttcaccgtgacatctagacagtacaggcccttggatcccttggtgccaatgccgccccctagaagctctaggcggcttcgggcggggaccttggaggccctcgtgcgtcacctgctcgatacgcgcactagcggtaccgacgtctcattcatgagcgcatttctcgctacccacagagcattcacctcaaccccagccctgctcggactcatggcagacaggctcgaggccctcgagagccatccgacggacgagctcgagagaacaactgaagtggccatttccgtgttgtcaacatggttggcctctcacccagaagacttcgggtccgaggctaaagggcagctagatcggctcgagtcttttctgttacagactggttacgctgcgggaaagggcgttggtggaggcagcgccgatctgattaggaacttgcggtccagagtggatccacaagcccccgacttaccgaaacctctcgccttgcccggagaccctcctgctgaccctacagatgtgttggtgtttcttgccgatcacctcgccgagcagctgactctgctggatgcggaactctttctcaacctcatccccagtcagtgccttggcgggctttggggccatcgcgatcgccccgggcactctcatctgtgcccctcggtgcgtgcgaccgtaactcagtttaataaagtcgccggcgctgtcgtctcatccgtcctcggcgcaacaagtacaggtgaaggacccggagaggtgaccatcaggcctctccggcctccccagcgcgctaggttgctggagaaatggatcagggtcgcagaggaatgtagactactcagaaacttctccagcgtgtacgctgttgtgtcagccctgcagtcctcgcccatccatcggctcagggcagcctggggagaggccacacgcgactcactgcgtgttttctcctctttgtgccagatctttagcgaggaagacaattacagccagtctcgggaactactcgttcaggaggtgaagctgcaaagtcctcttgagcctcattctaagaaggcacctcggtccggaagccggggcgggggagtggttccttatcttggtacattcctgaaggaccttgtcatgctggacgccgcatcaaaggatgaactggagaacggatacattaactttgataaacgccgtaaggagtttgccgtgctgtccgagctaaggcggctccaaaacgagtgtcgcggctataacctccagcccgaccacgacatccaaaggtggttgcagggcctaaggccactcaccgaggctcagtcacaccgcgtgagctgtgaggtggagcccccaggatcttctgacccaccagctccacgagtccttcgacctaccctggtgatatcccagtggacagaggtactgggatcggtgggggtcccgacccctctcgtttcttgtgacagaccgtctacgggtggggacgaagcacctacgacaccggcccctctgctgacccggctggcccagcacatgaagtggccgtccgtgtcttcgctagactccgcactggagtccagcccttctctgcattcacccgccgatcctagccacttgtcgcccccagcgtcgagtcccaggccatccagaggacacagaaggagcgcaagttgtgggtctccactctccggaggagccgaagaagcctccggtgggactgggtacggtggagaggggtctggccctggggcaagcgattgtcgaattattcgggtgcagatggagcttggcgaagatggttccgtgtacaagtccattttggtgacatctcaggataaggcgccatcagttatatcccgggtcttgaagaaaaataaccgggactccgctgtggcgagcgaatatgagctagtccagctgctccctggtgagcgtgaattgaccatcccagccagtgccaacgtgttctacgctatggacggcgcgtcacatgattttctcctcagacaaagaaggcgatcttccaccgccactccgggggtcactagtggtccttcagcttctggcacaccgccatctgaaggaggcgggggatctttcccgcggataaaagccaccggtcgtaagatcgcaagagcactcttctag

SEQ ID NO: 149282 - DNA, 441 bp, Artificial Sequence
  derived and/or modified sequence
atgctgcccaggccactccgcctgttgctcgacacctctccccctgggggagtggtgctcagttcgttccggtctcgcgacccagaggagggcggcggccctggaggcctcgtggtcggtggcggacaggaagaggaggaagaggaggaagaggaggccccggtcagcgtctgggatgaggaagaagatggcgcagttttcaccgtcacctctaggcagtatcgtcccttagatccgctcgtgccgatgcctccaccccgctcctcaaggcgcctgcgtgccggaacgcttgaggctttggtacgtcaccttctcgatacaaggacttccgggacggatgtttccttcatgtccgcctttttagctacacacagggctttcacgagtacccccgcactcttggggctgatggcagaccgtttggaggctctggagtcatag

SEQ ID NO: 149283 - DNA, 2334 bp, Artificial Sequence
  derived and/or modified sequence
atgttgccaagaccactccggctcctcctcgatacctctccccctggtggagtggtgctcagctcttttcggtcaagggaccctgaggaaggcggtgggcccggcggcctggtggtcgggggaggacaagaggaggaagaggaagaagaggaggaggcacctgttagcgtctgggatgaagaagaggacggcgccgtctttaccgtcacaagccgacagtataggccccttgaccctctagtccctatgccacccccacgcagctctagaagactcagggccggcacactcgaagcccttgtccgccatcttctggacacaaggacctccggtaccgacgtcagtttcatgagcgcatttcttgcaacacatagggccttcacaagcacacctgctttactgggcctgatggctgatcggctggaagcgctggaaagccatccaactgacgagcttgaacggacgaccgaagtggcaatttccgtgctgtcaacatggctggctagccaccccgaggattttggaagtgaagcaaaggggcagctggaccgactggagtctttcctcctgcagacaggttatgccgcaggcaagggcgtcggcggcggctctgctgatcttatcagaaatctccgcagtcgcgtggatcctcaggcgcctgatttgccaaaacccctagcactgcccggagaccctcctgcagatccaacagacgtcttggtgttcctggcagaccacctagccgaacagctgaccttactggatgccgaattgtttctgaacctgatacctagccagtgcctcgggggtctgtggggtcaccgagaccgtccaggtcactcccatctttgtccatcagttagggcaaccgtgacccaattcaataaagtggcgggggccgtggtatccagcgtcctcggagccacctccactggggagggaccaggtgaagtcacaatacgacccctacggccaccgcaaagggctagattactggaaaagtggattagggtggctgaggaatgccggcttctgaggaatttctcctccgtgtacgcggttgtctctgctctccagagttccccgatccaccggttgcgcgctgcctggggagaggccacccgcgatagcttacgggttttttcctccctgtgtcaaatattttcggaggaggataactacagccaaagtagagaactgcttgtccaggaagtgaagctgcagtcgcctctggaaccacacagcaaaaaagcccctcgatccggatctagggggggtggcgtggtgccttatttaggtacctttcttaaagacctagtaatgctggacgctgctagcaaggatgaactggagaacgggtacattaatttcgataaacgccggaaggagttcgctgttctgtctgaactccggcgcttgcagaatgaatgcaggggatataacctgcaaccagatcacgacatccaaaggtggctgcagggtctccggcctttgacagaagcacaatcgcacagggtgtcttgtgaggttgagcctcccggaagctctgatcctcctgcacccagggttctgaggcctaccctggttatctcacaatggaccgaagtgttgggctcagtcggagtgccgacccccttggtgtcttgtgaccgcccatctactgggggcgacgaagcaccaactaccccagcccccctccttacacgcctggctcagcacatgaagtggccatctgtgagttccttagattctgctcttgagagcagcccttcccttcatagcccggccgaccccagccacctcagtcccccagcctcttcaccccggccatcacgggggcaccggagatccgcaagctgcggatccccactatctgggggggcagaggaggcgagtggagggaccggctacggcggagaggggtcgggtcccggagcttctgactgtaggataatacgggtgcaaatggaattgggtgaagacggctctgtgtacaagtccatactagtgacttcacaggataaagctccgtctgtcatttcccgagtcctgaaaaagaataatcgggattccgccgtggcctctgaatacgaattagtccaactcctgccaggcgagcgggaattgacaatccctgcaagcgcgaatgtcttctatgctatggatggagctagtcatgatttcttactgcgtcagcgcaggagatctagcacagctaccccgggcgtgacctccggaccctcagcgtcaggcacgccacctagcgaaggggggggtggctcattccctaggatcaaggctacgggacggaaaattgcgagggccctgttttag

SEQ ID NO: 149284 - DNA, 2334 bp, Artificial Sequence
  derived and/or modified sequence
atgctgccccggcccctgcggctgctgctggacaccagccccccaggaggagtggtgctgagcagcttccgcagccgggaccctgaggagggcggcggccctgggggcctggtggtgggcggcggccaggaggaggaggaggaggaggaggaggaggcccctgtgtctgtgtgggatgaggaggaggatggagctgtgttcaccgtgaccagccggcagtaccggcccctggaccccctggtgcccatgcccccacccaggagcagccggcggctgcgggccggcaccctggaggccctggtgcgccacctgctggacaccaggaccagcggcacagatgtgtccttcatgtctgccttcctggccacccaccgggccttcaccagcaccccagccctgctgggcctgatggctgaccggctggaggccctggagagccaccccacagatgagctggagaggaccacagaggtggccatctctgtgctgagcacctggctggccagccaccctgaggactttggcagcgaggccaagggccagctggaccggctggagagcttcctgctgcagacaggctatgctgctgggaagggcgtgggcggcggcagcgctgacctgatccggaacctgcggagccgggtggacccccaggccccagacctgcccaagcccctggccctgcccggggaccccccagctgaccccacagatgtgctggtgttcctggccgaccacctggccgagcagctgaccctgctggatgctgagctgttcctgaacctgatccccagccagtgcctgggcggcctgtggggccaccgggaccggcccggccacagccacctgtgccccagcgtgcgggccaccgtgacccagttcaacaaggtggccggggctgtggtgtcctctgtgctgggcgccaccagcactggagagggccctggagaggtgaccatccggcccctgcggcccccccagagggcccggctgctggagaagtggatccgggtggccgaggagtgccgcctgctgaggaacttcagctctgtgtatgctgtggtgtctgccctgcagagcagccccatccaccggctgcgggccgcctggggcgaggccacccgggacagcctgcgggtcttcagcagcctgtgccagatcttcagcgaggaggacaactacagccagagccgggagctgctggtgcaggaggtgaagctgcagagccccctggagccccacagcaagaaggcccccaggagcggcagcagaggaggaggagtggtgccctacctgggcaccttcctgaaggacctggtgatgctggatgctgccagcaaggatgagctggagaatggctacatcaactttgacaagaggaggaaggagtttgctgtgctgtctgagctgcggcggctgcagaatgaatgtcggggctacaacctgcagcctgaccatgacatccagcgctggctgcagggcctgcggcccctgacagaggcccagagccaccgggtgtcctgtgaggtggagcccccaggcagcagtgaccccccagccccccgggtgctgcggcccaccctggtgatcagccagtggacagaggtgctgggctctgtgggcgtgcccacccccctggtgtcctgtgaccggcccagcactggaggagatgaggcccccaccaccccagcccccctgctgacccggctggcccagcacatgaagtggcccagcgtgagcagcctggacagcgccctggagagcagccccagcctgcacagccctgctgaccccagccacctgagccccccagccagcagcccccggcccagccggggccacagaagaagtgccagctgtggcagccccctgtctggaggagctgaggaggccagcggcggcaccggctatggaggagagggcagcggccctggggccagtgactgccgcatcatccgggtgcagatggagctgggggaggatggctctgtgtacaagagcatcctggtgaccagccaggacaaggcccccagcgtcatcagccgggtgctgaagaagaacaacagagattctgctgtggcctctgaatatgagctggtgcagctgctgcccggggagcgggagctgaccatcccagccagcgccaacgtgttctacgccatggatggagccagccatgacttcctgctgcggcagaggcggcgcagcagcacagccaccccaggagtgaccagcggccccagcgccagcggcaccccaccttctgagggcggcggcggcagcttcccccgcatcaaggccaccggcaggaagatcgcccgggccctcttctag

SEQ ID NO: 149285 - DNA, 441 bp, Artificial Sequence
  derived and/or modified sequence
atgctgccccggcccctgcggctgctgctggacaccagccccccaggaggagtggtgctgagcagcttccgcagccgggaccctgaggagggcggcggccctgggggcctggtggtgggcggcggccaggaggaggaggaggaggaggaggaggaggcccctgtgtctgtgtgggatgaggaggaggatggagctgtgttcaccgtgaccagccggcagtaccggcccctggaccccctggtgcccatgcccccacccaggagcagccggcggctgcgggccggcaccctggaggccctggtgcgccacctgctggacaccaggaccagcggcacagatgtgtccttcatgtctgccttcctggccacccaccgggccttcaccagcaccccagccctgctgggcctgatggctgaccggctggaggccctggagagctag

SEQ ID NO: 149286 - DNA, 2334 bp, Artificial Sequence
  derived and/or modified sequence
atgctgccccggcccctgcggctgctgctggacaccagcccccccgggggagtggtgctgagctctttcagatcccgggatccagaggagggtggcggccctggtggcctggttgtgggaggcggccaggaggaagaggaggaagaagaagaggaagcccccgtgtccgtctgggatgaggaggaagacggcgccgtgttcacggtgacatcaagacagtataggcccctggatccactggtgcccatgccacctccaaggagttcgagacggttgcgcgccggcacactggaagccctggtccgtcacctgctggacacaagaacctcgggtacggatgtgtcatttatgagtgcattcttagccacacacagggcctttacctccacccccgcactcttaggccttatggcggaccgcctggaggcactggaatctcacccaaccgatgaactcgagcggacgactgaggtggcaataagcgtcctaagcacatggctggcttctcacccagaggatttcggctcagaggccaagggacagctggacagactcgagagttttctgctgcaaaccggttacgcagccgggaaaggggtgggaggaggcagcgccgatctgatcaggaatctgcgcagccgcgtagaccctcaagcgccagaccttcccaagcctcttgccctgcccggcgaccctccggcggaccccaccgacgtgctggtgttcttggcagatcatctggctgagcaactgactctccttgatgcggagttgttcctcaatttgattccgagtcagtgtctgggtggcctgtgggggcatcgagaccgtccaggacatagccatctttgcccttcagtacgggcaactgtgacgcaattcaataaggttgctggcgctgtcgtgtcatctgtcctcggcgctaccagcacgggagaggggcctggtgaggtaacaatccggcctctgaggcccccccagagagctcggttgttagagaagtggataagggtggctgaggagtgtaggctgctgaggaatttttcctcggtttacgccgtggtgtctgcccttcagagctctccaattcatcgactcagagctgcatggggggaggcaacacgcgattccctccgcgtattctcttccctgtgccaaatcttcagcgaggaggacaattactcccagagccgagaactcttggtccaggaggtgaaactacaaagcccacttgaacctcactccaagaaagcgcccagatccggaagtagggggggaggagtggtgccctacctgggaacctttctgaaggatctggtgatgctggatgcggcctctaaggatgagctagaaaatgggtatatcaacttcgataagcgcagaaaggaattcgcagttctatctgagctgagacggttgcagaatgaatgccgcggttacaacctccagcccgaccacgatattcaacggtggctccaggggctccggccactcacagaggctcagagtcaccgagtgtcctgcgaagtggagcctcccggaagtagtgaccctccggcgcccagagtcctaagacctacgctggttattagccagtggactgaggtgctgggaagcgttggggtacccacaccactggtgagctgcgatagaccttcaaccggaggcgatgaggcacctacaaccccggcccctcttctcacgagactcgcccagcacatgaagtggccttcagtgtcctcactcgattctgcgctcgagagcagccctagtctgcattcccccgctgacccatcacacctgtccccccccgctagttccccacggccttcccgcgggcatagacgcagtgccagttgtggatcccccctctcaggcggtgccgaggaggcctctggtggtaccggttacggtggtgaaggatctggacccggcgcctcagactgccgtattattagggttcagatggagctcggagaggatggatcagtctataaatctatcctagtgaccagccaggataaggcaccatccgttatcagcagagtgcttaagaagaacaatcgcgattcggccgtcgccagcgagtacgaacttgtgcagctattgcccggggagagggagctgacgatccctgcgagtgcaaatgttttttatgctatggatggggccagtcacgactttttgctgagacagcggcggagatctagcaccgcaactcccggcgtgacatcaggaccttccgcctccggaactcctccctctgaagggggcggaggcagctttcccagaattaaagcaactggccggaaaatcgcacgagccttattctag

SEQ ID NO: 149287 - DNA, 441 bp, Artificial Sequence
  derived and/or modified sequence
atgctgccccggcccctgcggctgctgctggacaccagcccccccgggggcgttgtgttgtcgtccttcagatcccgagaccccgaggaaggaggagggcccggaggcctcgtggtggggggcggccaggaggaggaggaggaagaagaagaagaggccccagtgagtgtgtgggacgaagaggaagatggcgccgtcttcaccgttacctcaagacagtatagacccctggatccattggttcctatgccacccccacgttccagtcggcggctgcgcgcagggacacttgaagcactcgttaggcacctgctcgatactagaacaagcgggactgacgtcagcttcatgtcagccttcctggctactcaccgcgcttttaccagcacccccgccctgttgggacttatggctgaccggttggaagcattggagagctag

SEQ ID NO: 149288 - DNA, 2334 bp, Artificial Sequence
  derived and/or modified sequence
atgctgccccggcccctgcggctgctgctggacaccagcccccccggtggcgtggttttgagcagcttccgttcacgggaccctgaagaaggagggggccccgggggactggtggtcggcggtggacaagaggaagaagaggaagaggaagaagaagcacctgtgagtgtgtgggacgaggaagaagacggcgctgtgttcacagtcactagtcgccaatataggcccctggatcctcttgtgccaatgccaccccctagatcatccagacgcctgcgcgctggaacacttgaagctctggtgaggcacctgctggacacgcgcacttccggtacagatgtttcatttatgagcgcatttctggctacccaccgggcgttcacgtctacgccagcactgctcggcctcatggcagatcggctggaggcccttgagtctcatcccacagatgagctcgagcgaacaacagaagtcgccatcagcgtgctgagcacatggctggcttcccaccccgaggatttcggctccgaagccaaagggcagcttgatcggttggagagctttttgctgcagactggttatgcagcaggaaagggcgtggggggtggctccgcagatctgatcaggaacttgagatccagagtagatccacaggcgcccgatttacccaaacccctggccctccccggggatccccctgctgaccccactgacgtccttgtcttcctcgccgaccacctcgctgagcaacttacacttctcgatgcggagcttttcctgaatctcattccgtctcagtgcctgggtggcctgtgggggcaccgcgaccggccgggacactctcatctgtgccctagtgtcagggctacagttacccagttcaataaggtggccggagctgtggtgagctcagtgctgggcgcaacctccaccggggaagggccaggagaggttaccattaggcctctgcgcccaccacagagggcgcggctgctggagaaatggattcgcgtagcagaggagtgcaggctcctgcggaattttagttccgtgtatgctgtcgtttctgcactacaatcttccccaatccatcgtcttagagctgcatggggcgaggccaccagggactcattaagagtattctcctccctttgccagatcttcagcgaggaggacaactacagtcaatcccgagagctgctggtgcaagaagtgaagctccagtcgcctctggagccccactccaaaaaggcccctcggagtggatccaggggcggcggcgtggtcccatatctcggcacattcctcaaggacttagttatgctggacgccgcctcaaaggatgagttggaaaatggctatataaactttgacaagagacgaaaagagtttgccgtactgagcgagctgcggagactgcagaacgaatgtagaggatacaatttgcagcctgatcacgatatccagcggtggctgcagggcctccgcccactcaccgaggcccagagtcatagagtatcttgtgaggtcgaaccccccgggtcttccgacccgccagcccctagggtccttaggcctactctggttatctcacagtggacagaggttctggggagcgtcggcgtccctactcccctcgtgagctgcgataggccaagcacaggtggggatgaggcacctactactcccgcccctctattaactaggctggcgcagcacatgaaatggccttccgtttcttctttggactccgcattagaaagttcacccagccttcatagtcccgccgatcctagtcacctcagtccccctgcaagctctcctaggccctctagaggccacagaagaagcgcctcgtgcggctctccactgagcgggggcgcagaagaagcgtctggtggaacaggatatggaggggaaggttcagggccaggggccagcgactgtagaatcataagggtacagatggagctcggcgaggatggctccgtgtataaatccatcctggttacgagccaggacaaggcaccgtctgtaatcagccgggtcctgaagaagaataacagggattccgcagtggcctctgagtatgaactggtacagctgctccccggcgaacgggagttaacaatacccgccagtgccaatgttttctacgctatggacggcgccagccacgatttcttgttgaggcaacggcggcggagcagcaccgctacccctggcgtgacaagcgggccttcagccagcggaacccccccttcagaaggagggggcgggtcctttcctagaatcaaagcgaccggcaggaaaattgcccgggctctcttctag

SEQ ID NO: 149289 - DNA, 2334 bp, Artificial Sequence
  derived and/or modified sequence
atgctgccccggcccctgcggctgctgctggacaccagcccccccgggggcgtggtactctctagtttccggagcagggacccggaagagggtgggggccctggtggactggtcgttggagggggccaagaagaggaagaggaggaagaagaggaggcgcctgtttccgtttgggatgaggaggaagatggcgcggtttttactgttacgagcagacaatacaggcccctggatccattagttcctatgcctccacctaggagcagtcgacggctccgtgcaggtacattggaggctctggtcagacacctgcttgacactaggactagcggcacagacgtctcattcatgtcagcctttctggctacacacagagcttttaccagcaccccagcgctgcttggactgatggcggataggctggaggccctggaatcccaccccacagatgagttggagcgcacaaccgaggtagccatttccgtgctgtctacttggctagcttcgcacccagaggattttggcagcgaggcaaagggccagctcgaccgattagagtccttcctgctgcagaccgggtacgcggccggaaagggcgtgggggggggatctgcagaccttataagaaacctgcgctccagggtggatcctcaggcacctgatctccccaagcctctggccctgccaggggatccaccagccgatcccactgacgtcctggtatttcttgccgaccacctggccgaacaacttactctactcgatgccgagcttttcctgaacttaatcccgagtcaatgcctcggggggttgtggggacaccgcgaccggcctgggcattcacacctttgcccatccgtccgagcgacagtgacccaattcaacaaagtcgccggagcagttgttagctccgtgctgggggctacgagtacgggcgagggccccggagaagtcacaataagacctctccggccaccgcaacgcgctcggctgttagagaagtggataagggtggccgaagagtgccggcttctgcgtaatttctccagcgtgtacgccgtggtgtccgctctacagagttctcctattcatcggctgagagccgcctggggggaagcaaccagagacagcttacgcgtattttcttccctttgccagattttctctgaggaggacaactactcacagagtagggaacttctcgtacaggaagttaagctacagtcccccctggaaccccactctaagaaagctccacgttccggatctagaggggggggtgtcgtcccttatctggggaccttcttgaaggatcttgttatgctggatgcggctagtaaggacgagctggagaacggttatataaacttcgacaagcggcggaaagagtttgctgtattatctgagcttcgaagactgcagaacgagtgcagaggttataaccttcagcccgaccacgatattcaaagatggttgcagggacttcgccccttgactgaggctcagtcccacagggttagctgcgaagtagagccccccggttcgagtgatcctccagcccctagggtgctaaggcctaccctcgtgataagccagtggacagaagtcctcgggagtgtcggggtgccgacccccctcgtgagctgcgacagacccagcaccggcggggacgaggcaccgaccactcctgctccacttctgacacgcttagcgcagcatatgaagtggccctccgtgtcttctctggattccgccttagagagttccccttcactccatagcccggctgatccttctcacctcagtccacccgccagcagtcctcgtccctcccgtggtcataggcggagcgccagctgtgggtcccccttaagcgggggcgcagaagaggcctcaggtggcaccgggtacggcggggaaggctcgggaccgggagcaagcgattgccggattattcgagtgcagatggaattaggggaggatggttccgtatacaaatccatccttgtgacctcccaggataaggccccttcggtaatatcccgcgttcttaagaagaataaccgagattccgccgtggctagtgagtacgagctggtccagctgcttcccggcgaaagagagcttacaatacctgcgtcagccaacgtgttttacgcaatggatggagcctcacacgatttcctgcttcggcagaggcgaaggtcttctacagccacccccggagtgacatcaggtccgtccgcttccggaaccccgccgtcagagggagggggcgggagctttcctcgcatcaaggccaccgggcgcaaaattgcgcgggccctgttctag

SEQ ID NO: 149290 - DNA, 441 bp, Artificial Sequence
  derived and/or modified sequence
atgctgccccggcccctgcggctgctgctggacaccagcccccccggcggagtcgtcctgtcctctttcagatcgagggaccctgaagagggtggcggtccagggggtctggtggtcggcggcggtcaggaggaggaggaagaagaggaagaagaggcccccgtgagtgtctgggatgaagaggaagacggagcagtgttcacagttacgagccgccagtacagaccactggaccccctggtcccgatgcccccccctcgatccagtagaagactgcgggccggaactttggaggccctagtcaggcatctcctcgacactcgtacatctgggacagatgtttcttttatgagcgcatttctggcaacgcacagggccttcacctccacacctgcactactaggtctgatggctgaccgcctggaagccctcgagagttag

SEQ ID NO: 149291 - DNA, 441 bp, Artificial Sequence
  derived and/or modified sequence
atgctgccccggcccctgcggctgctgctggacaccagcccccccggcggagtcgtcctgagttcttttagaagtcgggaccccgaggaaggcggcggcccagggggcctagtggtcggagggggacaggaagaggaggaggaggaggaggaggaggctcccgtgagcgtgtgggacgaggaggaagatggtgcggtttttacagtgactagtagacagtatcgaccgttagacccactggtccccatgcctcccccacgcagtagccggcgccttcgcgccgggacactggaagcactggtcagacacctgcttgacacacggacctctgggaccgatgtttcctttatgtccgcttttctggccacccatcgagcttttacaagcactcccgctctgttaggattaatggccgaccgtctggaggcgctggaaagttag

SEQ ID NO: 149292 - DNA, 441 bp, Artificial Sequence
  derived and/or modified sequence
atgctgccccggcccctgcggctgctgctggacaccagcccccccggcggggtagtcttgtcctcttttaggagccgggatccagaggagggcggaggaccaggaggcctcgtggttggagggggacaagaggaggaggaggaggaagaagaagaagcccctgtgagtgtgtgggacgaagaggaggatggcgccgttttcactgtgacatcacgtcagtacaggcccctagaccctctggtgcctatgccaccaccacggtccagtaggaggttaagggccggaacccttgaggcactggtgaggcacttgttggacactaggacaagcgggacggacgtgagcttcatgtccgccttcctcgccacacaccgggccttcactagcacccctgctctcctggggttgatggccgataggctggaagcactggaaagttag

SEQ ID NO: 149293 - DNA, 2334 bp, Artificial Sequence
  derived and/or modified sequence
atgctgccccggcccctgcggctgctgctggacaccagcccccccggcggggtcgtcctctccagttttcggtccagagaccctgaggaaggaggaggtccggggggtctcgtcgtgggcggggggcaagaagaggaggaagaggaagaggaagaagctccagttagtgtctgggatgaggaagaagatggagcagtgttcacagtgacttcacgccagtaccgccccctagatcctctggtaccaatgcctcccccccggagttcacgcagactgagagcgggtactctggaagctctggttaggcacctgctggatacccggacatctggaaccgacgtgtcatttatgtccgcttttcttgccacacaccgggctttcacttccacacccgcgctgttaggcctgatggcagaccgtctagaggctttggagagtcaccccacagacgaactggagagaacgactgaggtggccatcagcgtcctgtcaacgtggctggcctctcaccccgaagatttcggctccgaagccaagggccagctcgaccgactggagtctttcctgctgcagaccggatacgccgccggcaagggcgtgggcggaggctctgcggatcttataagaaatctcagatctcgtgtagatccacaggcacccgacttaccaaaacctttggctttgcctggcgacccaccagctgatcctacagacgtgttggtattcctcgcagatcacttggctgagcagttaactctcttggatgctgaattgtttttaaacctaatcccaagtcagtgtctaggcggcctgtggggccaccgcgacaggccaggtcactcccatctttgcccttctgtgagggccacagtgacacagtttaacaaggtagcaggagctgtcgtgagtagtgtcctaggggccacctcgacaggggagggtccaggggaggtcacaatcagaccgctccggcctccacagcgggcacgcctcctggagaagtggatccgagttgccgaagaatgccgcctgctgcgcaatttcagctcagtgtacgcagtggtcagcgcactacagtcatctccgattcaccgcttgagagcggcctggggggaagccacccgcgactccctgagagtattcagctccttgtgccagattttctctgaggaggataattattctcaatccagagaacttttagtacaagaggtcaaactgcaatctccacttgagccccactccaagaaagctcccaggtccgggagtaggggaggaggagtcgttccatacctcggcacattcctgaaggacctggtgatgctggacgccgcctccaaggacgaactcgagaacggatacattaattttgataaaaggcggaaagaatttgccgtcctgagcgaactcagaaggctgcagaacgagtgccgaggctataatctgcagcccgatcatgacattcaaaggtggctgcagggtctccgcccactgactgaggcccagtctcacagagtgtcctgcgaggttgagcctcctggcagcagtgatccacccgctcctcgggtccttagacccactctggttatttctcagtggacggaggttttgggaagtgtgggagtgccaaccccgttggtcagctgcgataggccttccacaggaggagacgaggctcccaccacccctgcccccctgctgactcgcctggcacagcacatgaagtggccaagcgtgagtagtctggattccgccttggagtcgtctcccagccttcacagccccgccgacccatcccaccttagccctcccgcatccagtcccagaccatcccgtggacaccgaaggagcgctagttgcgggagccctctgtctggcggtgctgaggaagcctcaggtggaacgggctatggcggtgaggggtccggtcctggggccagcgactgcagaattattcgggttcagatggaacttggagaagacggaagcgtgtacaagtctatccttgtgacttcacaagacaaggctccatccgtaatttcccgggttctcaaaaaaaacaacagggactcggctgtggccagtgaatacgagctggtccaacttctgccaggcgagcgagagctaacaattcctgcctcagccaatgtgttttatgctatggacggagcgtctcacgattttctgctgcggcagcggagaagatcatctaccgccaccccaggcgtgacttctggccctagtgcatccggtacacccccctcagagggcgggggtggatcatttccgcgcattaaggcaaccgggcgcaaaatcgccagggctctgttctag

SEQ ID NO: 149294 - DNA, 441 bp, Artificial Sequence
  derived and/or modified sequence
atgctgccccggcccctgcggctgctgctggacaccagcccccccgggggcgtggtcctctcgtcgttccgatcaagagaccccgaggagggcggaggacccgggggattagtcgttggaggcgggcaagaagaagaagaggaggaggaagaggaagcccctgtgagtgtgtgggacgaggaggaggatggggctgtcttcaccgtcacatcccggcagtaccggcccttagacccattggtccccatgccacccccccggagcagtaggcggctgcgcgcaggaactctggaggctctggtaaggcacctcctcgacacgaggacttccggaactgatgtgtccttcatgtctgcatttctcgccactcatagggcattcacaagtaccccagccctccttggactcatggctgataggctggaagcattagaaagctag

SEQ ID NO: 149295 - DNA, 2334 bp, Artificial Sequence
  derived and/or modified sequence
atgctgccccggcccctgcggctgctgctggacaccagcccccccggcggcgtcgtcctgtcttcgttccgatcgcgagatcctgaggagggaggcgggccgggaggtctcgtggttggagggggacaggaagaggaggaagaggaggaggaggaggctcccgtgtcagtgtgggacgaggaagaagatggcgccgtctttacggttacttcccggcagtataggcctctggaccctctggtccccatgcccccccccaggtccagtaggaggctgcgagctggaacacttgaggctctggtgcgtcacctgctggacactcgcacttctggcacagacgtcagctttatgtccgcttttctggcgacccatagggcatttacgagtacacctgcgctgttgggtttgatggccgacagactggaagccctggagagtcacccgaccgacgaacttgaacggacaactgaagtggctattagtgtgttgtcgacatggctggcctctcatcccgaggattttgggtcagaggctaaaggtcaattggataggctggagagcttcctactgcaaactggctacgctgccggcaaaggagtcggtggaggatcagcagacttgatcagaaacctcaggtcaagggtggatccacaggctcccgacctaccaaaacccctggcattgcctggggacccacctgccgaccccacggacgttctagtcttccttgccgaccacctggcagagcagctgacactgctcgatgcagagttattcctgaacctaattccttctcagtgcctaggcggactgtggggacaccgcgataggccagggcactcccatttgtgtccaagtgtgagagccacagtaacccagttcaacaaggtggctggcgctgtggtttcctccgttctcggagccacctctacaggcgagggacctggagaagtgaccatccgtcctctgaggcccccacaacgagcgagactgctggagaaatggatacgcgtcgcggaggagtgccggctcctcagaaatttcagctccgtgtatgccgtagtgagtgcacttcagtccagccctattcatagactccgggccgcctggggtgaggcgactcgggactcgttaagagtgttttctagtctgtgtcagatattcagcgaagaggataactattctcagtccagagaactgctcgtgcaggaggtcaagttacagtcaccgctggaaccacactctaagaaggccccacgttctggaagcaggggagggggcgtcgtaccataccttggaacatttctgaaagacctggtgatgttggatgccgcatcgaaagatgagctggagaacggatacattaacttcgacaagcgtagaaaagaattcgcagtattaagtgagctcaggcggctacagaatgagtgccgcggatataacctgcagccagaccatgacattcagcgctggttgcagggactgagaccactcacggaagcacagtctcatagggtcagctgtgaggtggagcctcccggcagcagcgatccccccgcaccacgggtgctaagacccactcttgtgatttcccaatggacagaggtcttgggctctgtgggtgttcccacaccgttggtgtcgtgcgacaggccttccactgggggagatgaagcgcccaccacaccagccccactgctgacccgcctggcacagcatatgaaatggccgtccgtgagttctctggactcggccttagagtcatcaccaagcctgcatagtccagctgacccatcacacttgagtccgccagcatcttcaccaaggccttctcgtggtcaccggcgaagcgcttcctgcggatcacccctttcagggggcgctgaggaggcttctggaggaaccgggtatggcggggaaggttctggacctggagcctccgactgtagaataatacgcgttcagatggagcttggcgaggatggttcagtgtacaaaagcatactcgtgacgtcccaggacaaagcaccaagtgtgatctccagggtacttaaaaaaaataatcgtgacagtgccgtcgcgagcgaatacgagctcgttcaactcctgcccggggagcgggaattgactattccggccagcgcaaatgttttctacgccatggatggggcctcccacgacttccttctgcggcagcggcgacggtctagcacggccacgccaggggtaacctccggtccctcagcctcaggcacaccgccctcagagggtggtggcggctcatttcctagaatcaaagccacgggccggaagattgccagggctctcttttag

SEQ ID NO: 149296 - DNA, 2334 bp, Artificial Sequence
  derived and/or modified sequence
atgctgccacggcctctgcgattgttgctagatacctctcctcctggaggagtcgtgttgtctagctttcggagccgtgaccctgaggagggcggaggaccaggcggtttagtggttgggggtggccaggaagaggaagaggaggaggaggaggaggctcccgtgtcagtttgggatgaagaagaagacggtgctgtctttaccgtcacttcccgccaatacagacccttagaccccttagttccaatgccgccacccagatcctctagaaggcttcgcgctgggaccctggaggcgctggtgcggcatctcctggatactcgcacctcagggacagacgtcagcttcatgtctgcctttctagctactcacagagcattcaccagtaccccagcactgcttggtcttatggccgacagactggaggctttggaaagccatcccacagatgagctcgagcgtactactgaggtagcaatctcagtgctgtcaacctggctggctagccatccagaagacttcggtagcgaagcaaagggccagcttgacagacttgagtcttttctcctccagacaggctacgccgcaggaaagggcgtaggcggaggatccgctgatctcattcgaaacctaagatctagagtggacccacaggcgccagacctgcccaaaccactggctctgccaggcgatcctcccgctgaccccaccgacgtactagtgttcctggcggaccacctcgctgaacaattgacactgttggacgccgaactgttcttgaatctcataccttctcagtgtttaggtgggttgtgggggcacagagacagacccggacattctcatctttgccccagtgtcagggctactgtaacccagttcaataaggtggctggagctgttgtatcgtcggtgctgggagccacatcaaccggcgaaggccctggagaggtgacgatccgacctctccgacccccacagagagccaggctgctggagaagtggattcgagtggccgaagaatgtaggctgttgcgcaatttctccagcgtctacgctgtcgtcagcgccttgcagtccagccccatccatcgattgcgggctgcatggggcgaggctacgcgagacagcttaagggtctttagttccctatgccagattttctccgaggaggacaattactcccagtctagagagttactagtgcaggaagtcaagctgcaatcacctttagaaccacactccaagaaggctcctcgaagtggttcccgaggaggaggagtagtcccctacctgggtaccttcctgaaagaccttgttatgttagatgccgcttccaaggacgaactggaaaatgggtacatcaacttcgataagagaagaaaggagttcgcggtgctgtccgagctgaggcgcctgcagaacgaatgtcgcggatacaatcttcagcctgaccatgatatacagagatggctgcagggcctgaggcccctcaccgaggcgcagagccatagagtctcttgtgaggttgaaccaccgggatcttccgacccgcctgcccctagggtcctgagacctaccttggtgatttctcagtggacagaggtgctcggctctgtgggcgtacccactcccctcgtatcttgtgaccgcccatctaccggcggtgatgaggccccaactacccctgcacccttgttgacccggctggcgcagcacatgaagtggccctctgtttcatcgcttgatagcgcgctcgaatcctcgccatccctgcattcccctgccgacccttcccacctgtcaccgccagccagttctcccaggcctagtagaggacataggcgttctgcttcctgcggatcccccctttctgggggtgccgaggaggcaagcggaggtaccggctatggcggagagggctccggtcccggagcctcagattgccgaatcatcagggtccaaatggagcttggcgaagacggatcagtgtataagagtattctggtgacaagccaggataaagctccttcggtaatcagccgcgtgttaaagaagaataaccgcgattccgccgtcgcatccgaatatgagctggttcagctcctcccgggtgaaagagagcttactatcccggcatctgcaaacgtgttctatgccatggatggggcatctcacgatttccttctccgccagcgccgaagatcaagcaccgcaacgcctggggtgacaagtgggccatcagcttccggcacaccaccaagcgaagggggaggaggcagcttcccgagaataaaagcgactggcaggaagattgctcgggcactgttctag

SEQ ID NO: 149297 - DNA, 441 bp, Artificial Sequence
  derived and/or modified sequence
atgctgcctaggccactgcgcctactgctggacacctcacccccaggaggtgtggtcttgtcttcctttaggtcaagggacccagaggaagggggaggacccggtggcctggttgttgggggtggccaagaggaagaagaggaagaggaggaagaggcccctgtatcagtttgggatgaagaggaggatggtgcagtattcacggtgacctcgcggcagtaccgccctctcgaccccctggtccctatgccaccgcctaggtcctcaagaagactgagagctggcactctggaggccctggtgcgacacttacttgataccaggacttctgggacagacgtgtcctttatgagcgctttcttggcaacccatagggcgttcacaagcacccccgcacttctggggctgatggcggatcgacttgaagccctcgagagttag

SEQ ID NO: 149298 - DNA, 2334 bp, Artificial Sequence
  derived and/or modified sequence
atgttgccacggccactacggctacttctggatacttcgcctcctggtggggtcgtcctgtcctcgtttcgcagccgggacccagaggaggggggaggcccaggcggtctcgtggtgggaggtggccaggaagaggaggaggaggaggaggaagaagcccctgtaagcgtgtgggatgaggaggaggacggggctgtgtttaccgtcacctcccggcaatacagacccctggatcccctggtcccaatgccgccaccccgaagctctaggcggctgcgcgcaggtaccctcgaagcactcgtcagacatctgttggacacccgcacttccgggactgatgtgagttttatgagcgcctttctcgccacccatagagccttcacaagcacccccgctctgctaggccttatggctgatcggctggaggccctggaatcccaccccactgacgagctcgagaggactaccgaggtcgctatcagcgtgctctcgacctggctggctagccacccggaagactttggctccgaagccaaaggccaactggacaggctggagtcctttctgctccagacaggctacgctgctggaaagggcgtgggtgggggaagcgctgacttaataagaaatttgagaagccgagttgatcctcaggctcccgatctgcccaaaccattagccctacccggagacccgccagctgacccaactgacgtcctggtgtttcttgctgaccacctggccgaacaacttaccctgctagatgccgagctcttcctgaacttaatccccagccagtgcctggggggactgtggggccacagagatcgcccaggccacagccatctgtgtccgagcgtgagggctacagttacccaatttaacaaagttgcaggtgccgtcgtatcgagcgttcttggcgctacttcaacaggcgaaggcccaggagaggtcactattcgccctctgcgccctccacaaagggctcgcctgctggaaaaatggatccgggtggccgaggagtgccggctgctccggaacttttcatcggtttatgctgtggtctccgctctgcagagctcccccattcatagacttcgggctgcgtggggggaggccacaagggatagcctcagggttttctcaagtttatgtcaaattttctcggaggaagacaactattctcagtcacgcgagctgctcgtgcaggaggtgaagctgcagtcccccctggaacctcacagcaagaaagctcccagatctggatccagaggcggaggggtagttccctacctcggaactttcctgaaagacttggtgatgctagatgccgcatccaaagatgagctagaaaatggatacatcaacttcgataagcgcaggaaagaattcgcagtactcagcgagctcaggcggctgcagaacgaatgccgcggatacaaccttcagccagaccatgacattcagaggtggctgcaaggcctgcgaccgctcaccgaggcccagtcccatcgcgtgtcctgcgaggttgaacctccaggttcctctgacccacctgccccacgggttctgcggccaacactggttatttcccagtggaccgaggtgctgggaagtgtgggcgtgcctacgccactcgtgtcctgtgatcggcctagcaccgggggagacgaagcaccgaccacgccggctccgttgctgactagacttgctcagcacatgaagtggccgtctgtctcttccttggattccgcccttgaatcttccccatcactgcattcccccgcagatccatcccatctttctcctcctgcatccagtcccaggccctcgaggggtcataggcgatctgcctcgtgtggcagtcctctctctggcggtgccgaagaagcctctggcggtaccggatatggaggcgaaggaagtggccctggtgccagcgattgtcgaattattcgcgttcagatggaactgggggaggacgggtcagtttataagtccatcctggttacctcccaggacaaggcaccctcagtgattagtagggtattaaagaagaataatcgcgatagcgccgtagcctcagaatatgagttggtgcagttactgcctggagaacgggaattgaccatccccgcttctgcgaacgttttttacgcaatggacggagcctctcatgatttcctgcttagacagaggaggcgaagctcaactgcaaccccgggagtcacaagcggaccatctgcatcaggaacccccccaagcgaaggaggtggcggttctttcccaaggatcaaggccacgggtaggaagatagccagagccttgttttag

SEQ ID NO: 149299 - DNA, 2334 bp, Artificial Sequence
  derived and/or modified sequence
atgctaccgaggccactccggttattgctggataccagccctcctggcggtgtggtgctctcttcctttaggtctagagatccggaagaaggtggcggacccggaggtctagtcgtgggcggagggcaggaagaggaggaggaggaagaagaagaggccccagtctcggtatgggacgaggaggaggatggcgctgtgttcaccgtaaccagtcggcaataccggccattggaccctctcgtgccaatgcctccacctaggtcaagtaggaggctgcgagcaggaacattggaggccctggtgaggcatcttttggacaccagaacctcaggcacagacgtttcatttatgtccgcctttcttgctacgcatcgcgcttttacgtctactcctgctttgctcgggctgatggccgatcgcctcgaagcattggagtcacacccaacagacgagctggagagaaccaccgaagtggcgatttccgttctctccacatggcttgcttcacatcccgaggatttcggatctgaggcgaagggccaactcgatagactcgaatcttttctgctgcagaccggctatgctgcaggcaagggcgtggggggtggttcagctgatctcattaggaacctccggtcccgggtggacccccaggctcctgatttgccaaagccattagccttacccggagaccccccagccgatccaacagacgtgctggtcttcctcgccgaccacctggcagaacagttgaccctgctcgacgccgagctgttcctgaatttgattccatctcagtgtctggggggattgtggggtcaccgagaccgcccaggccactctcatctttgcccttccgtgagagccactgtgacccaattcaataaggtggcgggtgcagtcgtatcttcggtcctaggagctacaagtaccggggagggccctggcgaggtgactatcaggcccctgcgccctccacagcgggctcggcttctggagaagtggatccgggtggcagaagagtgcaggctgttgagaaacttttcctcagtctatgccgttgtgtccgccctccagagtagccccattcatagattgagggccgcttggggcgaggcgacacgagattccctccgggtcttctcctccctatgccaaatcttcagcgaggaagataactattcacagtctcgcgaattgcttgtgcaagaggtgaagttacagagtcccctggagcctcactcaaaaaaagctccacgctcaggctcaagaggtgggggagtcgtaccgtatcttggcaccttcctgaaggacctggttatgctggatgccgctagcaaggatgaactggagaatggatacatcaatttcgataaaagaagaaaagaattcgctgtgttgtctgagttgcgcagattgcagaacgaatgtaggggctataacctgcaaccagaccatgacatccagcgatggctacaggggctgagaccactcaccgaagctcagtctcacagagtgagctgcgaggtggagccccctggcagtagcgatccgcctgcccctagagtgctgcggcctacgctggtaatcagtcagtggaccgaggtgctagggtctgtcggggtgcccacccccctcgtgtcctgcgaccgccctagcacagggggtgacgaggctccaaccacacccgcacctctcttgacccgcctggcacagcatatgaagtggccgagcgtgtcttcccttgactcagctctggagagtagtcctagcctgcatagtcctgcagacccctctcacctatctccgcctgcgagtagcccgcgtcccagtaggggccaccgcagatctgccagttgcggctctccgctttccggtggggcagaagaagcctctgggggaactgggtatggcggagaagggagtgggccaggagctagtgattgccggatcatccgtgtgcagatggaactgggtgaggacggatccgtctataagtcaattctagtcacgtcccaggacaaagccccatcagtgatctcaagggttttaaagaagaataatagagattccgcggtagcctccgagtacgagctggttcagctgttacccggagagagagaactgaccatccctgcatccgccaacgtgttttacgctatggatggtgcatcacacgacttcttactaagacaaaggcgccgttcttctactgccacgcctggtgttacctcaggaccgagcgcctcaggcacccccccatctgaagggggtggtggatctttccctaggatcaaggccaccgggaggaaaattgccagggccctgttttag

SEQ ID NO: 149300 - DNA, 441 bp, Artificial Sequence
  derived and/or modified sequence
atgttgcctaggcccttgcggctgctcctcgacaccagccctcctgggggagtggtgttgagttcgttccgctcacgtgatcctgaggaagggggaggacccggtgggctggtggtgggcggtgggcaggaggaggaggaagaagaagaggaagaagccccagtgtcggtgtgggatgaagaagaagatggcgcagtgtttaccgtgacttcaaggcagtaccgtcccttagaccctctagtgcctatgccaccccctcggagcagcaggaggctgcgggctgggacccttgaagccctcgttcgacatcttctcgacactcgtacctcaggaaccgatgtgagcttcatgtcagcctttcttgcaacccaccgggcattcaccagcacgcccgctctgctcggactgatggccgacaggctggaggccctggagagctag

SEQ ID NO: 149301 - DNA, 441 bp, Artificial Sequence
  derived and/or modified sequence
atgcttcctcggcctctgaggctcctccttgatacctccccaccgggtggggtcgtactctcctcattccggtcccgggatcccgaagaagggggaggtcctgggggtctggtcgtgggcggaggccaagaggaagaggaagaggaagaagaagaagcccctgtctccgtctgggatgaggaggaagatggggcagtctttaccgtaacctccaggcagtatcgccctttagatcctctggttccaatgcctcctccccgttccagtcggcgtttaagagctgggactttggaggcactggttcggcatctgctagatacacgcacctctggtactgacgtctcctttatgagtgcctttcttgccactcacagagccttcacatcgaccccagcccttttaggcctcatggcagatagactagaggcgctggaatcgtag

SEQ ID NO: 149302 - DNA, 441 bp, Artificial Sequence
  derived and/or modified sequence
atgctgccacgtcccctgaggctgctcctcgatactagtccacccggtggagtggtactctcctcttttcgaagccgggacccagaggagggaggcggacccggaggcctcgtcgtgggcggaggccaggaggaggaggaggaggaggaggaggaggctcctgtctcagtttgggatgaagaagaagacggagcggtattcacagtgacatcacgccagtatcgcccactcgatccactggtgccgatgccccctccaagatcttcacgcaggctcagggcagggacgctcgaggccctcgtgcgccacctcttggatacccggacctctggtacagacgtctctttcatgagcgccttcctagccacccatagagcttttacttccacccccgctcttctgggcctcatggcagaccggttggaagccttagagagctag

SEQ ID NO: 149303 - DNA, 2334 bp, Artificial Sequence
  derived and/or modified sequence
atgcttccgaggcccctacggttgctcctcgatacctcgccacctggcggagtggttctgagctccttccgatcacgagacccagaggaggggggtggcccaggcggacttgtggttggtggaggacaagaggaagaagaggaggaagaggaagaggcaccagtcagtgtgtgggacgaagaagaagacggcgctgtgttcactgttacatcaagacaatatagacctctagatccactcgtaccaatgcctccaccgcgatcctcacgcaggctgcgggcaggtacgttggaggctctggtgagacacttgctggatacgcgaacctccggtaccgacgtatcattcatgtctgcttttttagctacacaccgtgcctttacctccactccagccctcctcggcctgatggctgaccggttggaggcccttgagtcacacccgacagatgaactggaacggacaaccgaggtcgcaatttcggtattgtctacctggttagcgagccacccggaagattttggctccgaagccaaggggcaacttgaccggctggaaagcttcctgcttcagacagggtatgcagctgggaagggcgtcggaggtgggtccgctgatctgattaggaacttaaggagcagagttgacccccaggcacctgacctccccaaacccctggcactgcccggagatcctccagccgatcctaccgacgtcctcgtctttctggccgatcacctagccgagcaactgacactgctggacgctgagttgttccttaacctgataccctcgcagtgtctcggcggactctggggccatagagacaggccaggccattcccacctgtgcccatcagtcagggcgactgtaactcagttcaacaaagtggctggcgcagtggtgtcatctgtgctgggtgccaccagcaccggagaggggcctggcgaggttactatcagacccctgaggcccccacagagggctaggttattagaaaagtggattcgggtcgcagaggaatgtcgcctgctgcgcaacttcagctcagtgtatgccgttgtttcagctttgcaatcctcgcctattcataggctgcgggctgcctggggtgaagccacccgtgactccctacgggtcttcagctccctgtgtcagatcttttcagaggaagataactattctcagtctcgagagctgctggtgcaggaggtgaaacttcaaagccccttagaacctcatagcaagaaggcgccaaggagtggttctaggggcggaggcgtggttccctacttagggaccttccttaaagatctggtcatgcttgatgcagccagtaaagatgaactcgaaaatggctacatcaattttgacaagagacgaaaggaattcgccgtgctgagcgaactgcggaggctgcagaatgagtgccggggatataaccttcagcccgatcacgacatccagagatggctgcagggactgaggccactcactgaggcacagtcgcaccgtgtgtcatgcgaggtagagcctcctggctcaagcgaccctccggcacccagagttctccgccctactctggttatcagccagtggaccgaggtgcttgggagcgtgggggtgcccacgcccctcgtgtcctgcgataggccttccacaggaggagatgaagctccgaccacgcctgctccactgctgacccggctcgcccaacacatgaaatggccaagcgtttccagtctggattctgccctggaatcctctccatcattacactcccctgcagacccaagccacctgagcccccctgcctcatctcccagaccatcccgaggacaccgaagatccgcgtcctgtggctcccctttgagtggtggcgcagaagaggcatctggcggtacaggatacggcggtgaaggttccggacccggagccagcgactgtagaatcatcagagtgcaaatggaactgggagaagacgggtctgtttacaagtctattctggtgaccagtcaggataaagctccatccgtgatctctagagtgctgaagaagaacaatcgagactcggcagtcgcatctgagtatgagttggtccaattgctccccggtgagagggaactgacaattcctgcaagtgccaacgtcttttacgcgatggatggcgctagccatgattttctgttgcgccagcggagacgctcaagtacagccacgcccggagttacatctggtccaagcgcatccggcacgccaccttcggaaggaggaggtggatcctttccgcgaataaaagcgaccggacgcaagattgcccgtgccctcttttag

SEQ ID NO: 149304 - DNA, 441 bp, Artificial Sequence
  derived and/or modified sequence
atgttaccacgaccccttagactgttacttgacacaagccccccaggcggagtggtgctttctagctttcgctcgagagatcccgaggaggggggaggccctggcggtcttgtcgtgggcggaggacaggaggaagaggaagaagaagaagaggaggccccagttagcgtatgggatgaagaggaggatggggcagtctttaccgtgacctctcgccagtatcgaccccttgatcccctggtccctatgccccctccccgtagtagccgcaggttaagggccggtacgctcgaggctctcgtgcgccacctgctcgatacaagaaccagtggtacagacgtcagttttatgtctgcgttcctggccacccatcgggcatttactagtacaccggcactccttggcttgatggccgatcgcctcgaagcgcttgaatcctag

SEQ ID NO: 149305 - DNA, 2334 bp, Artificial Sequence
  derived and/or modified sequence
atgctgcccaggcctcttaggcttttactggacacatcccctccaggaggggtcgtgctgagttccttccgctcacgagacccagaggaaggaggcggtcccggaggtctcgtggtcggcggaggacaggaggaagaggaggaggaggaggaggaagcccctgtgtctgtgtgggatgaggaggaggacggcgctgttttcactgtcacaagcagacaataccggcctctggatccactggttcccatgcctcctccccgatccagtagaagactgagggctggaactcttgaggcacttgtgcgccatctactcgatactcgaaccagtggtaccgatgtgtctttcatgtcagcttttcttgcaacacaccgggcatttacctccacacccgcactgctcgggctgatggccgacagattggaggcactggagtcacaccccaccgatgagcttgagaggactacggaagtagctataagtgtattgtccacgtggttagctagtcatcccgaggactttggctctgaagccaaaggccaactggatagattggaaagcttcctcctgcagactggttacgctgctgggaaaggcgtgggcggtgggagcgctgatctgattagaaatttaagaagccgggttgatcctcaggctccggatttacctaaaccacttgccctacctggcgacccacctgccgatcccaccgacgttctggtgttcctggctgaccacctggcagagcagttaaccctactcgacgctgagctgttcctgaatctgatcccctcccagtgtttaggaggcctgtggggccacagggacaggccaggtcacagccatctgtgtccgtctgtgagagcaacagtgacacagttcaataaggtagccggtgcagtcgtctcctctgtactgggtgccacctccaccggtgaggggccaggcgaagtcaccattcgccctctcagacctccacaaagagcgaggctcctggaaaagtggattcgggtcgccgaggaatgtcgactgctccgaaatttttcttccgtgtacgcggttgtgagcgccctgcagtcctcccctattcatagactgcgagctgcttggggggaggccacccgggactcattgcgggtgtttagtagtctctgccagatcttttccgaagaagataattattctcagtcaagagagttgctggtgcaggaggtaaaactccagtcaccacttgagccgcattcaaagaaggcccctcgctccggatctcggggaggtggggtggttccctacctcggcacgtttcttaaggacttggtgatgctggatgccgcttctaaggatgaattggagaacggctacattaatttcgacaagcgccgaaaggaattcgcagttctgtctgaattgcgcagactgcagaacgagtgcagaggctacaaccttcagcctgatcacgacatacaaagatggctccaaggacttcgacctctgactgaagcacagagccaccgtgtgtcttgcgaggtggagccacccggtagttcggatccgccagcccctagagtgctgaggcctacccttgtaatttcccagtggaccgaggtcctgggatctgtaggagttcccactcccctggtaagctgtgatagaccgagcaccggtggcgatgaagccccaaccacgccagcccctttgctcacgcgccttgcccagcacatgaagtggccaagcgttagctccctggactccgccctggagtcttctcctagtttgcatagcccggcagacccaagtcacttgtctcctcccgcttcatcccctcggccttctcgcggtcaccgccgatccgcctcctgcggcagtcctttgtctggaggggctgaagaggcgtccggaggtactgggtacggcggagaaggcagcggccctggagccagcgactgtaggatcatccgagtccagatggaacttggggaggatggatccgtgtataagtcgatcctggttacaagccaggacaaagcaccttctgtcataagcagggttttgaaaaagaacaatagggactccgcagtggcctccgagtacgagctggtgcagctgctgccaggggagagagaactcacaattcctgcatcagcgaacgtgttctacgccatggacggtgcaagccatgacttcttgctgcgccaacggagaagaagtagtacagcaaccccgggtgtaacttcgggaccatccgcctctggcactcctcctagcgagggtggcggtggatcctttccccgtataaaagcaacaggccgaaagatcgccagggcactgttctag

SEQ ID NO: 149306 - DNA, 3278 bp, Artificial Sequence
  derived and/or modified sequence
ccggctctctctccgcctgaaacgcttcccgcgggagttttagccgtgttattgttggggaagggaatgtcaaattctgctcctgccttcccccaggggctggagactggaatctttattccagttcattgcgggtcgacgtggtctccagaatccccgagtgtagaggcggaggacagtggagctggggactcgggcgcctgggtcctggtccctgagcgtccagcgctcccctagtccgcggccctggctcctgtcctcacttccttccccttttggctcctgctctcggagcgggcggacgcgggggggagcggaaagggcgggagggcccaggagcccggcgggggggttcaagggggtacggaaaagccggggaggggactcggtccggggccggagaccgacggcaacagcggctcaggacccacgctgcccccacccctcccgagcaggcgcccccatggcccgaccccgctgattccttcactcggccatgctcccgcggcccctgcggctgcttttggacacgagcccccccgggggagtcgtactgagcagcttccgaagccgggaccccgaagagggtgggggcccaggtggcctggtcgtgggcggggggcaggaggaagaggaggaggaagaagaagaggcccctgtgtccgtctgggatgaggaggaggatggtgccgtgtttaccgtcacaagccgccaatatcgacctcttgatcccttggtccctatgcctcccccacgttcctcccgacggctccgagctggcactctggaggccctggtcagacacctactggatacccggacatcagggactgatgtgagcttcatgtcagccttcctggctacccaccgggccttcacctccacgcctgccttgctagggcttatggctgacaggctggaagcccttgaatctcatcctaccgacgaactagagaggacaacagaggtagccatctctgtactgtcaacctggctggcctctcaccctgaggattttggctctgaggccaagggtcagcttgaccggcttgagagcttcttacttcagacagggtatgcagcagggaagggtgttggggggggcagcgctgacctcatccgcaatctccggtcccgggtggacccccaggcccccgaccttcctaagcccctggccctccccggcgatccccctgctgaccccacggatgtcctggtgttcctcgctgaccacttggccgaacagctgaccctgctagatgcggaactttttctcaatttgatcccctctcagtgcctgggaggcctgtggggtcacagagaccggccaggacattctcacctctgcccatctgtccgagctactgtcacacagtttaacaaggtggcaggggcagtggttagttctgtcctgggggctacttccactggagagggacctggggaggtgaccatacggccactccgtcccccacagagggcccggctcctggagaagtggatccgcgtggcagaggagtgccggctgctccgaaacttctcttcagtttatgccgtggtgtcagccctgcagtccagccccatccacaggcttcgggcagcctggggggaagcaaccagggacagcctcagagtcttttccagcctctgccagattttctccgaggaggataattattcccagagtcgggagctgctcgtgcaggaggtgaagctgcagtctcctctggagccacactccaagaaggccccgaggtctggctcccggggtgggggtgtggtcccataccttggcaccttcctgaaggaccttgtgatgctggatgcagcctccaaggatgagttggagaatggatacatcaattttgacaagcggaggaaggagtttgcagtcctttctgagttgcgacggctccagaatgaatgtcgtggctataacctccaacctgaccatgatatccagaggtggctacaggggctccggccactgacagaggctcagagccatcgtgtatcctgtgaggtggagccacctggttccagtgaccctcctgccccacgggtgcttcggccaacattggtcatctcgcagtggacagaggttttgggctctgttggggtccctaccccgcttgtgtcctgtgaccggcccagtactgggggagatgaggcgcctacaactcctgctcctctgctgactcggctggcccagcacatgaagtggccatctgtctcgtcactagactctgccttggaaagcagtccatccctgcacagtccagctgaccccagccacctctccccaccagcctcctcccctaggccttctcgaggtcaccgccgctcagcctcctgtggctccccgctgagtgggggtgcagaagaggcctccggggggactggatatgggggagagggatctgggccaggggcctctgattgccgtatcatccgagtccagatggagttgggggaagatggcagtgtctataagagcattttggtgacaagccaggacaaggctccaagtgtcatcagtcgtgtccttaagaaaaacaatcgtgactctgcagtggcttcagagtatgagctggtacagctgctaccaggggagcgagagctgactatcccagcctcggctaatgtattctacgccatggatggagcttcacacgatttcctcctgcggcagcggcgaaggtcctctactgctacacctggcgtcaccagtggcccgtctgcctcaggaactcctccgagtgagggaggagggggctcctttcccaggatcaaggccacagggaggaagattgcacgggcactgttctgaggaggaagccccgttggcttacagaagtcatggtgttcataccagatgtgggtagccatcctgaatggtggcaattatatcacattgagacagaaattcagaaagggagccagccaccctggggcagtgaagtgccactggtttaccagacagctgagaaatccagccctgtgggaactggtgtcttataaccaagttggatacctgtgtatagcttcccaccttccatgagtgcagcacacaggtagtgctggaaaaacgcatcagtttctgattcttggccatatcctaacatgcaagggccaagcaaaggcttcaaggctctgagccccagggcagaggggaatggcaaaatgtaggtcctcgcaggagctcttcttcccactctgggggtttctatcactgtgacaacactaagataataaaccaaaacactacctgaattcta

SEQ ID NO: 149307 - DNA, 640 bp, Artificial Sequence
  derived and/or modified sequence
accaagggcccccctattccacccttctgttgccccctcccccaaccttcctgcagaactcccttccggtcttcttgacacccacccacgtcccttccctgcccggttcccccgcgcctgcctgactctccacccccaccccaccccgtctctccccaggcgcccccatggcccgaccccgctgattccttcactcggccatgctcccgcggcccctgcggctgcttttggacacgagcccccccgggggagtcgtactgagcagcttccgaagccgggaccccgaagagggtgggggcccaggtggcctggtcgtgggcggggggcaggaggaagaggaggaggaagaagaagaggcccctgtgtccgtctgggatgaggaggaggatggtgccgtgtttaccgtcacaagccgccaatatcgacctcttgatcccttggtccctatgcctcccccacgttcctcccgacggctccgagctggcactctggaggccctggtcagacacctactggatacccggacatcagggactgatgtgagcttcatgtcagccttcctggctacccaccgggccttcacctccacgcctgccttgctagggcttatggctgacaggctggaagcccttgaatctca

SEQ ID NO: 149308 - DNA, 2956 bp, Artificial Sequence
  derived and/or modified sequence
aaaacccggccgggatttcggtcagctacattcgtgggttgtggtagggagggtaatcccgtggggatggagtgaccggctctctctccgcctgaaacgcttcccgcgggagttttagccgtgttattgttggggaagggaatgtcaaattctgctcctgccttcccccaggggctggagactggaatctttattccagttcattgcgggtcgacgtggtctccagaatccccgagtgtagaggcggaggacagtggagctggggactcgggcgcctgggtcctggtccctgagcgtccagcgctcccctagtccgcggccctggctcctgtcctcacttccttccccttttggctcctgctctcggagcgggcggacgcgggggggagcggaaagggcgggagggcccaggagcccggcgggggggttcaagggggtacggaaaagccggggaggggactcggtccggggccggagaccgacggcaacagcggctcaggacccacgctgcccccacccctcccgagcaggcgcccccatggcccgaccccgctgattccttcactcggccatgctcccgcggcccctgcggctgcttttggacacgagcccccccgggggagtcgtactgagcagcttccgaagccgggaccccgaagagggtgggggcccaggtggcctggtcgtgggcggggggcaggaggaagaggaggaggaagaagaagaggcccctgtgtccgtctgggatgaggaggaggatggtgccgtgtttaccgtcacaagccgccaatatcgacctcttgatcccttggtccctatgcctcccccacgttcctcccgacggctccgagctggcactctggaggccctggtcagacacctactggatacccggacatcagggactgatgtgagcttcatgtcagccttcctggctacccaccgggccttcacctccacgcctgccttgctagggcttatggctgacaggctggaagcccttgaatctcatcctaccgacgaactagagaggacaacagaggtagccatctctgtactgtcaacctggctggcctctcaccctgaggattttggctctgaggccaagggtcagcttgaccggcttgagagcttcttacttcagacagggtatgcagcagggaagggtgttggggggggcagcgctgacctcatccgcaatctccggtcccgggtggacccccaggcccccgaccttcctaagcccctggccctccccggcgatccccctgctgaccccacggatgtcctggtgttcctcgctgaccacttggccgaacagctgaccctgctagatgcggaactttttctcaatttgatcccctctcagtgcctgggaggcctgtggggtcacagagaccggccaggacattctcacctctgcccatctgtccgagctactgtcacacagtttaacaaggtggcaggggcagtggttagttctgtcctgggggctacttccactggagagggacctggggaggtgaccatacggccactccgtcccccacagagggcccggctcctggagaagtggatccgcgtggcagaggagtgccggctgctccgaaacttctcttcagtttatgccgtggtgtcagccctgcagtccagccccatccacaggcttcgggcagcctggggggaagcaaccagggacagcctcagagtcttttccagcctctgccagattttctccgaggaggataattattcccagagtcgggagctgctcgtgcaggaggtgaagctgcagtctcctctggagccacactccaagaaggccccgaggtctggctcccggggtgggggtgtggtcccataccttggcaccttcctgaaggaccttgtgatgctggatgcagcctccaaggatgagttggagaatggatacatcaattttgacaagcggaggaaggagtttgcagtcctttctgagttgcgacggctccagaatgaatgtcgtggctataacctccaacctgaccatgatatccagaggtggctacaggggctccggccactgacagaggctcagagccatcgtgtatcctgtgaggtggagccacctggttccagtgaccctcctgccccacgggtgcttcggccaacattggtcatctcgcagtggacagaggttttgggctctgttggggtccctaccccgcttgtgtcctgtgaccggcccagtactgggggagatgaggcgcctacaactcctgctcctctgctgactcggctggcccagcacatgaagtggccatctgtctcgtcactagactctgccttggaaagcagtccatccctgcacagtccagctgaccccagccacctctccccaccagcctcctcccctaggccttctcgaggtcaccgccgctcagcctcctgtggctccccgctgagtgggggtgcagaagaggcctccggggggactggatatgggggagagggatctgggccaggggcctctgattgccgtatcatccgagtccagatggagttgggggaagatggcagtgtctataagagcattttggtgacaagccaggacaaggctccaagtgtcatcagtcgtgtccttaagaaaaacaatcgtgactctgcagtggcttcagagtatgagctggtacagctgctaccaggggagcgagagctgactatcccagcctcggctaatgtattctacgccatggatggagcttcacacgatttcctcctgcggggcgaaggtcctctactgctacacctggcgtcaccagtggcccgtctgcctcaggaactcctccgagtgagggaggagggggctcctttcccaggatcaaggccacagggaggaagattgcacgggcactgttctgaggaggaagccccgttggcttacagaagtcatggtgttcataccagatgtgggtag

SEQ ID NO: 149309 - DNA, 1820 bp, Artificial Sequence
  derived and/or modified sequence
agaccgacggcaacagcggctcaggacccacgctgcccccacccctcccgagcaggcccctgtgtccgtctgggatgaggaggaggatggtgccgtgtttaccgtcacaagccgccaatatcgacctcttgatcccttggtccctatgcctcccccacgttcctcccgacggctccgagctggcactctggaggccctggtcagacacctactggatacccggacatcagggactgatgtgagcttcatgtcagccttcctggctacccaccgggccttcacctccacgcctgccttgctagggcttatggctgacaggctggaagcccttgaatctcatcctaccgacgaactagagaggacaacagaggtagccatctctgtactgtcaacctggctggcctctcaccctgaggattttggctctgaggccaagggtcagcttgaccggcttgagagcttcttacttcagacagggtatgcagcagggaagggtgttggggggggcagcgctgacctcatccgcaatctccggtcccgggtggacccccaggcccccgaccttcctaagcccctggccctccccggcgatccccctgctgaccccacggatgtcctggtgttcctcgctgaccacttggccgaacagctgaccctgctagatgcggaactttttctcaatttgatcccctctcagtgcctgggaggcctgtggggtcacagagaccggccaggacattctcacctctgcccatctgtccgagctactgtcacacagtttaacaaggtggcaggggcagtggttagttctgtcctgggggctacttccactggagagggacctggggaggtgaccatacggccactccgtcccccacagagggcccggctcctggagaagtggatccgcgtggcagaggagtgccggctgctccgaaacttctcttcagtttatgccgtggtgtcagccctgcagtccagccccatccacaggcttcgggcagcctggggggaagcaaccagggacagcctcagagtcttttccagcctctgccagattttctccgaggaggataattattcccagagtcgggagctgctcgtgcaggaggtgaagctgcagtctcctctggagccacactccaagaaggccccgaggtctggctcccggggtgggggtgtggtcccataccttggcaccttcctgaaggaccttgtgatgctggatgcagcctccaaggatgagttggagaatggatacatcaattttgacaagcggaggaaggtgagcggagtgtctgggctggatgctggacttccctatccatgttccaggaaggggagggggaaaagtcaggggtccctgagttttggctcctgcagtttgagggctccttcccaggagtttgcagtcctttctgagttgcgacggctccagaatgaatgtcgtggctataacctccaacctgaccatgatatccagaggtggctacaggggctccggccactgacagaggctcagaggtgactggcgggtgaggttgggactccagggttctggccaggtgtgggggattggtgtcatgtcctgagctctgcctattgcccccctaacccagccatcgtgtatcctgtgaggtggagccacctggttccagtgaccctcctgccccacgggtgcttcggccaacattggtcatctcgcagtggacagagtgagagattcactggctggggggtggtttcttgggacttccacttttctctgatcctcccaatctcctgccactgcagggttttgggctctgttggggtcccta

SEQ ID NO: 149310 - DNA, 2956 bp, Artificial Sequence
  derived and/or modified sequence
aaaacccggccgggatttcggtcagctacattcgtgggttgtggtagggagggtaatcccgtggggatggagtaaccggctctctctccgcctgaaacgcttcccgcgggagttttagccgtgttattgttggggaagggaatgtcaaattctgctcctgccttcccccaggggctggagactggaatctttattccagttcattgcgggtcgacgtggtctccagaatccccgagtgtagaggcggaggacagtggagctggggactcgggcgcctgggtcctggtccctgagcgtccagcgctcccctagtccgcggccctggctcctgtcctcacttccttccccttttggctcctgctctcggagcgggcggacgcgggggggagcggaaagggcgggagggcccaggagcccggcgggggggttcaagggggtacggaaaagccggggaggggactcggtccggggccggagaccgacggcaacagcggctcaggacccacgctgcccccacccctcccgagcaggcgcccccatggcccgaccccgctgattccttcactcggccatgctcccgcggcccctgcggctgcttttggacacgagcccccccgggggagtcgtactgagcagcttccgaagccgggaccccgaagagggtgggggcccaggtggcctggtcgtgggcggggggcaggaggaagaggaggaggaagaagaagaggcccctgtgtccgtctgggatgaggaggaggatggtgccgtgtttaccgtcacaagccgccaatatcgacctcttgatcccttggtccctatgcctcccccacgttcctcccgacggctccgagctggcactctggaggccctggtcagacacctactggatacccggacatcagggactgatgtgagcttcatgtcagccttcctggctacccaccgggccttcacctccacgcctgccttgctagggcttatggctgacaggctggaagcccttgaatctcatcctaccgacgaactagagaggacaacagaggtagccatctctgtactgtcaacctggctggcctctcaccctgaggattttggctctgaggccaagggtcagcttgaccggcttgagagcttcttacttcagacagggtatgcagcagggaagggtgttggggggggcagcgctgacctcatccgcaatctccggtcccgggtggacccccaggcccccgaccttcctaagcccctggccctccccggcgatccccctgctgaccccacggatgtcctggtgttcctcgctgaccacttggccgaacagctgaccctgctagatgcggaactttttctcaatttgatcccctctcagtgcctgggaggcctgtggggtcacagagaccggccaggacattctcacctctgcccatctgtccgagctactgtcacacagtttaacaaggtggcaggggcagtggttagttctgtcctgggggctacttccactggagagggacctggggaggtgaccatacggccactccgtcccccacagagggcccggctcctggagaagtggatccgcgtggcagaggagtgccggctgctccgaaacttctcttcagtttatgccgtggtgtcagccctgcagtccagccccatccacaggcttcgggcagcctggggggaagcaaccagggacagcctcagagtcttttccagcctctgccagattttctccgaggaggataattattcccagagtcgggagctgctcgtgcaggaggtgaagctgcagtctcctctggagccacactccaagaaggccccgaggtctggctcccggggtgggggtgtggtcccataccttggcaccttcctgaaggaccttgtgatgctggatgcagcctccaaggatgagttggagaatggatacatcaattttgacaagcggaggaaggagtttgcagtcctttctgagttgcgacggctccagaatgaatgtcgtggctataacctccaacctgaccatgatatccagaggtggctacaggggctccggccactgacagaggctcagagccatcgtgtatcctgtgaggtggagccacctggttccagtgaccctcctgccccacgggtgcttcggccaacattggtcatctcgcagtggacagaggttttgggctctgttggggtccctaccccgcttgtgtcctgtgaccggcccagtactgggggagatgaggcgcctacaactcctgctcctctgctgactcggctggcccagcacatgaagtggccatctgtctcgtcactagactctgccttggaaagcagtccatccctgcacagtccagctgaccccagccacctctccccaccagcctcctcccctaggccttctcgaggtcaccgccgctcagcctcctgtggctccccgctgagtgggggtgcagaagaggcctccggggggactggatatgggggagagggatctgggccaggggcctctgattgccgtatcatccgagtccagatggagttgggggaagatggcagtgtctataagagcattttggtgacaagccaggacaaggctccaagtgtcatcagtcgtgtccttaagaaaaacaatcgtgactctgcagtggcttcagagtatgagctggtacagctgctaccaggggagcgagagctgactatcccagcctcggctaatgtattctacgccatggatggagcttcacacgatttcctcctgcggggcgaaggtcctctactgctacacctggcgtcaccagtggcccgtctgcctcaggaactcctccgagtgagggaggagggggctcctttcccaggatcaaggccacagggaggaagattgcacgggcactgttctgaggaggaagccccgttggcttacagaagtcatggtgttcataccagatgtgggtag

SEQ ID NO: 149311 - protein, 398 aa, Artificial Sequence
  derived and/or modified sequence
MEEDDSYVPSDLTAEERQELENIRRRKQELLADIQRLKDEIAEVANEIENLGSTEERKNMQRNKQVAMGRKKFNMDPKKGIQFLIENDLLKNTCEDIAQFLYKGEGLNKTAIGDYLGERDEFNIQVLHAFVELHEFTDLNLVQALRQFLWSFRLPGEAQKIDRMMEAFAQRYCQCNNGVFQSTDTCYVLSFAIIMLNTSLHNPNVKDKPTVERFIAMNRGINDGGDLPEELLRNLYESIKNEPFKIPEDDGNDLTHTFFNPDREGWLLKLGGGRVKTWKRRWFILTDNCLYYFEYTTDKEPRGIIPLENLSIREVEDSKKPNCFELYIPDNKDQVIKACKTEADGRVVEGNHTVYRISAPTPEEKEEWIKCIKAAISRDPFYEMLAARKKKVSSTKRH

SEQ ID NO: 149312 - DNA, 1197 bp, Artificial Sequence
  derived and/or modified sequence
atggaggaagatgacagctacgtgccctccgatctgactgcggaagagcgacaagaattggaaaacatccgacgccgaaagcaggagctgctggctgacattcagcgccttaaggatgagatcgcggaggtcgcaaatgagatagaaaatctggggtcaacagaggaaaggaagaatatgcaacgaaacaagcaggtcgccatgggcagaaaaaaattcaatatggatccaaagaaaggcatccagttcctgattgagaacgatttgctgaagaacacttgcgaggacatcgcccagttcctgtacaagggggagggtctcaacaagacagcaattggggactatttaggggagagggacgagtttaacattcaggtgctccacgcatttgtggaactacacgagtttacagaccttaacctggtgcaggctctgcggcaattcctgtggtctttccggttgcctggtgaagcacagaaaattgaccgtatgatggaggcctttgcacagcgatactgccagtgtaataatggagtcttccagtctaccgacacttgctacgttctcagcttcgctatcattatgttgaatacatctctgcacaatccaaatgtaaaggacaagccaaccgtggagagattcatagcgatgaacaggggtatcaacgacggcggagacctccccgaggagctgttgcggaacctgtatgagtcaatcaaaaacgagccatttaagattcctgaagatgatggcaacgacctaactcacaccttctttaatcccgacagggaagggtggctactcaaactcgggggcggcagagtcaaaacctggaagagaagatggtttatcttaaccgataactgcctgtattactttgagtatacgacagacaaggaacctcgaggcatcatccctctggagaatttatccattcgggaagtcgaagattcaaaaaagcccaactgctttgagctctacatcccagataataaagatcaggtgataaaggcctgtaagaccgaggctgacggtcgggtagtcgaaggtaaccataccgtgtaccgaatcagcgctcccactcctgaggaaaaggaggaatggataaagtgcatcaaggccgccattagtcgggaccccttttatgagatgctggcggctagaaagaagaaggtttccagcacaaagcgccattag

SEQ ID NO: 149313 - DNA, 1197 bp, Artificial Sequence
  derived and/or modified sequence
atggaggaagatgactcatatgttccaagtgacctcaccgccgaagagaggcaggagttggaaaacattcgccgcaggaagcaagagttgctcgccgacatacagcgtctcaaagacgaaatcgctgaagtggcgaatgagattgaaaatctgggctctacagaagagcggaaaaacatgcaaaggaacaaacaggtggcaatgggccggaagaagttcaatatggatccaaagaaaggaatccagtttcttattgaaaacgatctactaaaaaatacttgtgaggacattgcacagttcctctataaaggcgagggcctgaacaagacagcaatcggcgattaccttggagaaagagatgagttcaatattcaagtattgcacgcattcgtcgaactccacgaattcaccgatctcaacctcgtccaggccctcagacaatttctctggagttttaggctgcccggcgaggctcagaaaatcgatcgcatgatggaagcttttgctcaacggtattgccaatgcaacaatggggtgttccagagcacagacacctgctacgtgctatcttttgccatcattatgctgaacacctctttgcacaaccctaacgtaaaggataaaccaaccgtcgagcgctttatcgccatgaataggggaattaatgacgggggagatctgcctgaggagcttcttcggaacctgtatgagtcaattaaaaatgagccttttaaaatcccagaagacgatgggaacgatcttacccatacgttttttaaccccgaccgagaggggtggttgctgaaactgggcgggggcagggtaaagacttggaagcggcggtggttcatactgaccgataattgtctttactactttgaatatactacagataaggagccccggggcatcattcctttggagaacctcagtatccgtgaggtggaagactccaagaagcctaattgcttcgagctctatattccagataataaggaccaagttataaaagcttgtaagactgaagccgacggccgggtggtggagggaaatcatacagtgtaccgtattagcgcaccaacccctgaggagaaagaggaatggatcaagtgcataaaagcggcgatttctcgggacccattttatgagatgctggcagccagaaagaaaaaggtcagctccacgaagcgacactag

SEQ ID NO: 149314 - DNA, 1197 bp, Artificial Sequence
  derived and/or modified sequence
atggaggaggatgacagctatgtgcccagcgacctgacagctgaggagcggcaggagctggagaacatcagaagaaggaagcaggagctgctggccgacatccagaggctgaaggatgaaattgctgaggtggccaatgaaattgagaacctgggcagcacagaggagaggaagaacatgcagaggaacaagcaggtggccatgggcaggaagaagttcaacatggaccccaagaagggcatccagttcctgattgaaaatgacctgctgaagaacacctgtgaagatattgcccagttcctgtacaagggggagggcctgaacaagacagccatcggggactacctgggggagagagatgagttcaacatccaggtgctgcacgcctttgtggagctgcacgagttcacagacctgaacctggtgcaggccctgcggcagttcctgtggagcttccggctgcctggagaggcccagaagattgacaggatgatggaggcctttgcccagcgctactgccagtgcaacaatggagtcttccagagcacagacacctgctacgtgctgagctttgccatcatcatgctgaacaccagcctgcacaaccccaacgtgaaggacaagcccaccgtggagcgcttcatcgccatgaacagaggcatcaatgatggaggagacctgcctgaggagctgctgaggaacctgtatgagagcatcaagaatgagcccttcaagatcccagaagatgatggaaatgacctgacccacaccttcttcaacccagaccgggagggctggctgctgaagctgggcggcggccgggtgaagacctggaagaggcgctggttcatcctgacagacaactgcctgtactactttgagtacaccacagacaaggagccccggggcatcatccccctggagaacctgagcatccgggaggtggaggacagcaagaagcccaactgctttgagctgtacatcccagacaacaaggaccaggtgatcaaggcctgcaagacagaagcagatggccgggtggtggagggcaaccacacagtgtaccgcatcagcgcccccaccccagaggagaaggaggagtggatcaagtgcatcaaggccgccatcagccgggaccccttctatgagatgctggccgccaggaagaagaaggtgagcagcaccaagaggcactag

SEQ ID NO: 149315 - DNA, 1197 bp, Artificial Sequence
  derived and/or modified sequence
atggaggaggacgacagctacgtgcccagcgacctgaccgccgaggagcgccaggaattagagaatattaggcggagaaagcaagagctgctcgcggatatacagcgattgaaagacgagatagccgaggtagctaacgaaatcgagaatcttgggtctacagaagaacgcaaaaacatgcagagaaataagcaggtggccatggggaggaaaaagttcaacatggatccaaagaagggtatccagtttctgatcgaaaatgacctcctgaaaaatacatgtgaagacattgcccagtttttgtacaagggcgaggggctgaataaaacagcaatcggtgattatctcggggagagggatgagtttaacatccaggtcttgcatgcctttgtggagcttcatgaattcaccgatttgaacttagtgcaggccctccggcaatttttgtggtcctttaggctccctggagaagcacagaaaatcgatcggatgatggaggcctttgcccaacgctactgccagtgtaataacggagtgtttcagtccaccgacacatgctacgttttgagctttgccatcatcatgctgaacacaagtcttcataaccccaatgtgaaggacaagcctactgtggagagattcattgctatgaacaggggcatcaatgacggcggggacctcccagaagaactgctgcgtaatctgtacgaatctattaaaaatgagcccttcaaaatcccagaggatgatggcaatgacctaacacacacttttttcaatccggaccgcgaaggatggcttcttaaactggggggcggcagggtgaaaacttggaaacgtcggtggtttatcttaacagataactgcttgtattattttgagtataccaccgacaaggagccccgggggatcatcccattggagaatctttctatccgcgaggtggaagattctaagaagccaaattgtttcgagctatacatccccgataataaggaccaggtcattaaagcgtgtaagaccgaagctgacgggagggtcgtggaggggaatcatacagtgtacaggatctccgcccctacccccgaggagaaagaagagtggatcaagtgcattaaagccgccatatctagagacccattctatgagatgctggcagctcggaagaagaaggttagctctaccaaacgacactag

SEQ ID NO: 149316 - DNA, 1197 bp, Artificial Sequence
  derived and/or modified sequence
atggaggaggacgacagctacgtgcccagcgacctgaccgccgaggagagacaggagctggagaacattcgccgacgtaaacaggagctcctggccgatattcaacgcttgaaggacgaaatcgcagaagtggccaatgagatcgaaaatctcggctctacagaagaaagaaagaatatgcaacggaataagcaggtagcaatgggcaggaaaaaattcaacatggacccgaaaaagggcattcagtttctgatcgagaatgatctgctgaagaacacttgcgaggacattgcccagttcctgtataagggagaagggctcaacaagactgcgattggggactacctgggtgaacgcgacgagtttaatattcaggtccttcatgcattcgtcgaactgcatgaattcacggatttaaaccttgtgcaagcacttcggcagtttctgtggtccttccgcttaccaggcgaggctcagaagatagacagaatgatggaggccttcgcacagcgctactgtcagtgcaataacggggtgtttcaatctaccgatacatgttatgtgttatcttttgctatcatcatgctgaatacctccctgcacaaccctaacgttaaagacaaacctaccgtggagcgatttatagccatgaaccgtggcatcaatgacgggggcgacctccccgaagagctgctgagaaatctgtatgagagcattaaaaatgaacccttcaagatccccgaggacgacgggaatgatctgacgcacaccttttttaaccccgatagagagggttggctgctcaagctcgggggcgggcgggtcaaaacttggaagcgaagatggttcatccttactgataactgtctgtactattttgagtataccaccgataaagaaccccggggaattatcccactggaaaatttgtccataagggaagtggaggattccaagaagcccaattgctttgagctctacatcccagataataaagaccaagtcatcaaggcttgcaaaaccgaggcagatgggagagtcgtagaggggaaccatacggtgtaccgcattagtgcgcccacccccgaagaaaaggaagagtggatcaagtgcattaaggccgccatcagcagggaccccttttatgagatgttggctgctagaaagaagaaggtcagctcaactaaacggcattag

SEQ ID NO: 149317 - DNA, 1197 bp, Artificial Sequence
  derived and/or modified sequence
atggaagaggacgattcatacgtgccctcggatctgactgctgaggagaggcaggaactggaaaacattcgacggagaaagcaagaattgctggcagatattcagcgccttaaagatgaaatcgccgaggttgccaatgagatcgaaaacctggggtcgacagaagagaggaagaatatgcaaaggaacaagcaagtcgctatgggacgcaaaaagtttaacatggatcccaaaaagggcatccagttcctaatcgagaatgacctgctcaaaaacacctgcgaggacattgcgcagtttctctacaagggtgagggtttgaataagaccgcaatcggtgactacctgggagaaagagacgaatttaatattcaggtgcttcatgccttcgtggagctgcacgaattcacggatctgaacctggtgcaggccctgagacaatttctgtggtccttcaggttacccggtgaggcgcagaagattgacaggatgatggaggctttcgctcagcgttactgccagtgtaacaacggagtcttccaatctacagatacatgctatgtactgtcttttgccatcatcatgctcaatacatccttacataaccccaatgttaaagacaaaccaaccgtggagaggttcatcgcaatgaaccggggaattaacgacgggggagacctacctgaggaactcctcaggaacttatatgaaagcattaagaacgagcctttcaagatccccgaggacgacggtaatgacctcactcatacatttttcaaccctgatcgtgagggctggttgctgaagctgggcggtggtcgtgtgaagacatggaagagaaggtggttcatccttacagataactgtctttattactttgagtatacgactgacaaggaacctcgtggcattattcccctggagaacctgagtataagggaggtggaggattctaagaagccgaactgctttgaactgtatattccagacaataaagatcaagtgatcaaagcctgcaaaaccgaggctgatggtcgcgtcgtcgagggtaaccacaccgtatatcggatctctgccccaacacccgaagagaaggaagaatggatcaaatgcatcaaggctgccattagcagagatccattttatgagatgttggcagcaagaaaaaaaaaggtgagtagtacgaaacgccactag

SEQ ID NO: 149318 - DNA, 1197 bp, Artificial Sequence
  derived and/or modified sequence
atggaagaagacgactcctacgttccatcagatcttacggctgaagagcgccaggaactcgagaacatccggcgacgcaaacaggagctcctggcagatattcagagattgaaggacgagattgccgaggttgcaaatgaaatcgaaaacctgggctcaacggaagaacgcaaaaacatgcaaagaaacaagcaggttgcaatgggacggaagaaatttaatatggatccaaagaagggcatccagtttttgatcgaaaatgatctgctgaagaatacatgcgaagacatcgcccaatttctgtacaagggcgaaggcctcaataagaccgccattggggattacctaggcgaaagagacgagttcaacatccaggtcttacatgcttttgttgaactccacgaatttaccgacctcaacctagtgcaggccttgagacagtttttgtggagtttccgattgccgggagaagcgcagaaaatcgacagaatgatggaagccttcgcccaacgctactgtcagtgtaataacggggtttttcaaagcaccgacacctgttacgttctttcatttgccatcattatgctgaacacctccctgcataaccccaacgtcaaggacaagccgacggtggagcgtttcattgctatgaaccggggaatcaacgacggcggtgatttgcccgaagagttgttacgaaacctgtatgaatcaataaaaaacgaaccgttcaaaattccggaggatgacggtaacgacctgacccacactttcttcaatcccgaccgagagggttggctgctcaaactgggaggcggacgggtcaagacctggaaacgtaggtggtttattttgaccgacaattgtctctattactttgagtatacaacagacaaagaaccccgaggcattatacctctggagaatctctccatacgcgaagtcgaggattctaaaaagcctaattgtttcgagctttatatccccgataacaaggatcaggtaatcaaggcatgtaaaacagaggcagacggcagggtggtggaaggcaaccacaccgtctacaggatctccgcgcctacccccgaagaaaaagaggagtggatcaagtgcattaaagccgcaatttcacgcgatcccttctacgagatgctggctgccagaaagaagaaagtatccagcacaaagaggcactag

SEQ ID NO: 149319 - DNA, 3311 bp, Artificial Sequence
  derived and/or modified sequence
gcgagcgggggcgcgggtggcgcggcgggacgcgagcggcgagccggagcgcggagcccggctcccgcaccatggaggaggacgacagctacgttcccagtgacctgacagcagaggagcgtcaagaactggagaacatccgacggagaaaacaggagctgctggctgacattcagaggctgaaggatgagatagcagaagtagctaatgaaattgaaaacctgggatccacagaggaaaggaaaaacatgcagaggaacaaacaggtagccatgggcaggaaaaaatttaatatggaccctaaaaaggggatccagttcttaatagagaacgacctcctgaagaacacttgtgaagacattgcccagttcttatataaaggcgaagggctcaacaagacagccatcggcgactacctaggggagagagatgagtttaatatccaggttcttcatgcatttgtggagctgcatgagttcactgatcttaatctcgtccaggcactacggcagttcctgtggagcttccggctacccggagaggcccagaagatcgaccggatgatggaggcgtttgcccagcgatattgtcagtgcaataatggcgtgttccagtccacggatacttgttacgtcctctcctttgccatcatcatgttgaacaccagtctgcacaaccccaatgtcaaagataagcccactgtggagaggttcattgccatgaaccgaggcatcaatgatgggggagacctgccggaggagctcctccggaatctctatgagagcataaaaaatgaaccctttaaaatcccagaagacgacgggaatgacctcactcacactttcttcaatccagaccgagaaggctggctattgaaactcggaggtggcagggtaaagacttggaagagacgctggttcattctgactgacaactgcctttactactttgagtataccacggataaggagccccgtggaatcatccctttagagaatctgagtatccgggaagtggaggactccaaaaaaccaaactgctttgagctttatatccccgacaataaagaccaagttatcaaggcctgcaagaccgaggctgacgggcgggtggtggaggggaaccacactgtttaccggatctcagctccgacgcccgaggagaaggaggagtggattaagtgcattaaagcagccatcagcagggaccctttctacgaaatgctcgcagcacggaaaaagaaggtctcctccacgaagcgacactgagcgtgcagccaagggcgttggtctgcgggggccttggagctcctgctcttctcccgcacctccatggatgcactgctgccgagcagagcgtcctctgccaggccccgccctggattcctagagactagcttcagcttttgctattttttttaagtgggagaagggtgggcagttatcactggggaagagaggaccggccacctgtccagcatgggctccagagccttcctctctcacagggcagagctcttgtcggcagggcagcctcctggccagtttctctgctcagtgttctggtagcagagctcagagccaactgtttacctcttggttgtccccgtgaagaagccttcaaaccctgcaccataaatacatgtgtccatatattattatatgttaagagaaaaaggtggaaaggaagagaagccacatactataaagatctatttttttttttttaagagagaacgtagggctgttcaggtgcattctgccctggctgcgctggggagcttctccctggagaagagcacctggggctgcggccaaggggcatcagcctgggcccgcggcagggcctggcctgcctctcctgtgctgtgggagctcgctgcctggtgcttgtctgggcgagatggacaggtgaggtcgaggacgcagagggcagaggcccagtggagcctcagacggcacagtcagagtcgggggcctgccctggccggggtcgcagtcggcagcagcgtgcagtccggcatctcccgcggatgcttttccatcccaagtgcctgcggagcgccgaggagaggagagagctgactggacgcttacgttattttcctccttcagaatccaagttcttgttgggctttaaagtagaaagtcagcattttccttgagctaaatacctaataaccaaaactgtgaggaaggttatcgggacagaggttccggataacctgtttcattttgggttttcttcctcttccccagactccagtcctcgttctagaggaaggagtaggacttccccgatccccgtagggcttcagctttttctgcctcaaaaccagccctaactggactactctggatgcattttgtggtgggccccctagaggggaagatgggcctttatctgctccgtggggtgcactggagtgaggggggtggccgggctgcctctcgcatctctgtcttcccctgcaggcgctgtgtgagctggccctgcccctcctcattacagtatgaagggagccgtgacacgcagcattttcctgccgttctctcagggactctcagggcagctcctgccactccgccagggccagcatgccagtccaggcagagcaggtggctggctgtctggccgtctcgccccgcccctccacaggaccctggaccagggcggtgcagggcgcagccctgaggaggcaggtggaggagctgcgggttttcacagggccgcgtcgccacggctcctctgatcctttagggttggcgagcatctctggaaatagcttttgcagaggagtggtgggaggaatagagggggacagtctgtcacctccctccccgccactttgtgtagatcctacctggagggaatggctttaggcacttttgtgccagagcttgtgagggtgacagaagagggtccaggctggaaacctgaactttctgggtgggagaaccaggtggtgcctgccgaggtctgggcgtgtttgggccggtgctggagcctgtccagctggcccgggccctggcctggttctcaagtgtttcctagacagagaggcacctgggtcagtattagtctatttatcagaggtgtaaataatctatgtatagtttttctccttttagattattttgtatttgtttaaaagaagttttgtcaaaatacaaaaatataaagaaatgactgaaagttgttgacagggtttttaagaaataattattctaattgtttttgtttgtttgtttttgccttgtaaactagcgccaaggaactgcagcaaataaactccaactctgcccaagcca

SEQ ID NO: 149320 - DNA, 1217 bp, Artificial Sequence
  derived and/or modified sequence
gcgagcgggggcgcgggtggcgcggcgggacgcgagcggcgagccggagcgcggagcccggctcccgcaccatggaggaggacgacagctacgttcccagtgacctgacagcagaggagcgtcaagaactggagaacatccgacggagaaaacaggagctgctggctgacattcagaggctgaaggatgagatagcagaagtagctaatgaaattgaaaacctgggatccacagaggaaaggaaaaacatgcagaggaacaaacaggtagccatgggcaggaaaaaatttaatatggaccctaaaaaggggatccagttcttaatagagaacgacctcctgaagaacacttgtgaagacattgcccagttcttatataaaggcgaagggctcaacaagacagccatcggcgactacctaggggagagagatgagtttaatatccaggttcttcatgcatttgtggagctgcatgagttcactgatcttaatctcgtccaggcactacggcagttcctgtggagcttccggctacccggagaggcccagaagatcgaccggatgatggaggcgtttgcccagcgatattgtcagtgcaataatggcgtgttccagtccacggatacttgttacgtcctctcctttgccatcatcatgttgaacaccagtctgcacaaccccaatgtcaaagataagcccactgtggagaggttcattgccatgaaccgaggcatcaatgatgggggagacctgccggaggagctcctccggaatctctatgagagcataaaaaatgaaccctttaaaatcccagaagacgacgggaatgacctcactcacactttcttcaatccagaccgagaaggctggctattgaaactcgcaggtggcagggtaaagacttggaagagacgctggttcattctgactgacaactgcctttactactttgagtataccacggataaggagccccgtggaatcatccctttagagaatctgagtatccgggaagtggaggactccaaaaaaccaaactgctttgagctttatatccccgacaataaagaccaagttatcaaggcctgcaagaccgaggctgacgggcgggtggtggaggggaaccacactgtttaccggatctcagctccgacgcccgaggagaaggaggagtggattaagtgcattaagttccaggtcagcccaggagagccatag

SEQ ID NO: 149321 - DNA, 1510 bp, Artificial Sequence
  derived and/or modified sequence
agtttaaccctaatggctacacaggagagaagcggcatgaatagacgggtttcccagggtgcggacggtgctttcccagaaactcccgggctgtgagttcccagtgacctgacagcagaggagcgtcaagaactggagaacatccgacggagaaaacaggagctgctggctgacattcagaggctgaaggatgagatagcagaagtagctaatgaaattgaaaacctgggatccacagaggaaaggaaaaacatgcagaggaacaaacaggtagccatgggcaggaaaaaatttaatatggaccctaaaaaggggatccagttcttaatagagaacgacctcctgaagaacacttgtgaagacattgcccagttcttatataaaggcgaagggctcaacaagacagccatcggcgactacctaggggagagagatgagtttaatatccaggttcttcatgcatttgtggagctgcatgagttcactgatcttaatctcgtccaggcactacggcagttcctgtggagcttccggctacccggagaggcccagaagatcgaccggatgatggaggcgtttgcccagcgatattgtcagtgcaataatggcgtgttccagtccacggatacttgttacgtcctctcctttgccatcatcatgttgaacaccagtctgcacaaccccaatgtcaaagataagcccactgtggagaggttcattgccatgaaccgaggcatcaatgatgggggagacctgccggaggagctcctccggaatctctatgagagcataaaaaatgaaccctttaaaatcccagaagacgacgggaatgacctcactcacactttcttcaatccagaccgagaaggctggctattgaaactcggaggtggcagggtaaagacttggaagagacgctggttcattctgactgacaactgcctttactactttgagtataccacggataaggagccccgtggaatcatccctttagagaatctgagtatccgggaagtggaggactccaaaaaaccaaactgctttgagctttatatccccgacaataaagaccaagttatcaaggcctgcaagaccgaggctgacgggcgggtggtggaggggaaccacactgtttaccggatctcagctccgacgcccgaggagaaggaggagtggattaagtgcattaaagcagccatcagcagggaccctttctacgaaatgctcgcagcacggaaaaagaaggtctcctccacgaagcgacactgagcgtgcagccaagggcgttggtctgcgggggccttggagctcctgctcttctcccgcacctccatggatgcactgctgccgagcagagcgtcctctgccaggccccgccctggattcctagagactagcttcagcttttgctattttttttaagtgggagaagggtgggcagttatcactggggaagagaggaccggccacctgtccagcatgggctccagagccttcctctctcaca

SEQ ID NO: 149322 - DNA, 1551 bp, Artificial Sequence
  derived and/or modified sequence
acactcggagcgtctgctagggctgcagctctgcgcgtccatctctgcgctctgcgccagccttccccaccgggcccagcgagtttccacctgcagggccggtgctctcagcttttgttttctctggacaccttcttctctacccctgctgtgctggctgacattcagaggctgaaggatgagatagcagaagtagctaatgaaattgaaaacctgggatccacagaggaaaggaaaaacatgcagaggaacaaacaggtagccatgggcaggaaaaaatttaatatggaccctaaaaaggggatccagttcttaatagagaacgacctcctgaagaacacttgtgaagacattgcccagttcttatataaaggcgaagggctcaacaagacagccatcggcgactacctaggggagagagatgagtttaatatccaggttcttcatgcatttgtggagctgcatgagttcactgatcttaatctcgtccaggcactacggcagttcctgtggagcttccggctacccggagaggcccagaagatcgaccggatgatggaggcgtttgcccagcgatattgtcagtgcaataatggcgtgttccagtccacggatacttgttacgtcctctcctttgccatcatcatgttgaacaccagtctgcacaaccccaatgtcaaagataagcccactgtggagaggttcattgccatgaaccgaggcatcaatgatgggggagacctgccggaggagctcctccggaatctctatgagagcataaaaaatgaaccctttaaaatcccagaagacgacgggaatgacctcactcacactttcttcaatccagaccgagaaggctggctattgaaactcggaggtggcagggtaaagacttggaagagacgctggttcattctgactgacaactgcctttactactttgagtataccacggataaggagccccgtggaatcatccctttagagaatctgagtatccgggaagtggaggactccaaaaaaccaaactgctttgagctttatatccccgacaataaagaccaagttatcaaggcctgcaagaccgaggctgacgggcgggtggtggaggggaaccacactgtttaccggatctcagctccgacgcccgaggagaaggaggagtggattaagtgcattaaagcagccatcagcagggaccctttctacgaaatgctcgcagcacggaaaaagaaggtctcctccacgaagcgacactgagcgtgcagccaagggcgttggtctgcgggggccttggagctcctgctcttctcccgcacctccatggatgcactgctgccgagcagagcgtcctctgccaggccccgccctggattcctagagactagcttcagcttttgctattttttttaagtgggagaagggtgggcagttatcactggggaagagaggaccggccacctgtccagcatgggctccagagccttcctctctcacagggcagagctcttgtcggcagggcagcctcctggccagtttctctgctcagtg

SEQ ID NO: 149323 - DNA, 1197 bp, Artificial Sequence
  derived and/or modified sequence
atggaggaggacgacagctacgtgcccagcgacctgaccgccgaggagagacaggagctggagaacatcagaagaagaaagcaggagctgctggccgacatccagagactgaaggacgagatcgccgaggtggccaacgagatcgagaacctgggcagcaccgaggagagaaagaacatgcagagaaacaagcaggtggccatgggcagaaagaagttcaacatggaccccaagaagggcatccagttcctgatcgagaacgacctgctgaagaacacctgcgaggacatcgcccagttcctgtacaagggcgagggcctgaacaagaccgccatcggcgactacctgggcgagagagacgagttcaacatccaggtgctgcacgccttcgtggagctgcacgagttcaccgacctgaacctggtgcaggccctgagacagttcctgtggagcttcagactgcccggcgaggcccagaagatcgacagaatgatggaggccttcgcccagagatactgccagtgcaacaacggcgtgttccagagcaccgacacctgctacgtgctgagcttcgccatcatcatgctgaacaccagcctgcacaaccccaacgtgaaggacaagcccaccgtggagagattcatcgccatgaacagaggcatcaacgacggcggcgacctgcccgaggagctgctgagaaacctgtacgagagcatcaagaacgagcccttcaagatccccgaggacgacggcaacgacctgacccacaccttcttcaaccccgacagagagggctggctgctgaagctgggcggcggcagagtgaagacctggaagagaagatggttcatcctgaccgacaactgcctgtactacttcgagtacaccaccgacaaggagcccagaggcatcatccccctggagaacctgagcatcagagaggtggaggacagcaagaagcccaactgcttcgagctgtacatccccgacaacaaggaccaggtgatcaaggcctgcaagaccgaggccgacggcagagtggtggagggcaaccacaccgtgtacagaatcagcgcccccacccccgaggagaaggaggagtggatcaagtgcatcaaggccgccatcagcagagaccccttctacgagatgctggccgccagaaagaagaaggtgagcagcaccaagagacactag

SEQ ID NO: 149324 - protein, 200 aa, Artificial Sequence
  derived and/or modified sequence
MFRKGKKRHSSSSSQSSEISTKSKSVDSSLGGLSRSSTVASLDTDSTKSSGQSNNNSDTCAEFRIKYVGAIEKLKLSEGKGLEGPLDLINYIDVAQQDGKLPFVPPEEEFIMGVSKYGIKVSTSDQYDVLHRHALYLIIRMVCYDDGLGAGKSLLALKTTDASNEEYSLWVYQCNSLEQAQAICKVLSTAFDSVLTSEKP

SEQ ID NO: 149325 - protein, 136 aa, Artificial Sequence
  derived and/or modified sequence
MFRKGKKRHSSSSSQSSEISTKSKSVDSSLGGLSRSSTVASLDTDSTKSSGQSNNNSDTCAEFRIKYVGAIEKLKLSEGKGLEGPLDLINYIDVAQQDGKLPFVPPEEEFIMGVSKYGIKVSTSDQYDVLHRHALY

SEQ ID NO: 149326 - protein, 114 aa, Artificial Sequence
  derived and/or modified sequence
MFRKGKKRHSSSSSQSSEISTKSKSVDSSLGGLSRSSTVASLDTDSTKSSGQSNNNSDTCAEFRIKYVGAIEKLKLSEGKGLEGPLDLINYIDVAQQDGKLPFVPPEEEFIMGV

SEQ ID NO: 149327 - DNA, 603 bp, Artificial Sequence
  derived and/or modified sequence
atgtttcggaagggaaaaaaaaggcacagctctagctcaagccaaagcagcgaaattagcacgaaatccaaatccgtcgactctagcctcggaggcctgtctaggtcctcaacagtggcctcgctggatacagactctactaagtcatcaggccagtccaacaacaactccgatacttgcgccgagttccgaatcaaatatgtgggagccatcgagaaactgaaactctctgagggaaaggggcttgaggggcctctggatttgatcaattatatcgacgtggctcagcaggatggcaaactgccattcgttccccctgaggaggaatttatcatgggagtcagcaaatacggcataaaggttagcactagcgatcagtatgacgtgttgcacaggcatgctctttatttaattattaggatggtgtgttacgacgatggcctcggagcagggaagtctctgctggcactgaagactacagacgcctcaaacgaagaatatagtctgtgggtgtatcagtgcaatagcctggagcaggcccaggcgatctgtaaggtcttgagtacagcatttgatagtgtgctgaccagcgagaaaccttag

SEQ ID NO: 149328 - DNA, 603 bp, Artificial Sequence
  derived and/or modified sequence
atgttccgcaaaggaaaaaagaggcatagctcgagctcctcacagtcctctgagatctcaacaaagagtaaaagcgtggattccagcctcggcgggctttcgaggagcagcacggtcgcttctctggataccgacagcacaaaatcctctgggcagtcaaacaacaattcagatacctgcgcagaatttcgaatcaagtatgttggcgccatcgagaaactaaagctgagcgagggaaaaggtctggaaggacctctggatctgatcaactatatagatgttgcccagcaggatgggaaacttccatttgtccctccagaggaggagttcattatgggagtgtctaagtacggtataaaggtatcaactagtgaccagtacgacgtgctgcatcgccacgctctgtatctcatcattcgcatggtctgttacgacgacggccttggggccggaaaatctttactagccctgaagaccactgacgcatccaacgaggagtactctctctgggtgtatcagtgcaattccctcgagcaagctcaggcgatctgtaaggttctctcaactgcctttgactcagtcctgacttctgagaaaccttag

SEQ ID NO: 149329 - DNA, 411 bp, Artificial Sequence
  derived and/or modified sequence
atgttccgaaagggaaagaagagacactcatcctccagctcacagtcttccgaaatctctacaaagtcgaagtctgtcgatagttcactgggtggcctcagtcgcagctctacggtcgcctccctcgataccgacagtacaaaatcctcgggccagagtaataataattcggacacctgcgcagagttccgcatcaagtacgttggtgcaatcgaaaagttaaaattgagcgagggcaaaggcctggagggacccctggatctcatcaattatattgatgttgcacaacaggacgggaagttacctttcgtgccgcccgaagaagagttcataatgggagtgtctaagtacggtataaaggtgtccacctcagaccaatatgacgtgctgcacaggcacgctctctattag

SEQ ID NO: 149330 - DNA, 1963 bp, Artificial Sequence
  derived and/or modified sequence
gtcaggactgcgcctgcgcatagtcttggaggcgcggcccggcggacgtgggcaggagggctggaaaagccggcgctggagcgggaacgggagtagctgcctgggcgccaaaggccgcggcactcccacgcggaccccgaagtccgcaacccggggatgggcccgcggctgcgaggggatcttctctggatcaagcaatggtggtgaaaaatgtttcgcaagggcaaaaaacgacacagtagtagcagttcccaaagtagcgaaatcagtactaagagcaagtctgtggattctagccttgggggtctttcacgatccagcactgtggccagcctcgacacagattccaccaaaagctcaggacaaagcaacaataattcagatacctgtgcagaatttcgaataaaatatgttggtgccattgagaaactgaaactctccgagggaaaaggccttgaagggccattagacctgataaattatatagacgttgcccagcaagatggaaagttgccttttgttcctccggaggaagaatttattatgggagtttccaagtatggcataaaagtatcaacatcagatcaatatgatgttttgcacaggcatgctctctacttaataatccggatggtgtgttacgatgacggtctgggggcgggaaaaagcttactggctctgaagaccacagatgcaagcaatgaggaatacagcctgtgggtttatcagtgcaacagcctggaacaagcacaagccatttgcaaggttttatccaccgcttttgactctgtattaacatctgagaaaccctgaatcctgcaatcaagtagaagtcaacttcatctgaaagttcagctgttttcaaactgcaatgctgaaatgttatgcaaataatgaagttatcccttgctctagattttctgaagaaaatggattgtgtaaaatgctgatcatttgtttattaaaatgtgtcctattacacagtgagttaactctcaatgaagtcatctattttctgggctaaaaaacttcatttgtctttttcaacttctaataagcttaacctaagtgtcacagaagcctaggtgtcacagaggtccactcagtgacaaacacacactgaaggcctgaggaagacgagatgtcacagaggtccactcagtgacaaacacacactgaaggcctgaggaagactagatgtcacagaggtccactcagtgacaaacacacactgaaggcctgaggaagacgagatgtcacagaggtccactcagtgacaaacacacactgaaggcctgaggaagactagatgtcacagaggtccactcagtgacaaacacacactgaaggcctgaggaagacgagatgtcacagaggtccactcagtgacaaacacacactgaaggcctgaggaagacgagatgtcacagaggtccactcagtgacaaacacacactgaaggcctgaggaagactagatgtcacagaggtccactcagtgacaaacacacactgaaggcctgaggaagacgagatgtcacagaggtccactcagtgacaaacacacactgaaggcctgaggaagacgagatgtcacagaggtccactcagtgacacacactgaaggcctgaggaagactgaggacatgggctcagtggtggcttcccagtcatggtatcactggcatggacctctgtccggcagaggtgtggactggagaccaggattcatgctggtctggaacagtgacattgccaacttaagacacacaaagcagattttcagaagtgtctggtcaagataacatgctggccaaccacaattcctagagttaagagaaccttaaaagattaccgctcatgctaaaagtatgtaaagatcccatgtacagtatgatagtgtactttttttaaaggactgtcaatatacaaaactttaaagattaaaaacattaaaaataaaa

SEQ ID NO: 149331 - DNA, 4859 bp, Artificial Sequence
  derived and/or modified sequence
ttccgggcggggccgcgctcccggggcgcgggtggaggagcttggaaccacgcagatcgggcgtgggcttgcggactgcagcttcccgagccgctgtcgccccggaggggcggcaaggcgggcggccgcgggccgtttccttgcctcttcctctgccccgcttcggccgcctcccgcctctcagggtcggggttgtctgtccccttcgctgtcacatcctccgcacccagcgcttggaaggtgctccatcacggtgacagacaggtgccaagcaggctggcgtctgggaggaacttcggagccggctctccctaggccccgagcttggccgcatccgtccttactctggtgaccctgggcaggtcactgactcttcgggcgctttggcatcctcgtttgaaaggggctgttatcctgcagccttgctggtcggtgagggtgagggtgagagggatctgtgcacctagcaccgtgcatggcacgtggtaggcgtttggtacatgggaatcgctgttggggtgtcacctccccagaaagttctcggcttcagtaagcgcgtcccctgccaggcgccctggcaatgcagaggagtcaccgagctccgcctttgaccagcgtgcagctgggagagtgagatcagagaccacagcagatcgtggcgctgtgatcagggggtacactcaagctgtgggtcccttaccccagccttgagatcccaggaaggcctgcagcctgaaacgggccttgaaaggtgcgtagtttctctgaaaagcatcacccaggtcagaatgaaaggaaactctctgtgcagaccgctgtatgtgggacctttgaagacagtcaaatagtgttcaattctatagggatcttctctggatcaagcaatggtggtgaaaaatgtttcgcaagggcaaaaaacgacacagtagtagcagttcccaaagtagcgaaatcagtactaagagcaagtctgtggattctagccttgggggtctttcacgatccagcactgtggccagcctcgacacagattccaccaaaagctcaggacaaagcaacaataattcagatacctgtgcagaatttcgaataaaatatgttggtgccattgagaaactgaaactctccgagggaaaaggccttgaagggccattagacctgataaattatatagacgttgcccagcaagatggaaagttgccttttgttcctccggaggaagaatttattatgggagtttccaagtatggcataaaagtatcaacatcagatcaatatgatgttttgcacaggcatgctctctacttaataatccggatggtgtgttacgatgacggtctgggggcgggaaaaagcttactggctctgaagaccacagatgcaagcaatgaggaatacagcctgtgggtttatcagtgcaacagcctggaacaagcacaagccatttgcaaggttttatccaccgcttttgactctgtattaacatctgagaaaccctgaatcctgcaatcaagtagaagtcaacttcatctgaaagttcagctgttttcaaactgcaatgctgaaatgttatgcaaataatgaagttatcccttgctctagattttctgaagaaaatggattgtgtaaaatgctgatcatttgtttattaaaatgtgtcctattacacagtgagttaactctcaatgaagtcatctattttctgggctaaaaaacttcatttgtctttttcaacttctaataagcttaacctaagtgtcacagaagcctaggtgtcacagaggtccactcagtgacaaacacacactgaaggcctgaggaagacgagatgtcacagaggtccactcagtgacaaacacacactgaaggcctgaggaagactagatgtcacagaggtccactcagtgacaaacacacactgaaggcctgaggaagacgagatgtcacagaggtccactcagtgacaaacacacactgaaggcctgaggaagactagatgtcacagaggtccactcagtgacaaacacacactgaaggcctgaggaagacgagatgtcacagaggtccactcagtgacaaacacacactgaaggcctgaggaagacgagatgtcacagaggtccactcagtgacaaacacacactgaaggcctgaggaagactagatgtcacagaggtccactcagtgacaaacacacactgaaggcctgaggaagacgagatgtcacagaggtccactcagtgacaaacacacactgaaggcctgaggaagacgagatgtcacagaggtccactcagtgacacacactgaaggcctgaggaagactgaggacatgggctcagtggtggcttcccagtcatggtatcactggcatggacctctgtccggcagaggtgtggactggagaccaggattcatgctggtctggaacagtgacattgccaacttaagacacacaaagcagattttcagaagtgtctggtcaagataacatgctggccaaccacaattcctagagttaagagaaccttaaaagattaccgctcatgctaaaagtatgtaaagatcccatgtacagtatgatagtgtactttttttaaaggactgtcaatatacaaaactttaaagattaaaaacattaaaaataaaaccatgtccatttaaaagtattttatttttttccagtcaaatgactagttaacaagaagagtaaacttattaaacatgctctaattataaatcactgcattaaggacaatgaaaataatcaatttcggttatacaatatatacagttgtgctgcaaccaaagtaatcaggtgaatgaactgaatatcatacatctcaaaatagcatcctaagctgcatattatgttatccaccccttaacagatcacacagttactcttagtctgtgtacatgttctgagccatcatcccagatctgatggagaatggcatgcaaaatgccagaatcctgcagctgcagttcatgaaacataaactttaaatataaatagatatctacaatgtttttctttctcttagttgcttttttaatttgcaaggagcaaataactaagaaaggatattagcagggtcgttaatataatttctcctctggtaagagtactattagttactgcacaatagcaccaaattgtagactggaaaaatatttcctaggtatttatgtaccagtgaacctgacagattagtttgggactggagttctaatgttgatatgaatcaactttattccttatatagctggcaccaggtggtcaaaaggctgactataaaatacagatgcaggaggattgttaaaatagacataagtgcactgtgcaaaatacatctgtttacttaaatctatgagaaaattaaatgaagggttcaaacagaaattaacaattagtgaaaacagatgtagtgctttaaaaaaaaacaaaaacaaaaaactacagatataacacatttttacccggaactttgaaaggtaaaaagcgattgctatacaacatcataaaacattccagtttgttctgtcttcctttataacaaaaacaaaaagtacaatgccaaaaaaaaaaaaaactctacacagtcttgcataataaagacaagctgcttcaatcaaatgcaccatcacaacaaatgcagttaacagcattgctgcctcactttccaagcctatatgcaaatttattcctttacttttgttaaaagtccaagtgggtatcatatgcctatttattctcagagtgccaaaatttccaatattcctactatgaatcttaccctcgcaattactaaatagaggtatgacagtcaagttcattaaacgaatgagttttggttttataatagacaacctaatcctctactaccaccccaagtagcttaagaatgatatgatggcctgaaacagtaaaaagtgggatgtttgggagtattacctgggacctatatatttctgatatgttcttgattataaacagatggacagattcaatttcaagacagtgtgactaccattcctgttggagtattatagaaatacaagacactaaactgagtaaacattctcctgggctagaagggaaggcagtggtacactcagtaggaaacagcaagtgatgtgttaatacagcatggtctgcgccacagaattctactgtgtacagttgctttctgtgtgactcaggaagttcaagaaggcaaattccaaaacacctaaagcatataaactaatttaaaagaactgttttgcaatccatcatccttagtttttaaccaaattcaggaaatgcagttttatataacctggaacagaatgaactgtagttaccctacgttgtcataaaccatcagtagttttgttaagtatgattgttcacaacaggttatacatacatgcagaatataatgatagctgcaacctcacaaattagggctagaaagtacaatgctaatgtgtaaatttccaagttgctttttaaacactgggtggatttcaaaggaatgtgtgtctttaaaggtgaactgatggcattttatcgagaaagttcagagctgggctatggacttctgaagcagcagttcactggccgcctaaaataataattgtgataaaggtcaccaactccagaactgggccaaggaatgcaggaagaatttattcattaatgcaaacatttttaggtttagctaattccgtagaggcaggatcttgattatgtataatagttaaaataacttttcagttcacctgttgggaaattcagtttttcctaataaatgcatagcaatgtttcatgaaaaccacaaattataaaaacaattactgatatgtaaaaa

SEQ ID NO: 149332 - DNA, 748 bp, Artificial Sequence
  derived and/or modified sequence
aaatatagaagtaaattggatgatgaggctgattaaaaagcttgggctcagtggtcagacttgggcaagtggcctaatgtcgtcccctagtaagtggacttagagtggggtctccaaatacggagaatctttgggttgcagcaggagctttcactgactgctgcgtgagttgctcgttctttttccttcatcaggtgcgtagtttctctgaaaagcatcacccaggtcagaatgaaaggaaactctctgtgcagaccgctgtatgtgggacctttgaagacagtcaaatagtgttcaattctatagggatcttctctggatcaagcaatggtggtgaaaaatgtttcgcaagggcaaaaaacgacacagtagtagcagttcccaaagtagcgaaatcagtactaagagcaagtctgtggattctagccttgggggtctttcacgatccagcactgtggccagcctcgacacagattccaccaaaagctcaggacaaagcaacaataattcagatacctgtgcagaatttcgaataaaatatgttggtgccattgagaaactgaaactctccgagggaaaaggccttgaagggccattagacctgataaattatatagacgttgcccagcaagatggaaagttgccttttgttcctccggaggaagaatttattatgggagtttccaagtatggcataaaagtatcaacatcagatcaatatgatgttttgcacaggcatgctctctac

SEQ ID NO: 149333 - DNA, 603 bp, Artificial Sequence
  derived and/or modified sequence
atgttcaggaagggcaagaagaggcacagcagcagcagcagccagagcagcgagatcagcaccaagagcaagtctgtggacagcagcctgggcggcctgagccgcagcagcacagtggccagcctggacacagacagcaccaagagcagcggccagagcaacaacaacagcgacacctgtgccgagttccgcatcaagtatgtgggcgccatcgagaagctgaagctgtctgagggcaagggcctggagggccccctggacctgatcaactacattgatgtggcccagcaggacggcaagctgccctttgtgcccccagaggaggagttcatcatgggcgtgtccaaatatggcatcaaggtgtccaccagtgaccagtatgatgtgctgcacagacatgccctgtacctgatcatccgcatggtgtgctatgatgatggcctgggcgctgggaagagcctgctggccctgaagaccacagatgccagcaatgaggagtacagcctgtgggtgtaccagtgcaacagcctggagcaggcccaggccatctgcaaggtgctgagcacagcctttgattctgtgctgaccagcgagaagccctag

SEQ ID NO: 149334 - DNA, 411 bp, Artificial Sequence
  derived and/or modified sequence
atgttcaggaagggcaagaagaggcacagcagcagcagcagccagagcagcgagatcagcaccaagagcaagtctgtggacagcagcctgggcggcctgagccgcagcagcacagtggccagcctggacacagacagcaccaagagcagcggccagagcaacaacaacagcgacacctgtgccgagttccgcatcaagtatgtgggcgccatcgagaagctgaagctgtctgagggcaagggcctggagggccccctggacctgatcaactacattgatgtggcccagcaggacggcaagctgccctttgtgcccccagaggaggagttcatcatgggcgtgtccaaatatggcatcaaggtgtccaccagtgaccagtatgatgtgctgcacagacatgccctgtactag

SEQ ID NO: 149335 - DNA, 603 bp, Artificial Sequence
  derived and/or modified sequence
atgttccggaagggcaagaagcggcacagcagcagcagcagccagtccagcgagatcagcacaaagtccaagtctgtagactcatccctcggcggcctaagcagaagcagcacggtggcttctcttgacacagactctacaaagagtagcggacagagcaataacaattctgatacatgcgctgagttccgtattaaatacgtgggggctatcgagaaactgaaattgtccgaagggaaaggattggaagggccccttgacttgatcaactatatcgacgttgcccagcaggacggaaagctgccctttgtcccaccagaggaggaatttatcatgggcgtttcaaaatacggtattaaggtgtctacatctgaccagtacgacgtgttgcaccggcacgccctgtacctcattatacgcatggtgtgctatgacgacggtcttggcgctggcaagtcactccttgcactgaaaacaacagacgcctcgaatgaagaatatagtctgtgggtgtatcagtgtaattcacttgaacaagctcaggccatctgcaaggtgcttagcacggcttttgactccgtgctgacaagtgaaaaaccctag

SEQ ID NO: 149336 - DNA, 603 bp, Artificial Sequence
  derived and/or modified sequence
atgttccggaagggcaagaagcggcacagcagcagcagcagccagtcctccgagatcagtaccaaatctaagtctgtggacagcagtctcggagggctctcccgctcctccaccgtagccagtctagatactgattctactaaaagcagcggtcagagcaataacaacagcgacacctgcgctgaatttaggataaagtacgtgggcgccatcgagaaactgaagctgagcgaaggaaagggtctagaaggacccctcgatctgatcaactatatcgatgttgcccagcaagatggcaagttgcctttcgtccccccagaagaagagttcattatgggagtcagcaagtatggtattaaagtttccacatctgatcaatacgatgtcctccaccggcatgccctgtatctaattatccggatggtttgctacgatgatggtctaggggcaggtaagtcactcctggcactcaagactaccgacgcaagcaatgaggagtattccctttgggtgtaccaatgcaattctcttgaacaggcgcaggccatctgcaaagtgttgagcacagccttcgattctgtattaacctctgagaagccatag

SEQ ID NO: 149337 - DNA, 411 bp, Artificial Sequence
  derived and/or modified sequence
atgttccggaagggcaagaagcggcacagcagcagcagcagccagtccagtgaaattagcactaagagcaaatctgtggactcatctctgggagggttatcgagaagcagcacagtggcctcactggacacggatagcactaagtcctctgggcaaagcaacaacaatagcgacacctgcgcggagttccgaatcaagtacgtcggcgcgattgagaagctgaagttgagtgaaggaaagggtctcgaggggccattagacctgattaactacattgatgtggcccagcaggatgggaagctcccgtttgtgcctcccgaagaggaatttatcatgggcgtgagcaaatacggaattaaagtatcaacaagcgatcaatatgatgttctgcacagacacgccttatactag

SEQ ID NO: 149338 - DNA, 603 bp, Artificial Sequence
  derived and/or modified sequence
atgttccgcaaaggcaagaagagacactcgtcatcctcctcacaaagtagcgagatcagcactaaatccaagtcagtagatagctccttagggggacttagccgaagttctacagtggcgtccctggacacagattctactaaatcatcaggccaaagtaacaataattcagatacatgcgccgaattccgcattaagtatgtgggcgcaatcgagaagctgaaactcagcgaggggaaaggcctggagggccctctggatctcattaactacatagacgttgcccagcaagacggcaagctccccttcgtgccaccggaggaagaattcattatgggcgtgtcaaagtatggcatcaaggtctccacctccgatcagtacgacgtgcttcaccggcacgcactctacctgattattcggatggtctgttatgacgatgggcttggtgcaggaaaaagtctgttagctttgaagactactgacgcgtccaacgaagagtactcgttatgggtctatcaatgtaattccctggagcaagcacaggctatctgtaaagtgttgtccactgccttcgactccgtcttgacatccgaaaagccgtag

SEQ ID NO: 149339 - DNA, 603 bp, Artificial Sequence
  derived and/or modified sequence
atgttccggaagggcaagaagagacattcgtcctcctctagtcagtcctctgaaatctctactaagtccaagtctgtggactccagcctgggtggacttagcaggagtagcactgttgcttccctggatacagacagcacaaaatcaagtggccagagtaataacaactccgatacatgtgcagagttcaggattaagtacgtgggtgcgatcgaaaaactcaagcttagcgaaggcaagggtttagagggacccctggaccttattaactatattgatgtggcacagcaagacggaaagcttccgttcgtgccacctgaggaggagtttataatgggcgtgtctaagtatggcatcaaggtgtcaacttccgatcaatacgatgttttacatcggcacgccttatacctgataatcagaatggtgtgctacgatgacggtttgggagccggaaagagcttgttggctctgaaaaccaccgatgctagtaacgaggagtactcgctttgggtgtatcaatgcaacagtctcgaacaggcccaggcaatctgcaaggtcctaagtacagcgtttgatagtgtactcacttcggaaaagccgtag

SEQ ID NO: 149340 - DNA, 411 bp, Artificial Sequence
  derived and/or modified sequence
atgttccgcaagggcaagaagcgtcactcatcttcatctagtcagagctccgagataagcaccaaatcaaaatccgtcgatagcagtttgggaggcctgagtcgcagcagtacagtggcctcattagatactgattctacaaagtccagcggacagtcaaacaacaactccgacacctgtgcagagtttcggattaagtatgtcggtgccatcgagaagctcaagctgtcagagggaaaaggcctggaagggccactcgacttgattaattacatcgatgtggcccagcaagacgggaaattgccctttgtgcctccggaagaagagtttattatgggagtgtccaaatacggcatcaaagttagcaccagcgaccaatatgatgtgctccaccgccacgccctgtactag

SEQ ID NO: 149341 - DNA, 603 bp, Artificial Sequence
  derived and/or modified sequence
atgttcagaaagggcaagaagagacacagcagcagcagcagccagagcagcgagatcagcaccaagagcaagagcgtggacagcagcctgggcggcctgagcagaagcagcaccgtggccagcctggacaccgacagcaccaagagcagcggccagagcaacaacaacagcgacacctgcgccgagttcagaatcaagtacgtgggcgccatcgagaagctgaagctgagcgagggcaagggcctggagggccccctggacctgatcaactacatcgacgtggcccagcaggacggcaagctgcccttcgtgccccccgaggaggagttcatcatgggcgtgagcaagtacggcatcaaggtgagcaccagcgaccagtacgacgtgctgcacagacacgccctgtacctgatcatcagaatggtgtgctacgacgacggcctgggcgccggcaagagcctgctggccctgaagaccaccgacgccagcaacgaggagtacagcctgtgggtgtaccagtgcaacagcctggagcaggcccaggccatctgcaaggtgctgagcaccgccttcgacagcgtgctgaccagcgagaagccctag

SEQ ID NO: 149342 - DNA, 411 bp, Artificial Sequence
  derived and/or modified sequence
atgttcagaaagggcaagaagagacacagcagcagcagcagccagagcagcgagatcagcaccaagagcaagagcgtggacagcagcctgggcggcctgagcagaagcagcaccgtggccagcctggacaccgacagcaccaagagcagcggccagagcaacaacaacagcgacacctgcgccgagttcagaatcaagtacgtgggcgccatcgagaagctgaagctgagcgagggcaagggcctggagggccccctggacctgatcaactacatcgacgtggcccagcaggacggcaagctgcccttcgtgccccccgaggaggagttcatcatgggcgtgagcaagtacggcatcaaggtgagcaccagcgaccagtacgacgtgctgcacagacacgccctgtactag

SEQ ID NO: 149343 - protein, 217 aa, Artificial Sequence
  derived and/or modified sequence
MAGRTVRAETRSRAKDDIKKVMATIEKVRRWEKRWVTVGDTSLRIFKWVPVVDPQEEERRRAGGGAERSRGRERRGRGASPRGGGPLILLDLNDENSNQSFHSEGSLQKGTEPSPGGTPQPSRPVSPAGPPEGVPEEAQPPRLGQERDPGGITAGSTDEPPMLTKEEPVPELLEAEAPEAYPVFEPVPPVPEAAQGDTEDSEGAPPLKRICPNAPDP

SEQ ID NO: 149344 - DNA, 459 bp, Artificial Sequence
  derived and/or modified sequence
atgcctggcctggtgttcttcaagtttgccaacctgggcggcggctggggcagcaggaagatgctggagcccggcatgtgcccagctgagatgagcctgaccccatttgtgaccaggagcctgaacctgctgtgcttctctgtgacccaccggggccggggcaaggacaaccccctgcacttcttcctgcagctgctggcccccagcgccagcgccagcctgggcctgggccgggagaccggccccctgcccagccctggcctgagccctggcctgctgtctgagacctttgtgtctgagggccccctgctgaccctgcagatctcctggtgtggcacagagtgcctgatggatggccagggccccctcatccacctgcacagccagaacatccgcatcagctttggagccacccagccccccctgctgctggtgtatgagatccgctggaacagatag

SEQ ID NO: 149345 - DNA, 654 bp, Artificial Sequence
  derived and/or modified sequence
atggccggcaggacggtccgggctgagactagaagtcgggccaaagatgacattaagaaggttatggctactatcgagaaggtgagaagatgggaaaaaaggtgggtcacggtgggggacacttcccttagaatattcaagtgggtgcccgtggtcgatccacaagaggaggaacgccggcgggccggggggggcgctgaacgctctcgaggtcgggagcgcagaggccgtggggctagcccgaggggggggggtccattgatcctcctcgaccttaatgacgagaatagtaatcaatcctttcacagtgaaggctccctgcagaaagggaccgagccatctcccggggggacaccacagccttctagaccagtgtcccctgcaggccctccagagggcgtccctgaggaggctcagccccccagactggggcaggagcgcgaccctggaggcatcactgctggaagcactgatgagccacccatgctgaccaaagaagaacccgttcccgaactgctggaggcggaagctcccgaagcgtacccggtgttcgaaccagtgccccccgtacccgaggctgctcagggcgacacagaggacagtgagggggcccctcctttgaagcgcatctgccccaatgcccccgacccatag

SEQ ID NO: 149346 - DNA, 654 bp, Artificial Sequence
  derived and/or modified sequence
atggccggccgcacagtgcgggcagagaccaggagccgggccaaggatgacatcaagaaggtgatggccaccatcgagaaggtgcggcgctgggagaagcgctgggtgacagtgggggacaccagcctgcgcatcttcaagtgggtgcctgtggtggacccccaggaggaggagcggcggcgggccggcggcggcgctgagaggagccggggccgggagcggcggggccgcggggccagcccccggggcggcggccccctcatcctgctggacctgaatgatgagaacagcaaccagagcttccacagcgagggcagcctgcagaagggcacagagcccagccctgggggcaccccccagcccagcaggcctgtgtccccagctggccccccagagggcgtgcctgaggaggcccagcccccccggctgggccaggagcgggaccccggcggcatcacagctggcagcacagatgagccccccatgctgaccaaggaggagcctgtgcctgagctgctggaggccgaggcccctgaggcctaccctgtgtttgagcctgtgccccctgtgcctgaggccgcccagggcgacacagaagattctgagggcgccccacccctgaagaggatctgccccaatgccccagacccctag

SEQ ID NO: 149347 - DNA, 654 bp, Artificial Sequence
  derived and/or modified sequence
atggccggccggaccgtgcgggccgagacccggagccgggccaaggacgatatcaagaaggtaatggccaccatcgagaaggtccggaggtgggagaagagatgggtgaccgtaggagacacaagcctgcggatctttaaatgggtgcctgtcgtggatccccaggaggaagaaagaagaagagccggtggcggcgcagagaggagcaggggacgcgaaaggagagggaggggggcaagcccccggggcggtggcccgctgatccttctcgacttaaacgatgaaaactccaatcaatcatttcactccgagggttccctgcagaaagggacagagccttcccccggcggaacaccacagcccagcaggcctgtcagcccagccggccctccagaaggggtgcctgaggaagcccaaccccctaggcttggccaggagagagacccagggggaattaccgccggttctacagatgagccacctatgttaaccaaggaagagccagtgcccgagctgctcgaagccgaagctcctgaagcgtatcccgtatttgagcctgtgccaccagtgccggaggcagcacagggcgatactgaggattctgagggtgcgccacctctgaagcgcatatgccctaatgcccctgatccatag

SEQ ID NO: 149348 - DNA, 654 bp, Artificial Sequence
  derived and/or modified sequence
atggccggacggaccgtgagggcggagacaaggagtcgcgcaaaggatgacattaagaaggtaatggccacaatcgagaaagtaagacggtgggaaaaacggtgggtgacagtgggagacactagtcttcggatctttaagtgggttcctgtagtggatcctcaggaagaagagcggcgaagagcaggaggcggagccgagcggtcacggggtcgtgagagacggggacgaggtgcctctccacgagggggtgggcctttgattttgctggacttgaacgatgagaactccaaccagagcttccatagcgaaggcagtctgcagaagggaactgagccctcccctgggggaaccccacagccaagccggccagtgagccccgcaggaccacctgaaggggtgcccgaggaggctcaacctcctcgactaggccaggaacgggacccaggcggtattactgcaggcagcaccgatgaaccccctatgctcacaaaagaggaacctgtgcctgaactcttagaggcggaggctcctgaggcttaccccgtgtttgagcccgttcctccagtcccagaggccgcacagggggataccgaagatagtgagggtgcacccccactgaaaagaatttgccccaatgctccagatccgtag

SEQ ID NO: 149349 - DNA, 953 bp, Artificial Sequence
  derived and/or modified sequence
ctctggccgcccgcgccaccgggccgctccggggacaggccggggcggggcgcggcggcaggaaacggggcggggacttgcggaggcgttggggacgagagagggcgcggccaactccaggggggacggcaggccgagagcgcggcgcccgggcctggcgcggagcctgagcccgccggacgggaggcggccccgccgcgggctcggccccggccccagccccgccagcatggccggccggactgtacgggccgagacccggagccgggccaaggatgacatcaagaaggtgatggcgaccatcgagaaggtccggagatgggagaagcgatgggtgactgtgggcgacacttcccttcgtatcttcaagtgggtgccagtggtggatccccaggaggaggagcgaaggcgggcaggtggcggggcagagagatcccgtggccgggaacgtcggggcaggggcgccagtccccgagggggtggccctctcatcctgctggatcttaatgatgagaacagcaaccagagtttccattcggaaggttccctgcaaaagggcacagagcccagtcctgggggcaccccccagcccagccgccctgtgtcacctgccggacccccagaaggggtccctgaggaggctcagcccccacggctgggccaagagagagatcccgggggcataactgctggcagcaccgacgaacccccaatgctgaccaaggaggagcctgttccagaactgctggaagctgaggcccccgaagcttaccctgtctttgagccagtgccacctgtccctgaggcagcccagggtgacacagaggactcggagggtgcccccccactcaagcgcatctgcccaaatgcccctgacccctgagaagccggcctgcctgtcctgttgccccaggggcccctttggctttttacaaataaagacccttttgtaa

SEQ ID NO: 149350 - DNA, 654 bp, Artificial Sequence
  derived and/or modified sequence
atggccggcagaaccgtgagagccgagaccagaagcagagccaaggacgacatcaagaaggtgatggccaccatcgagaaggtgagaagatgggagaagagatgggtgaccgtgggcgacaccagcctgagaatcttcaagtgggtgcccgtggtggacccccaggaggaggagagaagaagagccggcggcggcgccgagagaagcagaggcagagagagaagaggcagaggcgccagccccagaggcggcggccccctgatcctgctggacctgaacgacgagaacagcaaccagagcttccacagcgagggcagcctgcagaagggcaccgagcccagccccggcggcaccccccagcccagcagacccgtgagccccgccggcccccccgagggcgtgcccgaggaggcccagccccccagactgggccaggagagagaccccggcggcatcaccgccggcagcaccgacgagccccccatgctgaccaaggaggagcccgtgcccgagctgctggaggccgaggcccccgaggcctaccccgtgttcgagcccgtgccccccgtgcccgaggccgcccagggcgacaccgaggacagcgagggcgccccccccctgaagagaatctgccccaacgcccccgacccctag

SEQ ID NO: 149351 - protein, 906 aa, Artificial Sequence
  derived and/or modified sequence
MPLRLDIKRKLTARSDRVKSVDLHPTEPWMLASLYNGSVCVWNHETQTLVKTFEVCDLPVRAAKFVARKNWVVTGADDMQIRVFNYNTLERVHMFEAHSDYIRCIAVHPTQPFILTSSDDMLIKLWDWDKKWSCSQVFEGHTHYVMQIVINPKDNNQFASASLDRTIKVWQLGSSSPNFTLEGHEKGVNCIDYYSGGDKPYLISGADDRLVKIWDYQNKTCVQTLEGHAQNVSCASFHPELPIIITGSEDGTVRIWHSSTYRLESTLNYGMERVWCVASLRGSNNVALGYDEGSIIVKLGREEPAMSMDANGKIIWAKHSEVQQANLKAMGDAEIKDGERLPLAVKDMGSCEIYPQTIQHNPNGRFVVVCGDGEYIIYTAMALRNKSFGSAQEFAWAHDSSEYAIRESNSIVKIFKNFKEKKSFKPDFGAESIYGGFLLGVRSVNGLAFYDWDNTELIRRIEIQPKHIFWSDSGELVCIATEESFFILKYLSEKVLAAQETHEGVTEDGIEDAFEVLGEIQEIVKTGLWVGDCFIYTSSVNRLNYYVGGEIVTIAHLDRTMYLLGYIPKDNRLYLGDKELNIISYSLLVSVLEYQTAVMRRDFSMADKVLPTIPKEQRTRVAHFLEKQGFKQQALTVSTDPEHRFELALQLGELKIAYQLAVEAESEQKWKQLAELAISKCQFGLAQECLHHAQDYGGLLLLATASGNANMVNKLAEGAERDGKNNVAFMSYFLQGKVDACLELLIRTGRLPEAAFLARTYLPSQVSRVVKLWRENLSKVNQKAAESLADPTEYENLFPGLKEAFVVEEWVKETHADLWPAKQYPLVTPNEERNVMEEGKDFQPSRSTAQQELDGKPASPTPVIVASHTANKEEKSLLELEVDLDNLELEDIDTTDINLDEDILDD

SEQ ID NO: 149352 - protein, 877 aa, Artificial Sequence
  derived and/or modified sequence
MLASLYNGSVCVWNHETQTLVKTFEVCDLPVRAAKFVARKNWVVTGADDMQIRVFNYNTLERVHMFEAHSDYIRCIAVHPTQPFILTSSDDMLIKLWDWDKKWSCSQVFEGHTHYVMQIVINPKDNNQFASASLDRTIKVWQLGSSSPNFTLEGHEKGVNCIDYYSGGDKPYLISGADDRLVKIWDYQNKTCVQTLEGHAQNVSCASFHPELPIIITGSEDGTVRIWHSSTYRLESTLNYGMERVWCVASLRGSNNVALGYDEGSIIVKLGREEPAMSMDANGKIIWAKHSEVQQANLKAMGDAEIKDGERLPLAVKDMGSCEIYPQTIQHNPNGRFVVVCGDGEYIIYTAMALRNKSFGSAQEFAWAHDSSEYAIRESNSIVKIFKNFKEKKSFKPDFGAESIYGGFLLGVRSVNGLAFYDWDNTELIRRIEIQPKHIFWSDSGELVCIATEESFFILKYLSEKVLAAQETHEGVTEDGIEDAFEVLGEIQEIVKTGLWVGDCFIYTSSVNRLNYYVGGEIVTIAHLDRTMYLLGYIPKDNRLYLGDKELNIISYSLLVSVLEYQTAVMRRDFSMADKVLPTIPKEQRTRVAHFLEKQGFKQQALTVSTDPEHRFELALQLGELKIAYQLAVEAESEQKWKQLAELAISKCQFGLAQECLHHAQDYGGLLLLATASGNANMVNKLAEGAERDGKNNVAFMSYFLQGKVDACLELLIRTGRLPEAAFLARTYLPSQVSRVVKLWRENLSKVNQKAAESLADPTEYENLFPGLKEAFVVEEWVKETHADLWPAKQYPLVTPNEERNVMEEGKDFQPSRSTAQQELDGKPASPTPVIVASHTANKEEKSLLELEVDLDNLELEDIDTTDINLDEDILDD

SEQ ID NO: 149353 - DNA, 2721 bp, Artificial Sequence
  derived and/or modified sequence
atgcccctcagactggacatcaaacgcaagctcacagcgcggtccgaccgtgttaaaagcgttgatctccatcccactgaaccttggatgctcgcttctctgtacaacggctcagtttgcgtgtggaaccatgaaacccagacattagtcaaaaccttcgaagtgtgcgacctgccagtacgtgcagctaagttcgtcgcacggaagaattgggtggttaccggagccgatgacatgcaaatccgggtgttcaactacaacacactcgagagagtgcatatgtttgaagcccactcagactatatccgctgcattgccgtgcaccctacacagccttttattctgacaagctcggacgatatgctgatcaaactctgggattgggacaaaaagtggagctgctcacaagtgttcgagggacatacgcactacgtgatgcagattgtgattaatccgaaggataacaatcagtttgcgtcagccagcctcgaccgtaccattaaagtgtggcaacttggatcatcttcccccaacttcacactggagggacacgaaaagggagtaaactgcatagactactattcaggcggcgacaagccctatttaatctctggagctgatgatcgactggttaagatttgggactatcagaataagacctgcgtgcagacgctggagggacatgctcagaatgtttcctgcgccagctttcacccagagctccccattataatcaccgggtccgaggatgggacagtgcggatatggcattcgtcgacctatagattggaatccaccctgaattacggtatggaacgagtgtggtgcgtggccagcctgcgaggttcaaataacgtggcactgggctatgatgaaggtagcattatcgtgaaacttgggcgcgaggagccagctatgtcaatggacgctaacggtaaaattatctgggcaaaacactctgaagtccagcaggcaaacctcaaagcgatgggagatgcagagattaaggacggagaacggcttcccttagccgttaaggatatgggatcctgtgagatttatccacaaactattcagcataatccaaatggaaggtttgtggtcgtgtgcggcgacggggagtatatcatttacactgcaatggccctccgcaataagtccttcggcagcgcccaagagtttgcatgggcccacgattcatctgaatatgccattagggagtccaatagcatagtgaaaatcttcaagaattttaaggagaaaaaaagttttaagcctgactttggagccgagagcatttacggtggatttttgctgggcgtgcggagcgtgaatggcctcgctttctatgactgggataatacagagctgataagacgcattgagatacagcctaagcatattttttggagtgactccggtgagttggtttgtattgctactgaagaatccttttttattctaaaatatctgtcagagaaagtgctcgcagcccaggagacacatgaaggagttacagaagacggcattgaggatgcgtttgaggtgctgggagagattcaggaaatcgtgaaaacaggcctgtgggttggggactgctttatctacacatcctccgtgaataggctaaactactacgtgggtggcgaaatcgtcaccatcgcacatctcgatcgaaccatgtacttgctgggatatatccccaaggacaatcgtttgtacctgggtgataaagaattgaacatcattagctatagcctgctcgtaagtgtgctggagtatcagactgctgtgatgcgcagggacttctctatggccgacaaggtgcttcctaccattcctaaggagcagcggaccagggttgctcactttctggagaagcaagggttcaaacagcaggctctcaccgtcagtacggacccagaacaccgatttgagctcgctctgcagctgggtgagcttaagattgcttatcagttagctgtggaagcagagagcgagcagaagtggaagcagctcgctgagctggccatatctaagtgtcagtttggactggcccaagaatgtcttcaccacgcccaggactacggcggcttgctactcctggccaccgcctcgggtaatgcaaacatggttaataaattggccgaaggcgccgaaagagacggcaagaacaatgtggcctttatgtcctatttcctgcagggcaaggtggacgcctgtctggagttgctaatcagaacagggagacttccagaagctgcctttctggccagaacgtacctgcccagtcaggtgtcgcgggtggttaagctctggagggaaaatctcagcaaagtcaatcagaaagcggcggagtccctggctgatcccacagagtacgaaaacctgtttcctggattgaaggaggccttcgtagtagaagagtgggttaaggaaacccacgctgacctttggcccgccaaacaataccctttagttacaccgaacgaagagagaaatgttatggaagaggggaaagactttcagccctcaagatctacggctcagcaggagctcgatgggaagccagcaagtccgacacctgtcattgtggccagccacactgcgaataaagaggagaagtcattgcttgaactggaagtagacctagataacctggagttggaggacatcgatacaactgacattaacctggacgaagacatactggatgactag

SEQ ID NO: 149354 - DNA, 2634 bp, Artificial Sequence
  derived and/or modified sequence
atgcttgcatcactgtataacggatcagtgtgtgtgtggaaccacgaaactcagaccctggtgaagacctttgaagtgtgcgatctgccagtgagagctgcaaagtttgtggcgaggaaaaactgggttgtcacaggtgctgatgatatgcaaatacgcgtcttcaattataatacacttgagagggtgcacatgttcgaagctcactccgactacattcgttgcattgccgttcacccaacacagccgtttatcttgaccagtagcgatgatatgcttatcaaactttgggactgggacaagaagtggtcttgtagccaggtgtttgaaggacacacgcactacgtgatgcaaatcgttattaacccgaaagataataatcaatttgccagcgcctctctagaccgaacaataaaagtgtggcaactcggcagtagcagccctaattttaccttggaaggccacgaaaagggagtcaactgtatcgactattatagcgggggcgacaaaccttatttgatttcaggcgcagacgatagactggtgaagatatgggactatcagaacaaaacttgcgtccaaaccctggagggtcatgctcaaaacgtgtcatgtgcatctttccaccccgaattgcctatcatcataacagggtctgaagacggtacagttcggatctggcactcttcaacttatcggctggaaagcacattaaattacggaatggagagggtatggtgtgtggcttctctaagggggtcaaataacgtggccctcggatatgacgaaggatccattatcgtcaagctgggcagggaggagccggcaatgagtatggacgctaatggaaaaataatatgggccaaacactccgaggtccagcaggctaacctaaaagccatgggtgacgcagagataaaggatggggaaagactgccacttgccgtaaaggacatgggcagttgtgaaatatacccacagaccatacagcacaacccgaacggccgctttgttgtggtttgcggagacggcgagtacattatctataccgcaatggcactccgcaacaaaagtttcggctctgcacaggaattcgcttgggcccacgattcaagtgagtatgccatacgggagtccaattccattgtgaaaatttttaagaacttcaaagaaaagaaaagcttcaaacccgatttcggagccgagtccatctatgggggctttttgcttggagtgaggagtgtgaacggactggctttttatgattgggataatactgagctgatcagaagaattgagatccaacctaagcatattttctggtcagattcaggagagctggtttgcatagctactgaagagtccttttttattctgaagtacctaagtgagaaagtcttagcggcccaggaaacacatgaaggagtgaccgaggacggcattgaagatgccttcgaagtcctgggtgagattcaagagatcgttaaaactggcctgtgggtaggagactgcttcatttatacctccagtgtgaataggctgaactactatgtgggaggcgagatcgtcaccattgcacacctcgaccggaccatgtatctgctaggctacatccccaaggacaatcgcctgtatctgggggacaaggagcttaacatcattagttattcattactggtcagtgtcctggagtaccagaccgctgttatgcgccgtgacttcagcatggccgataaagtcttgcccacgattcccaaggagcaaagaactcgcgttgcacatttcctggagaagcagggtttcaaacagcaagccctgactgtttccactgaccctgagcatcggttcgaactggcgcttcagctgggagaacttaagatcgcataccagctcgcagtggaggccgagagcgagcagaagtggaagcagctggctgaacttgccattagcaaatgtcaatttggtctagcgcaggagtgcctacaccacgcccaggattacggcggcctgctgctgctggccactgctagcggaaatgccaacatggtcaataagctggccgagggcgccgagagagacggcaaaaataatgtggcttttatgagctattttttgcaaggtaaagtggatgcttgtctggaacttctaatccggacaggacgcttgcccgaggcagccttcctcgcaagaacatatctgccatcacaggtttcacgcgtcgtcaaactgtggcgggagaatctgtctaaggtcaatcagaaagccgcagagtccctagctgatcctaccgagtacgagaacctgttcccgggactcaaggaggccttcgtggttgaagagtgggtcaaggagacccacgccgatctttggcctgctaaacagtatccactggtcacacccaacgaggagaggaacgtgatggaggagggcaaagactttcagccctcaagatccacggcacagcaagagctggacggtaaacccgcttcccctacacccgtcatcgtagcttcccacacggccaacaaggaggaaaaatcactgctcgagttggaggtggacttggataatttggagcttgaggacatcgacacaacagatattaatctggatgaggacattctcgatgactag

SEQ ID NO: 149355 - DNA, 2721 bp, Artificial Sequence
  derived and/or modified sequence
atgcccctgcggctggacatcaagaggaagctgacagcccggagtgacagagtgaagtctgtggacctgcaccccacagagccctggatgctggccagcctgtacaacggctctgtgtgtgtgtggaaccacgagacccagaccctggtgaagacctttgaggtgtgtgacctgcctgtgcgggccgccaagtttgtggccaggaagaactgggtggtgactggagcagatgacatgcagatccgggtcttcaactacaacaccctggagcgggtgcacatgtttgaggcccacagcgactacatccgctgcatcgctgtgcaccccacccagcccttcatcctgaccagcagtgatgacatgctgatcaagctgtgggactgggacaagaagtggagctgcagccaggtgtttgagggccacacccactacgtgatgcagatcgtcatcaaccccaaggacaacaaccagtttgccagcgccagcctggacaggaccatcaaggtgtggcagctgggcagcagcagccccaacttcaccctggagggccacgagaagggcgtgaactgcatcgactactacagcggcggggacaagccctacctgatcagcggggctgatgaccggctggtgaagatctgggactaccagaacaagacctgtgtgcagaccctggagggccacgcccagaatgtgtcctgtgccagcttccaccctgagctgcccatcatcatcaccggctctgaagatggcaccgtgcgcatctggcacagcagcacctaccgcctggagagcaccctgaactacggcatggagcgggtgtggtgtgtggccagcctgcggggcagcaacaacgtggccctgggctatgatgagggcagcatcatcgtgaagctgggccgggaggagcccgccatgtccatggatgccaacgggaagatcatctgggccaagcacagcgaggtgcagcaggccaacctgaaggccatgggagatgctgagatcaaggatggagagcggctgcccctggccgtgaaggacatgggcagctgtgagatctacccccagaccatccagcacaaccccaacggccgctttgtggtggtgtgtggagatggagagtacatcatctacacagccatggccctgaggaacaagagctttggcagcgcccaggagtttgcctgggcccatgacagcagtgaatatgccatccgggagagcaacagcatcgtgaagatcttcaagaacttcaaggagaagaagagcttcaagccagactttggagctgagagcatctacggcggcttcctgctgggcgtgcgctctgtgaatggcctggccttctatgactgggacaacacagagctgatcagaagaattgagatccagcccaagcacatcttctggagcgacagcggggagctggtgtgcatcgccacagaggagagcttcttcatcctgaagtacctgtctgagaaggtgctggccgcccaggagacccatgagggcgtgacagaagatggcattgaagatgcctttgaggtgctgggggagatccaggagatcgtgaagacaggcctgtgggtgggggactgcttcatctacaccagctctgtgaaccggctgaactactacgtgggcggggagatcgtgaccatcgcccacctggacaggaccatgtacctgctgggctacatccccaaggacaacagactctacctgggggacaaggagctgaacatcatctcctacagcctgctggtgtctgtgctggagtaccagacagctgtgatgaggcgggacttctccatggctgacaaggtgctgcccaccatccccaaggagcagaggaccagggtggcccacttcctggagaagcagggcttcaagcagcaggccctgactgtgtccacagatcctgagcacagatttgagctggccctgcagctgggggagctgaagatcgcctaccagctggccgtggaggccgagagcgagcagaagtggaagcagctggccgagctggccatcagcaagtgccagtttggcctggcccaggagtgcctgcaccacgcccaggactatggaggcctgctgctgctggccacagccagcggaaatgccaacatggtgaacaagctggccgagggcgctgagagagatggcaagaacaacgtggccttcatgagctacttcctgcagggcaaggtggatgcctgcctggagctgctgatcagaacaggccgcctgcctgaggccgccttcctggcccggacctacctgcccagccaggtgtcccgggtggtgaagctgtggagggagaacctgagcaaggtgaaccagaaggctgctgagagcctggccgaccccacagaatatgaaaatctcttccctggcctgaaggaggcctttgtggtggaggagtgggtgaaggagacccacgccgacctgtggccagccaagcagtaccccctggtgaccccaaatgaggagagaaatgtgatggaggagggcaaggacttccagcccagccgcagcacagcccagcaggagctggatggcaagccagccagccccacccctgtgattgtggccagccacacagccaacaaggaggagaagagcctgctggagctggaggtggacctggacaacctggagctggaggacatcgacaccacagacatcaacctggatgaggacatcctggatgactag

SEQ ID NO: 149356 - DNA, 2634 bp, Artificial Sequence
  derived and/or modified sequence
atgctggccagcctgtacaatggatctgtgtgtgtgtggaaccacgagacccagaccctggtgaagacctttgaggtgtgtgacctgcctgtgcgggccgccaagtttgtggccaggaagaactgggtggtgactggagcagatgacatgcagatccgggtcttcaactacaacaccctggagcgggtgcacatgtttgaggcccacagcgactacatccgctgcatcgctgtgcaccccacccagcccttcatcctgaccagcagtgatgacatgctgatcaagctgtgggactgggacaagaagtggagctgcagccaggtgtttgagggccacacccactacgtgatgcagatcgtcatcaaccccaaggacaacaaccagtttgccagcgccagcctggacaggaccatcaaggtgtggcagctgggcagcagcagccccaacttcaccctggagggccacgagaagggcgtgaactgcatcgactactacagcggcggggacaagccctacctgatctctggagcagatgaccggctggtgaagatctgggactaccagaacaagacctgtgtgcagaccctggagggccacgcccagaatgtgtcctgtgccagcttccaccctgagctgcccatcatcatcactggaagtgaagatggcaccgtgcgcatctggcacagcagcacctaccgcctggagagcaccctgaactacggcatggagcgggtgtggtgtgtggccagcctgcggggcagcaacaacgtggccctgggctatgatgagggcagcatcatcgtgaagctgggccgggaggagcccgccatgtccatggatgccaacgggaagatcatctgggccaagcacagcgaggtgcagcaggccaacctgaaggccatgggagatgctgagatcaaggatggagagcggctgcccctggccgtgaaggacatgggcagctgtgagatctacccccagaccatccagcacaaccccaacggccgctttgtggtggtgtgtggagatggagagtacatcatctacacagccatggccctgaggaacaagagctttggaagtgcccaggagtttgcctgggcccatgacagcagtgaatatgccatccgggagagcaacagcatcgtgaagatcttcaagaacttcaaggagaagaagagcttcaagccagactttggagctgagagcatctatggaggcttcctgctgggcgtgcgctctgtgaatggcctggccttctatgactgggacaacacagagctgatccgccgcatcgagatccagcccaagcacatcttctggagcgacagcggggagctggtgtgcatcgccacagaggagagcttcttcatcctgaagtacctgtctgagaaggtgctggccgcccaggagacccatgaaggagtgacagaagatggcattgaagatgcctttgaggtgctgggggagatccaggagatcgtgaagacaggcctgtgggtgggggactgcttcatctacaccagctctgtgaaccggctgaactactacgtgggcggggagatcgtgaccatcgcccacctggacaggaccatgtacctgctgggctacatccccaaggacaaccggctgtacctgggggacaaggagctgaacatcatctcctacagcctgctggtgtctgtgctggagtaccagacagctgtgatgagaagagacttctccatggctgacaaggtgctgcccaccatccccaaggagcagaggaccagggtggcccacttcctggagaagcagggcttcaagcagcaggccctgactgtgtccacagatcctgagcacagatttgagctggccctgcagctgggggagctgaagatcgcctaccagctggccgtggaggccgagagcgagcagaagtggaagcagctggccgagctggccatcagcaagtgccagtttggcctggcccaggagtgcctgcaccacgcccaggactatggaggcctgctgctgctggccacagccagcggaaatgccaacatggtgaacaagctggccgagggcgctgagagagatggcaagaacaacgtggccttcatgagctacttcctgcagggcaaggtggatgcctgcctggagctgctgatcagaacaggccgcctgcctgaggccgccttcctggcccggacctacctgcccagccaggtgtcccgggtggtgaagctgtggagggagaacctgagcaaggtgaaccagaaggctgctgagagcctggccgaccccacagaatatgagaacctcttccctggcctgaaggaggcctttgtggtggaggagtgggtgaaggagacccatgctgacctgtggccagccaagcagtaccccctggtgaccccaaatgaggagagaaatgtgatggaggagggcaaggacttccagcccagccgcagcacagcccagcaggagctggatggcaagccagccagccccacccctgtgattgtggccagccacacagccaacaaggaggagaagagcctgctggagctggaggtggacctggacaacctggagctggaggacatcgacaccacagacatcaacctggatgaggacatcctggatgactag

SEQ ID NO: 149357 - DNA, 2721 bp, Artificial Sequence
  derived and/or modified sequence
atgcccctgcggctggacatcaagcggaagctgaccgcccggagcgaccgggttaagagtgttgatctacatcctaccgagccttggatgctcgcctctctttataatggatccgtgtgcgtctggaatcacgaaactcagactctggtgaagaccttcgaggtgtgtgacctgccagtgcgcgctgccaagttcgtggctaggaagaactgggtggtcacgggggcggacgacatgcagatccgggtgttcaactataacacactggaacgagtgcatatgttcgaagcccacagcgattatattaggtgtatcgctgtgcatcccacacagcctttcatactcacctcgtcggacgatatgctgatcaagctgtgggattgggacaaaaagtggtcctgtagtcaggtgtttgagggacacactcattacgtgatgcagatagtcatcaatcccaaggataacaatcaattcgcatctgccagcctcgaccgaaccatcaaggtgtggcaattggggagctcttcaccaaattttacattggagggtcatgagaagggagtgaactgcatagactattactccggaggagacaaaccatatctcatctccggtgcagatgacaggctggtaaaaatttgggactaccagaataagacctgtgtccagacgctggaagggcacgcccagaacgtgagctgcgcatccttccacccagagcttccaatcatcatcactggttccgaagacggcacagtccggatatggcatagcagcacctatcggcttgagtctaccctcaattatgggatggagcgtgtgtggtgcgtggcaagcctaagagggagcaacaacgtggctctgggctatgatgagggctccatcattgtgaaacttggcagagaagaacccgcaatgagtatggacgccaatgggaagattatttgggccaagcactccgaggtccagcaggcaaatttgaaagccatgggagacgcggagatcaaagacggtgagaggctacctctggccgtgaaagatatgggaagttgtgaaatatacccacaaacaatccagcacaatcctaacggtcggttcgtagtcgtgtgcggggacggagaatacatcatctataccgccatggcactaaggaataagtctttcggatcggcccaagagtttgcttgggcacacgactcatcggagtacgctattagagagtctaacagcattgtgaagatcttcaaaaacttcaaagagaagaaatcattcaagcctgactttggagccgaaagcatatatggtgggtttttgttaggagttaggtcagtgaatggcctcgccttctatgattgggacaatacagaactcattcgtcgcatcgaaattcagcccaaacacatcttctggtctgactctggtgagctcgtatgcatagcgactgaagagagttttttcattcttaaatatctctctgaaaaagtgttagccgcccaagagacgcatgagggtgttactgaagacgggatcgaagatgcctttgaggttcttggagagatccaggaaatcgtgaaaactggtctttgggttggggactgttttatatacacttccagtgtgaacaggctcaattattacgtcggaggtgagatcgtgaccatagcccatcttgacagaacaatgtatctgctgggatacataccaaaagacaatagactttatctgggcgataaagaactgaacatcatttcttatagtctcctggtatccgttctggagtaccagactgctgtgatgcgtcgtgatttttcaatggccgacaaggtcctgccaacaataccgaaagaacaacgaacccgggtggctcatttccttgaaaagcagggctttaaacagcaggctctgaccgtctccacagatccggagcacagatttgaactcgctttacagctgggggagctgaagatagcttatcagttggccgtggaggccgagagcgagcagaagtggaaacaactggccgagctcgctatctccaagtgccagtttggcctcgcccaagagtgcttacatcacgcccaggactacggtggcttgctactgctggctacagcgtcaggcaatgctaatatggtgaacaaactggcggagggcgcagagcgagatgggaagaacaatgttgcattcatgagctattttcttcaagggaaggtcgacgcctgtctggagctcctgattcgaactgggcgcctgccagaggccgcctttttggccagaacctacctgcctagccaggtcagccgcgtagtcaaactctggagagaaaacttatctaaagtgaatcagaaggccgctgaatcactcgccgatcccacagagtatgagaacctcttccccgggcttaaggaggcctttgttgttgaggaatgggtcaaagagactcacgccgatctgtggcccgccaagcagtacccactggttacacccaacgaagaacgcaacgtcatggaggagggcaaagactttcaaccatcccgtagcaccgcccaacaagaactcgatgggaagcccgcctcacccaccccggtgatagtcgcttctcacactgctaacaaggaagaaaagtcgcttttggaattagaggtggacctggacaacctggagctggaggatatcgataccaccgacattaacttggacgaggatatcttggatgactag

SEQ ID NO: 149358 - DNA, 2634 bp, Artificial Sequence
  derived and/or modified sequence
atgctggccagcctgtacaacggcagcgtgtgcgtgtggaaccacgaaacccagacactggtcaagacctttgaagtctgcgatctgcctgtaagggcggctaagttcgtcgctagaaagaactgggtggtgacaggagctgacgatatgcagattcgggtgtttaactacaacactctagaacgagtgcatatgttcgaagcccactccgactacatccggtgtatagccgtccacccaacccaaccctttattcttacatcctccgacgacatgctgattaagttgtgggattgggacaagaaatggagttgtagccaggttttcgaagggcatacacactatgtgatgcagatcgttattaacccgaaagataataaccagtttgcatctgccagtctggacaggactatcaaagtatggcagttgggctcttcatcacccaatttcactctagaagggcatgagaaaggcgtcaactgtatagattattatagtggcggcgataagccttatttgatatccggagctgacgacagactggtcaagatctgggactatcaaaacaagacgtgcgtgcaaaccctggaaggccatgcccaaaacgtgagctgcgcctcatttcaccccgaattacccatcatcatcactggatctgaagatgggactgtgcggatctggcattcatccacttatcggctggaatccaccctaaattacggtatggaacgtgtatggtgcgtcgcttcactgagaggaagcaataacgtggctctgggctatgacgaaggatccatcatcgtaaagctgggccgggaagaaccagccatgtccatggatgctaatggcaaaatcatttgggctaagcattccgaagtccagcaggctaatctcaaagccatgggggacgccgaaatcaaggacggggagcgcctgcctctggccgttaaagacatgggttcctgcgaaatctacccacagaccatacagcacaatcccaacggccggttcgtggtggtttgtggagacggtgaatacatcatctacaccgcaatggctctgaggaataaaagcttcggatctgcacaggagtttgcatgggcccacgatagctctgagtacgccattagggaaagtaattccatcgtcaaaattttcaagaactttaaagagaagaagagcttcaaacccgattttggtgccgaatcaatctacgggggctttctgctgggcgtgcgatcagtgaatggcttagccttttacgattgggataacacagaactgattaggcgaatagaaattcagccaaaacatatcttttggagtgatagtggcgagctggtgtgtatagctaccgaagaatcatttttcatcttgaagtatctgagcgaaaaagtgctggccgcccaggaaacacacgagggcgtcaccgaggacggaatagaggacgccttcgaagtcttaggagagatccaggaaatcgtgaaaactggactgtgggttggggattgcttcatctatacttctagtgtcaataggcttaactactatgtgggtggggagatcgtgacgatcgcccacttggaccggactatgtacctgttaggatatatccccaaggacaaccgcttatacctgggagacaaggaactcaatatcatctcttactccctgttggttagcgtgctagaataccagacagccgtaatgcggcgggacttctccatggcggataaagttctgcccactatccccaaagagcaacgaacccgggtcgcccatttcctggagaagcagggcttcaagcagcaggccctgacggtgtctactgaccctgaacatagatttgagttggccctgcagctgggtgaattgaagattgcctaccagcttgctgtggaggcagaatcagagcagaaatggaaacagctggcagagctagccattagcaaatgccaatttgggttagcacaggagtgcttgcaccatgctcaagattacggcgggcttcttctacttgccactgccagtggtaatgcgaatatggtgaataagcttgctgaaggcgctgagagggatggcaaaaataacgttgcattcatgagctacttcttgcaaggaaaggtggatgcatgtctcgaactcctgattcgcaccggccgcttgccggaggctgcctttctcgctcgcacctatctacccagtcaggtgagccgcgtggtgaagctatggcgagagaacctctcaaaggtcaaccaaaaagcggccgaatcacttgccgaccccaccgaatatgagaacctgttccctgggttaaaagaagcatttgtggtggaagagtgggtgaaggagacccacgctgacctctggcctgccaagcagtatcccctggtcacaccaaacgaagaacgaaacgtgatggaggaaggcaaggactttcaaccctcacgctccaccgcccaacaggagctggatggcaagccagccagccccacccctgtcatagtggcatctcatacagccaataaagaggaaaaatccctgcttgagcttgaggtcgatctcgacaacctcgagctggaagatattgacactacagatatcaacctggacgaagacattctagacgattag

SEQ ID NO: 149359 - DNA, 2721 bp, Artificial Sequence
  derived and/or modified sequence
atgccactacggctcgacatcaagcgaaagttaactgcacgctctgatcgtgtgaagagcgtggatctgcatccgactgaaccttggatgctcgcctcactttataatggctctgtctgcgtgtggaatcacgagacacagacattggtgaaaactttcgaggtgtgtgacctgcccgtgagagctgctaagttcgtcgcacgcaagaattgggtggtgactggtgctgatgacatgcagatcagggtgttcaattacaatacgctagaaagggtccatatgtttgaagctcacagcgactacatccgatgcatagctgtccatccgacgcagccctttattctcacctcaagtgacgacatgctgatcaaactgtgggattgggataagaagtggtcgtgctctcaggtctttgagggccacacgcattacgtgatgcagatagtgattaatccgaaagataacaatcagttcgcctctgcctctctggacaggaccattaaagtgtggcagctcggatcatcaagtccaaatttcacgttagagggccacgagaagggcgtgaactgtatcgactactactcgggcggagacaagccctatctaatttctggcgcagatgacaggcttgtgaaaatttgggactaccagaataagacatgcgttcagaccttggaaggccacgcccagaacgtgtcatgtgcttcttttcacccggagttgccgatcatcatcaccggttccgaggatgggacagtacgcatttggcacagctccacttaccggttagagtcaactctgaactatgggatggagagggtgtggtgcgtggccagtctccgaggaagcaacaacgtggctctgggttacgacgagggctctataattgtgaagctcggcagagaggagcctgcaatgtccatggatgccaatggtaagatcatctgggctaaacattctgaggtgcagcaggccaacctcaaggctatgggggacgcagagatcaaagacggcgaacggctgcccttagctgtgaaagacatggggtcgtgcgagatctatcctcagacaatccagcataatccgaatggcagatttgtcgtagtgtgcggagatggggagtacatcatctataccgccatggcgctaaggaacaaatccttcggatcagctcaggaattcgcttgggcacacgactccagcgaatatgcaatcagggaatcaaacagcatagttaaaatctttaaaaattttaaggagaagaagtctttcaagcccgacttcggagccgaaagcatttacgggggttttttgctaggagtcagatctgtgaatgggctcgctttctacgactgggacaacactgagttgattcgtcggattgagattcagccaaaacacattttctggtccgatagcggagagttagtctgtatcgccacagaggagagcttttttattctgaaatatctctccgagaaagttctggctgctcaggagactcatgagggggtgacggaagatggcatcgaagatgcttttgaagtcctgggggaaatccaagagatcgttaagactgggctgtgggtgggcgattgctttatttacacatctagtgttaataggcttaactattacgtaggaggcgagatcgtgaccatcgctcaccttgaccggactatgtatctgctgggatatattcccaaggacaatcgtctctatctgggggataaggagcttaacatcatctcctatagtctccttgtgagcgtgctggagtatcaaactgccgtaatgcggcgagattttagcatggcagacaaagtcctacccactattcctaaagagcaacggacgagagttgcacacttcctcgagaaacaagggttcaaacagcaggcactgaccgtctccaccgatcctgagcaccggtttgagctcgcactgcagctgggcgaattaaaaattgcatatcaattggccgtcgaggccgagtcagaacagaagtggaagcagttggctgagctagcaatctctaagtgtcagtttggactagcccaagagtgcctccatcatgctcaggactacggcggtctgctgctgttggcaacggccagtggcaatgctaatatggttaacaagctggctgagggcgctgagcgagatggcaagaataacgttgccttcatgtcttactttctgcagggtaaggtcgacgcctgcttggagctgcttattagaaccggacgacttccggaggccgctttcctggccagaacgtacttgccctctcaggtctcccgggtcgtaaagttgtggcgggagaacttatctaaagttaatcaaaaagcagctgaatcactggcagatcctaccgaatatgagaacttgttcccaggactcaaggaagcatttgttgtggaggagtgggtgaaggaaacacacgctgatctgtggcccgctaaacagtaccccctggtaactccaaatgaggaacggaacgtcatggaggaggggaaagacttccagccctcccgctcaactgcccagcaagaattagacggtaaacccgcaagtcccacacctgtcatcgtggcctcacatacagccaacaaggaagaaaagtccctcctggagttagaggtggacctcgataacctggagctggaggacatcgacacgacagatattaacttagatgaagacattctcgatgattag

SEQ ID NO: 149360 - DNA, 2634 bp, Artificial Sequence
  derived and/or modified sequence
atgttagcttcactgtataacggaagtgtatgtgtgtggaaccacgagactcagactctggtgaaaaccttcgaggtttgtgatctcccagtgagagctgccaagtttgttgccagaaaaaactgggttgtgacaggtgcagacgacatgcaaatacgcgtgttcaactacaatacattggaacgggtgcacatgtttgaagcccactctgactacattcgctgcatcgccgtgcacccaacacagccatttatactaacaagctctgatgacatgcttattaaactgtgggactgggacaaaaagtggtcttgcagccaggtgtttgagggacatacacactatgtaatgcagatcgttatcaaccccaaggacaacaaccagttcgcttcagctagcttggatcggactataaaagtgtggcagctgggttcatcctcacctaacttcaccctggaggggcatgagaaaggcgttaactgcatcgattactattccggaggggacaaaccttatctcatcagcggagccgacgatagactcgtgaagatttgggattatcagaacaaaacatgcgttcagaccctggagggtcacgcccagaacgtgtcctgcgcttcattccaccctgagctgcctattattattacagggtccgaggatggcactgtaaggatctggcatagctcgacttataggttagagagcaccctgaactacgggatggaaagggtgtggtgcgttgccagcctgcggggatcaaataacgtcgccctgggatacgacgagggcagtatcatagtgaaactcgggagagaggagcccgctatgtcaatggacgctaatggcaaaatcatttgggccaagcattcggaagtccagcaggccaatcttaaggctatgggagacgcggagatcaaggacggggagaggctccccctagccgtcaaggatatgggcagctgcgagatctatccacagactatacaacacaaccccaacggcaggtttgtggtggtctgcggagacggcgagtacatcatctatacagcgatggcgttgagaaacaagagctttgggtccgcccaggaatttgcttgggcgcatgacagcagtgaatatgccatacgcgaaagtaactcaatcgtaaagatcttcaagaactttaaagagaagaagtcattcaaacctgattttggagcggaatctatctacggtggctttctcctcggggtcaggtctgtcaacggtctagctttctacgactgggataatacagagctaattaggcgtattgagatccagccgaagcatatcttctggtctgattccggggagctggtatgcatagcaactgaggagtcatttttcatcctgaagtatctttctgagaaggtgttggccgcacaggaaactcacgaaggtgtcaccgaggatggcattgaggacgctttcgaagtgctgggggagatccaggagatagtcaaaaccggcttgtgggtgggagattgtttcatctatacctccagcgtgaaccgtctgaattactacgtaggaggcgaaatagtcaccatcgcccatcttgaccgaaccatgtaccttctgggttatattccaaaggacaatcggctgtatctcggggacaaggaacttaacattatctcatacagcctgctggtgagtgtactcgaataccagaccgcagtaatgaggagagatttctctatggcggataaggtgctgcccaccattcccaaggaacaacgtacgcgggtggcgcattttttggaaaagcagggatttaaacagcaggctctgaccgtatcaaccgatcccgaacacagattcgagctcgctcttcagctgggtgagcttaagatagcttaccaactcgctgtggaagctgaaagcgagcaaaagtggaagcagcttgcagagcttgcaataagcaaatgtcaattcggtctcgcccaggaatgcctccatcacgcccaggattatggcggtctgttgcttctggctaccgcctccggcaacgccaatatggtgaacaagctcgccgagggtgcggaacgggacggtaaaaataatgtggcattcatgtcgtactttctgcagggcaaagttgatgcatgcctcgaactgctaattcgaaccggcagactgccagaagccgcttttttggcaaggacctacctcccatcccaagtttcccgggttgtgaagctttggagggagaacctgagcaaagttaaccagaaggcggctgaatctctcgccgacccaaccgagtacgaaaatctgttcccaggtctcaaagaagcatttgtagttgaagaatgggtaaaggaaacccatgcagatctgtggcccgcaaagcagtatccactggtgaccccaaacgaggaacgcaacgtcatggaagaaggtaaggacttccagcctagcaggtccacagcacagcaagagctcgacgggaaaccagcctcacccacacccgtgattgttgcttcccacaccgcaaacaaagaggaaaagtccctgctggaactggaggtggatcttgacaatttggaactggaggatatcgataccaccgatataaacctggatgaagatattttagatgactag

SEQ ID NO: 149361 - DNA, 3175 bp, Artificial Sequence
  derived and/or modified sequence
ggaaacgacggccctgcgcgcagtttgcgcaggcgctccggccctggcctctgactatcgcgagaatcggctcccggaagttccacgtcagtcagtctgacggtcagtggatcggtgggtttatctcaaggcctgagtagccggtaacaaacgagggttcccgggattggaccgacgcagccatgcctctgcgacttgatatcaaaagaaagctaactgctagatctgatcgagttaagagtgtggatctgcatcctacagagccatggatgttggcaagtctttacaatggcagtgtgtgtgtttggaatcatgaaacacagacactggtgaagacatttgaagtatgtgatcttcctgttcgagctgcaaagtttgttgcaaggaagaattgggttgtgacaggagcggatgacatgcagattagagtgttcaattacaatactctggagagagttcatatgtttgaagcacactcagactacattcgctgtattgctgttcatccaacccagcctttcattctaactagcagtgatgacatgcttattaagctctgggactgggataaaaaatggtcttgctcacaagtgtttgaaggacacacccattatgttatgcagattgtgatcaaccccaaagataacaatcagtttgccagtgcctctttggacaggactatcaaggtgtggcagttgggctcttcgtcaccaaacttcactttggaaggacatgagaaaggcgtgaattgcattgattactacagtggtggggacaagccatacctcatttcaggtgcagatgaccgtcttgttaaaatatgggattatcagaataaaacatgtgtgcagacactggaaggacatgcccaaaatgtgtcttgtgccagctttcatcctgagttgccaatcattatcacaggttcagaagatggaacagtacgtatttggcattcaagcacctaccggcttgagagcacactgaattatggaatggagagggtatggtgcgtggccagtctaagagggtcaaacaatgtcgctttgggctatgatgaagggagcatcattgttaagcttggtcgggaggaacctgccatgtccatggatgccaatggaaagataatttgggccaagcattcagaagtccagcaggccaacctaaaagcaatgggagatgctgaaattaaagatggtgaaagattgccactggcagtaaaggatatgggcagttgtgaaatataccctcagactattcagcacaatcctaatgggcggtttgtggtggtgtgtggtgatggggagtatatcatctacacagcaatggcattgagaaacaagagctttggatctgctcaggagtttgcatgggcccacgattcttcagagtatgcaataagagagagcaacagcattgtaaagatatttaagaactttaaggaaaaaaaatcatttaaaccagattttggagcagaaagtatctacggcggcttcttattgggagtcagatctgtaaatggcttagccttctatgactgggacaatacagaactcatacgaagaattgaaattcagcccaaacatattttctggtctgactctggagagctagtctgtattgctactgaggaatcattttttatccttaagtatctgtcagaaaaagtcttggctgcacaggaaacacatgagggagttactgaagatggcattgaagatgcctttgaggttcttggtgagattcaggaaattgtgaaaacagggctttgggtaggcgattgcttcatttacacaagttctgtgaacagattaaattattatgttggaggagaaatagtcaccattgcccacttggacaggacgatgtatctcctaggctacattcctaaagacaacaggctttatctgggggataaagaattgaacatcattagctattccctgctggtttcagtcctggaataccagacagctgtcatgcggagggactttagcatggctgataaggtccttcctaccattccaaaagaacagaggaccagagttgcacactttttggaaaagcagggcttcaagcagcaagctcttacagtatccacagatcctgagcatcgttttgagcttgctcttcagcttggagagttaaaaattgcataccagttagcagtggaagcagagtcagaacagaagtggaaacaacttgctgaacttgccattagtaaatgtcagtttggcctagcccaggagtgcctgcatcatgcacaggattatgggggcctgctgcttttggccactgcctctggaaatgctaatatggtgaacaagctagcagagggtgcggagagagatggcaaaaataatgtggcattcatgagctactttttacagggcaaggttgatgcctgcctagagctcttaattagaactggacggctgccagaagctgccttcttggcccgaacttacttacccagtcaggtttcaagggtagtgaaactctggagagagaatctctcaaaagtcaatcagaaagcagcagaatcccttgctgacccaacagagtatgaaaacctgttccctggattaaaagaagcctttgttgttgaagaatgggtgaaggaaacacatgctgatctgtggccagccaaacaatacccacttgtcacgccaaatgaagagagaaatgtcatggaagagggaaaagactttcagccctcaagatctacagctcaacaggaacttgatgggaaacctgcttctcctactccggttattgtggcctcccacacagccaacaaagaagaaaagagtttactcgaactagaagtagatttggataatttggaattagaagatattgacacaacagatatcaatctggatgaagatattttggatgattgactgtaatgctttccatttacctgactaaacagatcattattatatataggtattgattgctaccctgaccacagtgctttggactatgagaaacttcttagatttttatatgtaaatgctgtggaccactgggagcacaatgcccacatcatcttaagaagagtttatgtgcagcatttaaatcactgtgttttccttgttaactaaaacagacatgggctttgatttttttcatactattagaccatatctcataaaaccttttgaattaa

SEQ ID NO: 149362 - DNA, 3034 bp, Artificial Sequence
  derived and/or modified sequence
atcgcgagaatcggctcccggaagttccacgtcagtcagtctgacgcctctgcgacttgatatcaaaagaaagctaactgctagatctgatcgagttaagagtgtggatctgcatcctacagagccatggatgttggcaagtctttacaatggcagtgtgtgtgtttggaatcatgaaacacagacactggtgaagacatttgaagtatgtgatcttcctgttcgagctgcaaagtttgttgcaaggaagaattgggttgtgacaggagcggatgacatgcagattagagtgttcaattacaatactctggagagagttcatatgtttgaagcacactcagactacattcgctgtattgctgttcatccaacccagcctttcattctaactagcagtgatgacatgcttattaagctctgggactgggataaaaaatggtcttgctcacaagtgtttgaaggacacacccattatgttatgcagattgtgatcaaccccaaagataacaatcagtttgccagtgcctctttggacaggactatcaaggtgtggcagttgggctcttcgtcaccaaacttcactttggaaggacatgagaaaggcgtgaattgcattgattactacagtggtggggacaagccatacctcatttcaggtgcagatgaccgtcttgttaaaatatgggattatcagaataaaacatgtgtgcagacactggaaggacatgcccaaaatgtgtcttgtgccagctttcatcctgagttgccaatcattatcacaggttcagaagatggaacagtacgtatttggcattcaagcacctaccggcttgagagcacactgaattatggaatggagagggtatggtgcgtggccagtctaagagggtcaaacaatgtcgctttgggctatgatgaagggagcatcattgttaagcttggtcgggaggaacctgccatgtccatggatgccaatggaaagataatttgggccaagcattcagaagtccagcaggccaacctaaaagcaatgggagatgctgaaattaaagatggtgaaagattgccactggcagtaaaggatatgggcagttgtgaaatataccctcagactattcagcacaatcctaatgggcggtttgtggtggtgtgtggtgatggggagtatatcatctacacagcaatggcattgagaaacaagagctttggatctgctcaggagtttgcatgggcccacgattcttcagagtatgcaataagagagagcaacagcattgtaaagatatttaagaactttaaggaaaaaaaatcatttaaaccagattttggagcagaaagtatctacggcggcttcttattgggagtcagatctgtaaatggcttagccttctatgactgggacaatacagaactcatacgaagaattgaaattcagcccaaacatattttctggtctgactctggagagctagtctgtattgctactgaggaatcattttttatccttaagtatctgtcagaaaaagtcttggctgcacaggaaacacatgagggagttactgaagatggcattgaagatgcctttgaggttcttggtgagattcaggaaattgtgaaaacagggctttgggtaggcgattgcttcatttacacaagttctgtgaacagattaaattattatgttggaggagaaatagtcaccattgcccacttggacaggacgatgtatctcctaggctacattcctaaagacaacaggctttatctgggggataaagaattgaacatcattagctattccctgctggtttcagtcctggaataccagacagctgtcatgcggagggactttagcatggctgataaggtccttcctaccattccaaaagaacagaggaccagagttgcacactttttggaaaagcagggcttcaagcagcaagctcttacagtatccacagatcctgagcatcgttttgagcttgctcttcagcttggagagttaaaaattgcataccagttagcagtggaagcagagtcagaacagaagtggaaacaacttgctgaacttgccattagtaaatgtcagtttggcctagcccaggagtgcctgcatcatgcacaggattatgggggcctgctgcttttggccactgcctctggaaatgctaatatggtgaacaagctagcagagggtgcggagagagatggcaaaaataatgtggcattcatgagctactttttacagggcaaggttgatgcctgcctagagctcttaattagaactggacggctgccagaagctgccttcttggcccgaacttacttacccagtcaggtttcaagggtagtgaaactctggagagagaatctctcaaaagtcaatcagaaagcagcagaatcccttgctgacccaacagagtatgaaaacctgttccctggattaaaagaagcctttgttgttgaagaatgggtgaaggaaacacatgctgatctgtggccagccaaacaatacccacttgtcacgccaaatgaagagagaaatgtcatggaagagggaaaagactttcagccctcaagatctacagctcaacaggaacttgatgggaaacctgcttctcctactccggttattgtggcctcccacacagccaacaaagaagaaaagagtttactcgaactagaagtagatttggataatttggaattagaagatattgacacaacagatatcaatctggatgaagatattttggatgattgactgtaatgctttccatttacctgactaaacagatcattattatatataggtattgattgctaccctgaccacagtgctttggactatgagaaacttcttagatttttatatgtaaatgctgtggaccactgggagcacaatgcccacatcatcttaagaagagtttatgtgcagcatttaaatcactgtgttttccttgttaactaaaacagacatgggctttgatttttttcatactattagaccatatctcataaaaccttttgaatt

SEQ ID NO: 149363 - DNA, 2721 bp, Artificial Sequence
  derived and/or modified sequence
atgcccctgagactggacatcaagagaaagctgaccgccagaagcgacagagtgaagagcgtggacctgcaccccaccgagccctggatgctggccagcctgtacaacggcagcgtgtgcgtgtggaaccacgagacccagaccctggtgaagaccttcgaggtgtgcgacctgcccgtgagagccgccaagttcgtggccagaaagaactgggtggtgaccggcgccgacgacatgcagatcagagtgttcaactacaacaccctggagagagtgcacatgttcgaggcccacagcgactacatcagatgcatcgccgtgcaccccacccagcccttcatcctgaccagcagcgacgacatgctgatcaagctgtgggactgggacaagaagtggagctgcagccaggtgttcgagggccacacccactacgtgatgcagatcgtgatcaaccccaaggacaacaaccagttcgccagcgccagcctggacagaaccatcaaggtgtggcagctgggcagcagcagccccaacttcaccctggagggccacgagaagggcgtgaactgcatcgactactacagcggcggcgacaagccctacctgatcagcggcgccgacgacagactggtgaagatctgggactaccagaacaagacctgcgtgcagaccctggagggccacgcccagaacgtgagctgcgccagcttccaccccgagctgcccatcatcatcaccggcagcgaggacggcaccgtgagaatctggcacagcagcacctacagactggagagcaccctgaactacggcatggagagagtgtggtgcgtggccagcctgagaggcagcaacaacgtggccctgggctacgacgagggcagcatcatcgtgaagctgggcagagaggagcccgccatgagcatggacgccaacggcaagatcatctgggccaagcacagcgaggtgcagcaggccaacctgaaggccatgggcgacgccgagatcaaggacggcgagagactgcccctggccgtgaaggacatgggcagctgcgagatctacccccagaccatccagcacaaccccaacggcagattcgtggtggtgtgcggcgacggcgagtacatcatctacaccgccatggccctgagaaacaagagcttcggcagcgcccaggagttcgcctgggcccacgacagcagcgagtacgccatcagagagagcaacagcatcgtgaagatcttcaagaacttcaaggagaagaagagcttcaagcccgacttcggcgccgagagcatctacggcggcttcctgctgggcgtgagaagcgtgaacggcctggccttctacgactgggacaacaccgagctgatcagaagaatcgagatccagcccaagcacatcttctggagcgacagcggcgagctggtgtgcatcgccaccgaggagagcttcttcatcctgaagtacctgagcgagaaggtgctggccgcccaggagacccacgagggcgtgaccgaggacggcatcgaggacgccttcgaggtgctgggcgagatccaggagatcgtgaagaccggcctgtgggtgggcgactgcttcatctacaccagcagcgtgaacagactgaactactacgtgggcggcgagatcgtgaccatcgcccacctggacagaaccatgtacctgctgggctacatccccaaggacaacagactgtacctgggcgacaaggagctgaacatcatcagctacagcctgctggtgagcgtgctggagtaccagaccgccgtgatgagaagagacttcagcatggccgacaaggtgctgcccaccatccccaaggagcagagaaccagagtggcccacttcctggagaagcagggcttcaagcagcaggccctgaccgtgagcaccgaccccgagcacagattcgagctggccctgcagctgggcgagctgaagatcgcctaccagctggccgtggaggccgagagcgagcagaagtggaagcagctggccgagctggccatcagcaagtgccagttcggcctggcccaggagtgcctgcaccacgcccaggactacggcggcctgctgctgctggccaccgccagcggcaacgccaacatggtgaacaagctggccgagggcgccgagagagacggcaagaacaacgtggccttcatgagctacttcctgcagggcaaggtggacgcctgcctggagctgctgatcagaaccggcagactgcccgaggccgccttcctggccagaacctacctgcccagccaggtgagcagagtggtgaagctgtggagagagaacctgagcaaggtgaaccagaaggccgccgagagcctggccgaccccaccgagtacgagaacctgttccccggcctgaaggaggccttcgtggtggaggagtgggtgaaggagacccacgccgacctgtggcccgccaagcagtaccccctggtgacccccaacgaggagagaaacgtgatggaggagggcaaggacttccagcccagcagaagcaccgcccagcaggagctggacggcaagcccgccagccccacccccgtgatcgtggccagccacaccgccaacaaggaggagaagagcctgctggagctggaggtggacctggacaacctggagctggaggacatcgacaccaccgacatcaacctggacgaggacatcctggacgactag

SEQ ID NO: 149364 - DNA, 2634 bp, Artificial Sequence
  derived and/or modified sequence
atgctggccagcctgtacaacggcagcgtgtgcgtgtggaaccacgagacccagaccctggtgaagaccttcgaggtgtgcgacctgcccgtgagagccgccaagttcgtggccagaaagaactgggtggtgaccggcgccgacgacatgcagatcagagtgttcaactacaacaccctggagagagtgcacatgttcgaggcccacagcgactacatcagatgcatcgccgtgcaccccacccagcccttcatcctgaccagcagcgacgacatgctgatcaagctgtgggactgggacaagaagtggagctgcagccaggtgttcgagggccacacccactacgtgatgcagatcgtgatcaaccccaaggacaacaaccagttcgccagcgccagcctggacagaaccatcaaggtgtggcagctgggcagcagcagccccaacttcaccctggagggccacgagaagggcgtgaactgcatcgactactacagcggcggcgacaagccctacctgatcagcggcgccgacgacagactggtgaagatctgggactaccagaacaagacctgcgtgcagaccctggagggccacgcccagaacgtgagctgcgccagcttccaccccgagctgcccatcatcatcaccggcagcgaggacggcaccgtgagaatctggcacagcagcacctacagactggagagcaccctgaactacggcatggagagagtgtggtgcgtggccagcctgagaggcagcaacaacgtggccctgggctacgacgagggcagcatcatcgtgaagctgggcagagaggagcccgccatgagcatggacgccaacggcaagatcatctgggccaagcacagcgaggtgcagcaggccaacctgaaggccatgggcgacgccgagatcaaggacggcgagagactgcccctggccgtgaaggacatgggcagctgcgagatctacccccagaccatccagcacaaccccaacggcagattcgtggtggtgtgcggcgacggcgagtacatcatctacaccgccatggccctgagaaacaagagcttcggcagcgcccaggagttcgcctgggcccacgacagcagcgagtacgccatcagagagagcaacagcatcgtgaagatcttcaagaacttcaaggagaagaagagcttcaagcccgacttcggcgccgagagcatctacggcggcttcctgctgggcgtgagaagcgtgaacggcctggccttctacgactgggacaacaccgagctgatcagaagaatcgagatccagcccaagcacatcttctggagcgacagcggcgagctggtgtgcatcgccaccgaggagagcttcttcatcctgaagtacctgagcgagaaggtgctggccgcccaggagacccacgagggcgtgaccgaggacggcatcgaggacgccttcgaggtgctgggcgagatccaggagatcgtgaagaccggcctgtgggtgggcgactgcttcatctacaccagcagcgtgaacagactgaactactacgtgggcggcgagatcgtgaccatcgcccacctggacagaaccatgtacctgctgggctacatccccaaggacaacagactgtacctgggcgacaaggagctgaacatcatcagctacagcctgctggtgagcgtgctggagtaccagaccgccgtgatgagaagagacttcagcatggccgacaaggtgctgcccaccatccccaaggagcagagaaccagagtggcccacttcctggagaagcagggcttcaagcagcaggccctgaccgtgagcaccgaccccgagcacagattcgagctggccctgcagctgggcgagctgaagatcgcctaccagctggccgtggaggccgagagcgagcagaagtggaagcagctggccgagctggccatcagcaagtgccagttcggcctggcccaggagtgcctgcaccacgcccaggactacggcggcctgctgctgctggccaccgccagcggcaacgccaacatggtgaacaagctggccgagggcgccgagagagacggcaagaacaacgtggccttcatgagctacttcctgcagggcaaggtggacgcctgcctggagctgctgatcagaaccggcagactgcccgaggccgccttcctggccagaacctacctgcccagccaggtgagcagagtggtgaagctgtggagagagaacctgagcaaggtgaaccagaaggccgccgagagcctggccgaccccaccgagtacgagaacctgttccccggcctgaaggaggccttcgtggtggaggagtgggtgaaggagacccacgccgacctgtggcccgccaagcagtaccccctggtgacccccaacgaggagagaaacgtgatggaggagggcaaggacttccagcccagcagaagcaccgcccagcaggagctggacggcaagcccgccagccccacccccgtgatcgtggccagccacaccgccaacaaggaggagaagagcctgctggagctggaggtggacctggacaacctggagctggaggacatcgacaccaccgacatcaacctggacgaggacatcctggacgactag

SEQ ID NO: 149365 - protein, 481 aa, Artificial Sequence
  derived and/or modified sequence
MRWLWPLAVSLAVILAVGLSRVSGGAPLHLGRHRAETQEQQSRSKRGTEDEEAKGVQQYVPEEWAEYPRPIHPAGLQPTKPLVATSPNPGKDGGTPDSGQELRGNLTGAPGQRLQIQNPLYPVTESSYSAYAIMLLALVVFAVGIVGNLSVMCIVWHSYYLKSAWNSILASLALWDFLVLFFCLPIVIFNEITKQRLLGDVSCRAVPFMEVSSLGVTTFSLCALGIDRFHVATSTLPKVRPIERCQSILAKLAVIWVGSMTLAVPELLLWQLAQEPAPTMGTLDSCIMKPSASLPESLYSLVMTYQNARMWWYFGCYFCLPILFTVTCQLVTWRVRGPPGRKSECRASKHEQCESQLNSTVVGLTVVYAFCTLPENVCNIVVAYLSTELTRQTLDLLGLINQFSTFFKGAITPVLLLCICRPLGQAFLDCCCCCCCEECGGASEASAANGSDNKLKTEVSSSIYFHKPRESPPLLPLGTPC

SEQ ID NO: 149366 - protein, 348 aa, Artificial Sequence
  derived and/or modified sequence
MLLALVVFAVGIVGNLSVMCIVWHSYYLKSAWNSILASLALWDFLVLFFCLPIVIFNEITKQRLLGDVSCRAVPFMEVSSLGVTTFSLCALGIDRFHVATSTLPKVRPIERCQSILAKLAVIWVGSMTLAVPELLLWQLAQEPAPTMGTLDSCIMKPSASLPESLYSLVMTYQNARMWWYFGCYFCLPILFTVTCQLVTWRVRGPPGRKSECRASKHEQCESQLNSTVVGLTVVYAFCTLPENVCNIVVAYLSTELTRQTLDLLGLINQFSTFFKGAITPVLLLCICRPLGQAFLDCCCCCCCEECGGASEASAANGSDNKLKTEVSSSIYFHKPRESPPLLPLGTPC

SEQ ID NO: 149367 - DNA, 1446 bp, Artificial Sequence
  derived and/or modified sequence
atgagatggctgtggcccctggccgtgagcctggccgtgatcctggccgtgggcctgagcagagtgagcggcggcgcccccctgcacctgggcagacacagagccgagacccaggagcagcagagcagaagcaagagaggcaccgaggacgaggaggccaagggcgtgcagcagtacgtgcccgaggagtgggccgagtaccccagacccatccaccccgccggcctgcagcccaccaagcccctggtggccaccagccccaaccccggcaaggacggcggcacccccgacagcggccaggagctgagaggcaacctgaccggcgcccccggccagagactgcagatccagaaccccctgtaccccgtgaccgagagcagctacagcgcctacgccatcatgctgctggccctggtggtgttcgccgtgggcatcgtgggcaacctgagcgtgatgtgcatcgtgtggcacagctactacctgaagagcgcctggaacagcatcctggccagcctggccctgtgggacttcctggtgctgttcttctgcctgcccatcgtgatcttcaacgagatcaccaagcagagactgctgggcgacgtgagctgcagagccgtgcccttcatggaggtgagcagcctgggcgtgaccaccttcagcctgtgcgccctgggcatcgacagattccacgtggccaccagcaccctgcccaaggtgagacccatcgagagatgccagagcatcctggccaagctggccgtgatctgggtgggcagcatgaccctggccgtgcccgagctgctgctgtggcagctggcccaggagcccgcccccaccatgggcaccctggacagctgcatcatgaagcccagcgccagcctgcccgagagcctgtacagcctggtgatgacctaccagaacgccagaatgtggtggtacttcggctgctacttctgcctgcccatcctgttcaccgtgacctgccagctggtgacctggagagtgagaggcccccccggcagaaagagcgagtgcagagccagcaagcacgagcagtgcgagagccagctgaacagcaccgtggtgggcctgaccgtggtgtacgccttctgcaccctgcccgagaacgtgtgcaacatcgtggtggcctacctgagcaccgagctgaccagacagaccctggacctgctgggcctgatcaaccagttcagcaccttcttcaagggcgccatcacccccgtgctgctgctgtgcatctgcagacccctgggccaggccttcctggactgctgctgctgctgctgctgcgaggagtgcggcggcgccagcgaggccagcgccgccaacggcagcgacaacaagctgaagaccgaggtgagcagcagcatctacttccacaagcccagagagagcccccccctgctgcccctgggcaccccctgctag

SEQ ID NO: 149368 - DNA, 1047 bp, Artificial Sequence
  derived and/or modified sequence
atgctgctggccctggtggtgttcgccgtgggcatcgtgggcaacctgagcgtgatgtgcatcgtgtggcacagctactacctgaagagcgcctggaacagcatcctggccagcctggccctgtgggacttcctggtgctgttcttctgcctgcccatcgtgatcttcaacgagatcaccaagcagagactgctgggcgacgtgagctgcagagccgtgcccttcatggaggtgagcagcctgggcgtgaccaccttcagcctgtgcgccctgggcatcgacagattccacgtggccaccagcaccctgcccaaggtgagacccatcgagagatgccagagcatcctggccaagctggccgtgatctgggtgggcagcatgaccctggccgtgcccgagctgctgctgtggcagctggcccaggagcccgcccccaccatgggcaccctggacagctgcatcatgaagcccagcgccagcctgcccgagagcctgtacagcctggtgatgacctaccagaacgccagaatgtggtggtacttcggctgctacttctgcctgcccatcctgttcaccgtgacctgccagctggtgacctggagagtgagaggcccccccggcagaaagagcgagtgcagagccagcaagcacgagcagtgcgagagccagctgaacagcaccgtggtgggcctgaccgtggtgtacgccttctgcaccctgcccgagaacgtgtgcaacatcgtggtggcctacctgagcaccgagctgaccagacagaccctggacctgctgggcctgatcaaccagttcagcaccttcttcaagggcgccatcacccccgtgctgctgctgtgcatctgcagacccctgggccaggccttcctggactgctgctgctgctgctgctgcgaggagtgcggcggcgccagcgaggccagcgccgccaacggcagcgacaacaagctgaagaccgaggtgagcagcagcatctacttccacaagcccagagagagcccccccctgctgcccctgggcaccccctgctag

SEQ ID NO: 149369 - DNA, 2508 bp, Artificial Sequence
  derived and/or modified sequence
gactggaggcggatccagccggccagctgcctctctggagcccagctcttgggccccctgcactcacctgctcttcctgggctggctgtctcctgctcatccagccatgcggtggctgtggcccctggctgtctctcttgctgtgattttggctgtggggctaagcagggtctctgggggtgcccccctgcacctgggcaggcacagagccgagacccaggagcagcagagccgatccaagaggggcaccgaggatgaggaggccaagggcgtgcagcagtatgtgcctgaggagtgggcggagtacccccggcccattcaccctgctggcctgcagccaaccaagcccttggtggccaccagccctaaccccggcaaggatgggggcaccccagacagtgggcaggaactgaggggcaatctgacaggagcaccagggcagaggctacagatccagaaccccctgtatccggtgaccgagagctcctacagtgcctatgccatcatgcttctggcgctggtggtgtttgcggtgggcattgtgggcaacctgtcggtcatgtgcatcgtgtggcacagctactacctgaagagtgcctggaactccatccttgccagcctggccctctgggattttctggtcctctttttctgcctccctattgtcatcttcaacgagatcaccaagcagaggctactgggtgacgtttcttgtcgtgccgtgcccttcatggaggtctcctctctgggagtcacgactttcagcctctgtgccctgggcattgaccgcttccacgtggccaccagcaccctgcccaaggtgaggcccatcgagcggtgccaatccatcctggccaagttggctgtcatctgggtgggctccatgacgctggctgtgcctgagctcctgctgtggcagctggcacaggagcctgcccccaccatgggcaccctggactcatgcatcatgaaaccctcagccagcctgcccgagtccctgtattcactggtgatgacctaccagaacgcccgcatgtggtggtactttggctgctacttctgcctgcccatcctcttcacagtcacctgccagctggtgacatggcgggtgcgaggccctccagggaggaagtcagagtgcagggccagcaagcacgagcagtgtgagagccagctcaacagcaccgtggtgggcctgaccgtggtctacgccttctgcaccctcccagagaacgtctgcaacatcgtggtggcctacctctccaccgagctgacccgccagaccctggacctcctgggcctcatcaaccagttctccaccttcttcaagggcgccatcaccccagtgctgctcctttgcatctgcaggccgctgggccaggccttcctggactgctgctgctgctgctgctgtgaggagtgcggcggggcttcggaggcctctgctgccaatgggtcggacaacaagctcaagaccgaggtgtcctcttccatctacttccacaagcccagggagtcacccccactcctgcccctgggcacaccttgctgaggccccagtaggggtggggagggagggagaggccgccacccccgccggtgtctgctgttctttccccataggtcttgctttgttgcctgtcttgctgtctagggatggacttggttcctcttgtcaaggtttgggaatgtcaaagccccctccccacacagggcctttcctgtcccttgtggggccttccaaccctgtcctttccactggtgggcggtgatgcttctaggtccttagaactgcccagaaactctgagtcccagcagctgggagccagaactttgcctgccctcccttggttccagtctctcttctctctctctgccttggaacctgaccatactttagttgtgcccttcccaggcatcatcctcctaccaccaacctggggccccatcttggaatgggggctccttggggccagcccagtgtggctcaccacactcttctttttttttttttttttttttgagatggagtcttgctctgttgcccaggctggagtacatttgcctgatgtcagctccctgcaacctccgcctcctgggttcaagcgattctcctgcctcagcctcctgagtagctgggattacaggtgtgcaccaacacacccggctaatttttgtatttgtagaagaggcggggtttcaccatgttggccaggctggtgttgaactcctgacctcaagtgatctgcctgccttggcctcccaaagtgctgggattacaggtgtgagctgccacgcccagccccagtacactcttctctggaccagatctgtcccagtcctggatgcctcctcctactggtgccttcttttcttccagaggatttctctctccttcctcctcctttctttgggatccctgggttgccctgtcccaacctccttgttaggtgctttcccataggaggcccttcttgagaaacaataaactaggtagaactaccccta

SEQ ID NO: 149370 - DNA, 1886 bp, Artificial Sequence
  derived and/or modified sequence
gatgccagacgcctgactggaggcggatccagccggccagctgcctctctggagcccagctcttgggccccctgcactcacctgctcttcctgggctggctgtctcctgctcatccagccatgcggtggctgtggcccctggctgtctctcttgctgtgattttggctgtggggcacagagccgagacccaggatgaggaggccaagggcgtgcagcagtatgtgcctgaggagtgggcggagtacccccggcccattcaccctgctggcctgcagccaaccaagcccttggtggccaccagccctaaccccggcaaggatgggggcaccccagacagtgggcaggaactgaggggcaatctgacaggagcaccagggcagaggctacagatccagaaccccctgtatccggtgaccgagagctcctacagtgcctatgccatcatgcttctggcgctggtggtgtttgcggtgggcattgtgggcaacctgtcggtcatgtgcatcgtgtggcacagctactacctgaagagtgcctggaactccatccttgccagcctggccctctgggattttctggtcctctttttctgcctccctattgtcatcttcaacgagatcaccaagcagaggctactgggtgacgtttcttgtcgtgccgtgcccttcatggaggtctcctctctgggagtcacgactttcagcctctgtgccctgggcattgaccgcttccacgtggccaccagcaccctgcccaaggtgaggcccatcgagcggtgccaatccatcctggccaagttggctgtcatctgggtgggctccatgacgctggctgtgcctgagctcctgctgtggcagctggcacaggagcctgcccccaccatgggcaccctggactcatgcatcatgaaaccctcagccagcctgcccgagtccctgtattcactggtgatgacctaccagaacgcccgcatgtggtggtactttggctgctacttctgcctgcccatcctcttcacagtcacctgccagctggtgacatggcgggtgcgaggccctccagggaggaagtcagagtgcagggccagcaagcacgagcagtgtgagagccagctcaacagcaccgtggtgggcctgaccgtggtctacgccttctgcaccctcccagagaacgtctgcaacatcgtggtggcctacctctccaccgagctgacccgccagaccctggacctcctgggcctcatcaaccagttctccaccttcttcaagggcgccatcaccccagtgctgctcctttgcatctgcaggccgctgggccaggccttcctggactgctgctgctgctgctgctgtgaggagtgcggcggggcttcggaggcctctgctgccaatgggtcggacaacaagctcaagaccgaggtgtcctcttccatctacttccacaagcccagggagtcacccccactcctgcccctgggcacaccttgctgaggccccagtaggggtggggagggagggagaggccgccacccccgccggtgtctgctgttctttccccataggtcttgctttgttgcctgtcttgctgtctagggatggacttggttcctcttgtcaaggtttgggaatgtcaaagccccctccccacacagggcctttcctgtcccttgtggggccttccaaccctgtcctttccactggtgggcggtgatgcttctaggtccttagaactgcccagaaactctgagtcccagcagctgggagccagaactttgcctgccctcccttggttccagtctctcttctctctctctgccttggaacctgaccatactttagttgtgcccttcccaggcatcatcctcctaccaccaacctggggcccc

SEQ ID NO: 149371 - DNA, 1446 bp, Artificial Sequence
  derived and/or modified sequence
atgcgctggctgtggccactcgccgtttccctggccgtcattctagccgtcggcctctcaagagtcagcggcggagctccactacatctgggccgccacagggctgaaacccaggaacaacagagccggtctaagagaggcacagaagatgaggaggccaaaggcgtgcagcagtacgttccagaagagtgggccgagtatccgagaccgattcaccccgccgggttgcagccaaccaaacctctggttgcaacctccccaaaccctggtaaggatggtggtacccctgactctgggcaagaattacggggcaacctgaccggtgcccccggccagaggttgcagattcagaacccattgtatcccgtgaccgaatcatcgtatagcgcatacgccattatgcttttagcgctggtcgtcttcgccgtgggcatagtcggtaacctgagcgtcatgtgtattgtgtggcacagctactacttgaagagcgcttggaatagtattctggcttccttggccctttgggattttctcgtcctgttcttctgcctgcccattgtgatctttaacgagatcaccaaacagcgcctcttgggggacgtaagctgtcgggccgtgccgttcatggaagtgtcaagccttggcgtgaccaccttcagcctgtgcgcgcttggaatcgatcgattccatgtcgccacttctaccctgcccaaagtgagacctatcgaaagatgccaatcgatcctggctaagctggctgtgatttgggtaggctcaatgaccttagcggtgccggagctgctcctttggcagcttgcccaggaacctgccccgactatggggacactggatagctgtatcatgaagccttccgcatctctgcccgaaagtttatattcactggttatgacctatcaaaatgcccgcatgtggtggtactttggatgctacttttgcctgccaatcttgtttactgtaacctgccagctggtaacgtggcgagtgcggggccccccaggcagaaaatcagaatgcagagcaagtaaacatgagcagtgtgaaagccagctgaattctaccgtcgttggactaacagtcgtatatgcgttctgtactctccccgagaacgtctgcaacatcgttgtggcctatctgtcaaccgaactgacgaggcagactttggatttgctgggtctgattaatcagttttcgaccttctttaagggggcaattacacccgtcctgcttctgtgtatctgtcggccccttggacaggcttttttggactgttgttgctgctgttgctgcgaagaatgtggcggcgcttcagaggcttccgctgccaacggctctgacaacaagctgaaaaccgaagtcagctcttctatctattttcacaagcccagagagagtcctcccctgctgcccctgggcaccccttgctag

SEQ ID NO: 149372 - DNA, 1047 bp, Artificial Sequence
  derived and/or modified sequence
atgctactcgccctggttgtgttcgctgttggcatcgtgggcaatctgtctgtcatgtgcatcgtttggcactcatattatttgaagtctgcgtggaattccattctagcctcacttgccctctgggacttcctggtgctgtttttttgcttaccgattgtgatttttaatgagatcactaagcaaaggttgctcggagacgtgtcctgcagagccgttccattcatggaggtcagcagcctgggcgtcaccacattttctctgtgtgccttgggtatcgataggttccacgtggccacgtccaccctgccgaaggtaagacccattgaacgttgccagtctatcctggcaaaactcgccgtgatctgggtgggtagtatgaccctggccgtcccagagttattattgtggcaactcgcccaggagcccgccccaaccatgggcaccctggacagttgcattatgaagccgtcagcatccctccctgagtcactctactccctggtgatgacttaccagaatgctagaatgtggtggtattttgggtgctacttttgcttgcccatcttgtttacagtcacctgtcagttagttacctggcgggtgagaggccctcctggacggaagagcgagtgtagagcctcaaaacatgagcagtgcgagtcacagcttaattccaccgtcgtgggactgaccgtggtttacgcattttgcacactccccgagaacgtttgcaacattgttgtggcatatttatcgaccgaactcacccgacagaccctcgatttgctgggactaatcaatcagttttccactttttttaagggtgctattaccccagtgcttttgttgtgcatctgcagacccttgggccaggcttttctggactgctgttgctgttgctgttgcgaggaatgcgggggtgccagtgaagccagcgcagccaatggatccgacaacaagctcaagactgaagtttcctccagcatttactttcacaagcctagagagtcgccaccacttctgccactgggaaccccttgttag

SEQ ID NO: 149373 - DNA, 1446 bp, Artificial Sequence
  derived and/or modified sequence
atgcgctggctgtggcccctggccgtgtccctggccgtcatcctggccgtgggcctgagccgggtgtctggaggagcccccctgcacctgggccgccacagagctgagacccaggagcagcagagccgcagcaagaggggcacagaagatgaggaggccaagggcgtgcagcagtatgtgcctgaggagtgggccgagtacccccggcccatccaccctgctggcctgcagcccaccaagcccctggtggccaccagccccaaccctgggaaggatggcggcaccccagacagcggccaggagctgcggggcaacctgactggagcccctggccagaggctgcagatccagaaccccctgtaccctgtgacagagagcagctacagcgcctatgccatcatgctgctggccctggtggtgtttgctgtgggcatcgtgggcaacctgtctgtgatgtgcatcgtgtggcacagctactacctgaagagcgcctggaacagcatcctggccagcctggccctgtgggacttcctggtgctcttcttctgcctgcccatcgtcatcttcaatgagatcaccaagcagaggctgctgggagatgtgtcctgcagagctgtgcccttcatggaggtgagcagcctgggcgtgaccaccttcagcctgtgtgccctgggcatcgaccgcttccacgtggccaccagcaccctgcccaaggtgcggcccatcgagcgctgccagagcatcctggccaagctggccgtcatctgggtgggctccatgaccctggccgtgcctgagctgctgctgtggcagctggcccaggagcccgcccccaccatgggcaccctggacagctgcatcatgaagcccagcgccagcctgcctgagagcctgtacagcctggtgatgacctaccagaatgccaggatgtggtggtacttcggctgctacttctgcctgcccatcctcttcaccgtgacctgccagctggtgacctggagggtgcggggccccccaggcaggaagtctgagtgccgggccagcaagcatgagcagtgtgagagccagctgaacagcacagtggtgggcctgactgtggtgtatgccttctgcaccctgcctgaaaatgtgtgcaacatcgtggtggcctacctgagcacagagctgacccggcagaccctggacctgctgggcctcatcaaccagttcagcaccttcttcaagggggccatcacccctgtgctgctgctgtgcatctgccggcccctgggccaggccttcctggactgctgctgctgctgctgctgtgaggagtgtggcggggccagcgaggccagcgctgccaatggaagtgacaacaagctgaagacagaggtgagcagcagcatctacttccacaagccccgggagagcccccccctgctgcccctgggcaccccctgctag

SEQ ID NO: 149374 - DNA, 1047 bp, Artificial Sequence
  derived and/or modified sequence
atgctgctggccctggtggtgtttgctgtgggcatcgtgggcaacctgtctgtgatgtgcatcgtgtggcacagctactacctgaagagcgcctggaacagcatcctggccagcctggccctgtgggacttcctggtgctcttcttctgcctgcccatcgtcatcttcaatgagatcaccaagcagaggctgctgggagatgtgtcctgcagagctgtgcccttcatggaggtgagcagcctgggcgtgaccaccttcagcctgtgtgccctgggcatcgaccgcttccacgtggccaccagcaccctgcccaaggtgcggcccatcgagcgctgccagagcatcctggccaagctggccgtcatctgggtgggctccatgaccctggccgtgcctgagctgctgctgtggcagctggcccaggagcccgcccccaccatgggcaccctggacagctgcatcatgaagcccagcgccagcctgcctgagagcctgtacagcctggtgatgacctaccagaatgccaggatgtggtggtacttcggctgctacttctgcctgcccatcctcttcaccgtgacctgccagctggtgacctggagggtgcggggccccccaggcaggaagtcagaatgtcgggccagcaagcatgagcagtgtgagagccagctgaacagcacagtggtgggcctgactgtggtgtatgccttctgcaccctgcctgaaaatgtgtgcaacatcgtggtggcctacctgagcacagagctgacccggcagaccctggacctgctgggcctcatcaaccagttcagcaccttcttcaagggggccatcacccctgtgctgctgctgtgcatctgccggcccctgggccaggccttcctggactgctgctgctgctgctgctgtgaagaatgtggcggggccagcgaggccagcgctgccaacggcagtgacaacaagctgaagacagaggtgagcagcagcatctacttccacaagccccgggagagcccccccctgctgcccctgggcaccccctgctag

SEQ ID NO: 149375 - DNA, 1446 bp, Artificial Sequence
  derived and/or modified sequence
atgcggtggctgtggcccctggccgtgagcctggccgtgatcctggccgtcggtctttccagagtctcgggcggtgcccccctccacctggggaggcatcgagcggaaacacaggagcagcagagcaggtcaaagagaggcacagaggatgaggaagcaaagggtgtgcagcagtacgtgccagaggaatgggccgaataccccaggcccatccaccctgcggggctgcaacccactaagcctctcgtggctacaagccccaatcctggaaaagacggtgggacacctgattctggacaagagctacgggggaatctaaccggcgctcctggccagcggctgcagatccagaacccgctctatccagtgactgaatcttcttattcagcatatgccataatgcttcttgctcttgtggtcttcgctgttggcattgtgggaaatctgagcgtgatgtgtattgtgtggcactcctattatcttaaatcggcctggaatagcatcctagcttctctggccctgtgggatttcctcgtcctctttttctgtttgccaattgtgatctttaatgagataacaaaacaaagactgttgggggacgtgagttgccgcgccgtcccatttatggaagtatcttcccttggtgtcacaaccttctcactgtgcgcccttggcatcgatcgattccacgtggccacctccactctccctaaggtcaggcccatcgaacgctgtcaatccattcttgcaaaactggccgtcatctgggtgggcagtatgaccttggccgtgcccgagctgctcctctggcagctggcccaagaaccagcaccaacgatgggcacattagactcgtgcattatgaaaccctcagcgtcgctgcccgagagcctctattctctcgtcatgacctaccagaatgctcggatgtggtggtacttcggatgttatttttgtctgcccattttgtttacggtcacatgccagctcgtgacatggcgagtccgtggcccacccggaagaaaatcggagtgtcgagccagtaagcacgagcagtgtgagtctcagcttaattccacggtggtaggattaacagtggtgtatgctttctgtaccctgccagagaatgtctgcaacatcgtcgtggcatatctgagcaccgaactgaccaggcagactctggacctgcttgggcttataaatcaattcagtactttcttcaagggcgccatcacccccgttctgttgctatgtatttgcaggcccttggggcaggcattcctggactgctgttgctgttgctgctgtgaagagtgcggtggcgcaagtgaggctagcgccgccaatggctcagacaataaattaaaaacggaggtgtcctcatcaatctattttcacaaacctcgggagagcccccctcttcttccactcggcaccccttgttag

SEQ ID NO: 149376 - DNA, 1047 bp, Artificial Sequence
  derived and/or modified sequence
atgctgctggccctggtggtgttcgccgtgggcatcgtgggcaacctctctgtgatgtgcatagtgtggcactcctactatctgaagtctgcctggaattctatattagcctctctggcgctgtgggatttccttgtcctgtttttctgcctgccaatcgtgatattcaatgaaatcacaaaacagcgcctgttaggggacgtaagctgcagggcagttcccttcatggaagtgtcctccttaggagttaccaccttttcattatgcgccttgggtattgaccggtttcacgtggcaacatcaaccctgcctaaggtgcggcccatagagcgatgccagagcatcctggcaaagctggcggtgatctgggtaggcagtatgaccctggcagtccctgagctacttctgtggcagttggctcaagagcccgcacctaccatgggaacactggacagctgcataatgaagccgagcgcaagcttacctgagtccctgtatagtctggtgatgacgtaccaaaatgcgagaatgtggtggtattttggctgctacttctgcctccctattttattcaccgtgacgtgtcaactggtgacctggagagtgcgtggcccacctggtcgaaaaagcgagtgccgggctagtaagcacgagcagtgtgagagccaactgaattctaccgtcgtagggctgaccgtagtttatgccttttgtaccttgccagaaaacgtttgcaatatagtggtggcctatctgtccacggagttgaccaggcaaactctggatctcttaggcctaattaaccagttctccacatttttcaagggagcaattactcctgtcctgcttctctgtatatgtaggccgttagggcaggccttccttgactgctgctgctgttgctgctgcgaagagtgcggcggcgcgagtgaggcaagcgcagctaatggctccgacaataaactaaaaaccgaagtctccagcagtatctattttcacaagccccgcgaatctcctccgctgctgcctcttggtacaccttgctag

SEQ ID NO: 149377 - DNA, 1446 bp, Artificial Sequence
  derived and/or modified sequence
atgaggtggctgtggcccctcgccgtgtccctggcagtgattcttgccgtgggactaagcagggtcagcgggggtgcaccactccacctcgggcgacacagggccgagactcaggaacagcagagtcggtctaaacggggaacggaggatgaagaggccaaaggcgtgcagcaatatgtgccggaagaatgggccgagtacccaaggcctatccacccagccggtctgcagcctacaaaacccctagtggcaacctccccgaatccaggcaaagacggtggcacacccgattctggccaggagttaagaggtaatctgacaggggctcccggacagcggctgcaaatccagaacccgctataccctgtaaccgaatcgtcttactcagcatatgcaatcatgctgctggccctcgtagtttttgctgtggggatcgtgggcaacctgagcgtaatgtgcattgtctggcatagctattacctgaagtccgcctggaattctattctggctagcctcgccctgtgggatttcctcgtgctgtttttctgcttgccgatagtgatttttaacgagataactaaacaacgcctgctgggagacgtcagttgcagggcagttccgtttatggaggtgtcaagccttggggtaactacctttagcctatgcgccttaggcatcgatcgttttcacgtggccacgtctacactgccgaaagtaagaccgatcgagagatgccaaagcattcttgcaaagctggcagtaatttgggtcggctctatgaccctggccgttcctgaactgttgctctggcagttagcccaggaacccgctcccaccatgggaactttggacagttgcatcatgaagccctcagcctccctcccagaatctctctactcactggtcatgacataccagaatgcaaggatgtggtggtatttcggctgctatttctgtctccctatcttgtttacggtgacttgccagcttgtcacgtggcgggtcagaggacctcctgggcgtaagtccgaatgccgggctagtaaacacgagcagtgcgaaagtcagctaaattcgaccgtcgttggcctcaccgtggtatacgccttctgtacccttcctgagaacgtgtgcaacatcgtggtcgcttacctttccactgaacttactagacaaacccttgaccttctcggccttattaaccagttttctaccttcttcaagggagccatcacccccgttctgttgctctgtatatgtagaccactgggccaggcctttcttgactgttgctgctgttgctgctgtgaggagtgcggcggagccagcgaggcctcagcagcgaatggatcagacaacaagttgaagaccgaggtgagtagctcaatctacttccacaagccccgtgaatcgccccctctgctacccctcggaactccatgttag

SEQ ID NO: 149378 - DNA, 1047 bp, Artificial Sequence
  derived and/or modified sequence
atgctgctggctctggtcgtctttgcagtgggcatcgtggggaacttaagcgtaatgtgcattgtgtggcacagctactacctcaagtctgcttggaacagcattcttgcctccttagcattgtgggacttcctcgtgctgtttttctgcctcccgatcgtgatcttcaacgagatcacaaagcagcggctcttgggcgatgtttcttgcagggcggttcccttcatggaggtctcgagcctgggcgtgaccacattcagcctgtgtgcacttggaatagatcgtttccatgtggccacatcaaccttacctaaagtccgccctattgagaggtgtcagagtatcctggccaaactagctgtgatttgggtgggctccatgacactggccgtgcccgagctgttattgtggcagttggcccaagaacccgcaccaacgatgggcacactcgatagctgcatcatgaaaccctctgcctccctgccggaaagcctttactcactggtgatgacgtatcaaaatgcacgcatgtggtggtactttggatgttacttttgcctaccgatcctctttactgtgacatgtcaactggtgacatggcgtgttcgaggtcccccaggaagaaagagcgagtgccgcgcaagtaagcatgaacagtgcgagagtcagctgaacagcacggtcgtgggcctcaccgttgtgtatgccttttgcacactgccagaaaatgtgtgcaatatagtagtggcatacctgtcaaccgagttgacccggcaaacattggatcttctcggactgattaatcagttttctacattctttaagggagcaattacccctgtgctgttactctgtatttgtagacctctgggccaagcttttctcgactgttgttgttgctgctgctgcgaggagtgcggaggcgcttctgaagccagcgccgctaacgggtcggataacaaactcaaaactgaagtgtccagttctatttatttccacaaacccagagaatcacctcctctgctaccactcggcaccccctgctag

SEQ ID NO: 149379 - protein, 531 aa, Artificial Sequence
  derived and/or modified sequence
MKPTSGPEEARRPASDIRVFASNCSMHGLGHVFGPGSLSLRRGMWAAAVVLSVATFLYQVAERVRYYREFHHQTALDERESHRLIFPAVTLCNINPLRRSRLTPNDLHWAGSALLGLDPAEHAAFLRALGRPPAPPGFMPSPTFDMAQLYARAGHSLDDMLLDCRFRGQPCGPENFTTIFTRMGKCYTFNSGADGAELLTTTRGGMGNGLDIMLDVQQEEYLPVWRDNEETPFEVGIRVQIHSQEEPPIIDQLGLGVSPGYQTFVSCQQQQLSFLPPPWGDCSSASLNPNYEPEPSDPLGSPSPSPSPPYTLMGCRLACETRYVARKCGCRMVYMPGDVPVCSPQQYKNCAHPAIDAMLRKDSCACPNPCASTRYAKELSMVRIPSRAAARFLARKLNRSEAYIAENVLALDIFFEALNYETVEQKKAYEMSELLGDIGGQMGLFIGASLLTILEILDYLCEVFRDKVLGYFWNRQHSQRHSSTNLLQEGLGSHRTQVPHLSLGPRPPTPPCAVTKTLSASHRTCYLVTQL

SEQ ID NO: 149380 - DNA, 1596 bp, Artificial Sequence
  derived and/or modified sequence
atgaaaccgacttctgggcctgaggaggctcggaggcctgcgtcagacattcgagtctttgcttcaaactgtagcatgcatggtctgggtcatgtgttcgggccggggtcactcagtcttcgcaggggcatgtgggcagccgccgttgtgttgtccgttgccacattcctttaccaggtcgctgagcgggtgcgatactacagagaattccaccatcagaccgctctagacgagagggagagccaccggctgatctttcctgctgttacactgtgcaacataaacccactccggcgctccagactgacccccaatgacctccattgggctggcagtgcactgctcggcttggaccccgcagaacatgccgcattcttgcgcgcactgggccgccccccagcgccgccaggcttcatgccatcccctacctttgacatggcccagctttacgcccgggcaggccatagcctggacgacatgctgctcgattgcagattccgtgggcaaccttgcgggccggagaacttcactacaattttcactaggatgggaaagtgttataccttcaactccggagccgacggcgccgagctgctgacgaccaccagagggggcatgggaaatggtttggacattatgctggacgttcagcaggaagagtatctccctgtgtggcgcgacaatgaagaaaccccattcgaggtgggcattagagtccagatccatagtcaggaggagcccccgataattgatcagctgggcctgggggtgtctcctggctaccaaacatttgtatcttgtcagcagcagcagcttagttttctcccgcccccttggggagactgttctagtgcttctcttaacccgaattatgagcctgaacctagcgaccctcttggctctccttctccaagtccgagccccccctacaccctgatgggctgtcgcctggcgtgtgagacacggtacgttgctcggaagtgtggctgcaggatggtatacatgccaggtgacgtcccagtgtgttcccctcagcagtacaagaactgcgcccatccagccattgacgccatgctccggaaagacagctgtgcctgccctaatccatgtgcttccacccgctatgcgaaagagttgagcatggtgcgcatcccttctagagcagccgcaagatttcttgctcgaaagctcaaccgctctgaggcatacattgcagagaatgtgcttgccctcgatattttcttcgaggccttaaattatgagactgtggagcaaaaaaaggcctatgagatgtcggagctgctaggagatattggtgggcagatgggcttgttcatcggcgcctcccttctcaccatcctggagatcctcgattacctgtgcgaggtctttagggacaaggtgctgggatatttttggaacagacagcattcacaacggcattcttcaaccaacctcctgcaagaaggcctagggtctcacagaactcaggtcccccacctaagccttgggccccgtcccccaactccaccttgcgccgtgaccaaaacactatctgccagccatagaacatgttacctcgtcactcagctctag

SEQ ID NO: 149381 - DNA, 1596 bp, Artificial Sequence
  derived and/or modified sequence
atgaagcccaccagcggccctgaggaggcccggcggcctgccagtgacatccgggtgtttgccagcaactgcagcatgcacggcctgggccacgtgtttggacctggcagcctgagcctgcggcggggcatgtgggccgctgctgtggtgctgtctgtggccaccttcctgtaccaggtggccgagcgggtgcgctactaccgggagttccaccaccagacagccctggatgagcgggagagccacaggctcatcttccctgctgtgaccctgtgcaacatcaaccccctgcggcgcagccggctgaccccaaatgacctgcactgggccggcagcgccctgctgggcctggaccctgctgagcacgccgccttcctgcgggccctgggccggcccccagcccctcctggcttcatgcccagccccacctttgacatggcccagctgtatgcccgggccggccacagcctggatgacatgctgctggactgccgcttccggggccagccctgtggccctgagaacttcaccaccatcttcaccaggatgggcaagtgctacaccttcaacagcggggctgatggagctgagctgctgaccaccacccggggcggcatgggaaatggcctggacatcatgctggatgtgcagcaggaggagtacctgcctgtgtggagggacaatgaggagaccccatttgaggtgggcatccgggtgcagatccacagccaggaggagccccccatcatcgaccagctgggcctgggcgtgtccccaggctaccagacctttgtgtcctgccagcagcagcagctgtccttcctgcccccaccctggggagactgcagcagcgccagcctgaaccccaactatgagcctgagcccagcgaccccctgggcagccccagccccagccccagccccccctacaccctgatgggctgccgcctggcctgtgagaccaggtatgtggccaggaaatgtggctgcaggatggtgtacatgcctggagatgtgcctgtgtgcagcccccagcagtacaagaactgtgcccacccagccattgatgccatgctgaggaaggacagctgtgcctgccccaacccctgtgccagcaccaggtatgccaaggagctgtccatggtgcgcatccccagcagagctgctgcccgcttcctggccaggaagctgaacagaagtgaggcctacatcgccgagaatgtgctggccctggacatcttctttgaggccctgaactatgagaccgtggagcagaagaaggcctatgagatgtctgagctgctgggggacatcggcggccagatgggcctcttcatcggggccagcctgctgaccatcctggagatcctggactacctgtgtgaggtgttccgggacaaggtgctgggctacttctggaaccggcagcacagccagaggcacagcagcaccaacctgctgcaggagggcctgggcagccacaggacccaggtgccccacctgagcctgggccccaggcctcccaccccaccctgtgctgtgaccaagaccctgagcgccagccacaggacctgctacctggtgacccagctgtag

SEQ ID NO: 149382 - DNA, 1895 bp, Artificial Sequence
  derived and/or modified sequence
acctgaccggccagatcacctcctccaatcctgccaggctagtgcctccctgccttccaaccttggctgtctcccaccctctcttctcctctccttgcctggcctcctgaatcctatcttagcctccttagccccctgactgactctctctcgcttcttccaagcctctgtagctggttccgctcctgggttctggccatgaagcccacctcaggcccagaggaggcccggcggccagcctcggacatccgcgtgttcgccagcaactgctcgatgcacgggctgggccacgtcttcgggccaggcagcctgagcctgcgccgggggatgtgggcagcggccgtggtcctgtcagtggccaccttcctctaccaggtggctgagagggtgcgctactacagggagttccaccaccagactgccctggatgagcgagaaagccaccggctcatcttcccggctgtcaccctgtgcaacatcaacccactgcgccgctcgcgcctaacgcccaacgacctgcactgggctgggtctgcgctgctgggcctggatcccgcagagcacgccgccttcctgcgcgccctgggccggccccctgcaccgcccggcttcatgcccagtcccacctttgacatggcgcaactctatgcccgtgctgggcactccctggatgacatgctgctggactgtcgcttccgtggccaaccttgtgggcctgagaacttcaccacgatcttcacccggatgggaaagtgctacacatttaactctggcgctgatggggcagagctgctcaccactactaggggtggcatgggcaatgggctggacatcatgctggacgtgcagcaggaggaatatctacctgtgtggagggacaatgaggagaccccgtttgaggtggggatccgagtgcagatccacagccaggaggagccgcccatcatcgatcagctgggcttgggggtgtccccgggctaccagacctttgtttcttgccagcagcagcagctgagcttcctgccaccgccctggggcgattgcagttcagcatctctgaaccccaactatgagccagagccctctgatcccctaggctcccccagccccagccccagccctccctatacccttatggggtgtcgcctggcctgcgaaacccgctacgtggctcggaagtgcggctgccgaatggtgtacatgccaggcgacgtgccagtgtgcagcccccagcagtacaagaactgtgcccacccggccatagatgccatgcttcgcaaggactcgtgcgcctgccccaacccgtgcgccagcacgcgctacgccaaggagctctccatggtgcggatcccgagccgcgccgccgcgcgcttcctggcccggaagctcaaccgcagcgaggcctacatcgcggagaacgtgctggccctggacatcttctttgaggccctcaactatgagaccgtggagcagaagaaggcctatgagatgtcagagctgcttggtgacattgggggccagatggggctgttcatcggggccagcctgctcaccatcctcgagatcctagactacctctgtgaggtgttccgagacaaggtcctgggatatttctggaaccgacagcactcccaaaggcactccagcaccaatctgcttcaggaagggctgggcagccatcgaacccaagttccccacctcagcctgggccccagacctcccacccctccctgtgccgtcaccaagactctctccgcctcccaccgcacctgctaccttgtcacacagctctagacctgctgtctgtgtcctcggagccccgccctgacatcctggacatgcctagcctgcacgtagcttttccgtcttcaccccaaataaagtcctaatgcatc

SEQ ID NO: 149383 - DNA, 1596 bp, Artificial Sequence
  derived and/or modified sequence
atgaagcccaccagcggccccgaggaggcccggcggcccgccagcgacataagagtgtttgctagcaactgtagtatgcacggcctgggccacgtgttcggaccaggctctctgtcgctgcgacggggcatgtgggccgccgccgtcgtgctctcagttgccacgttcttataccaggtcgcagaaagagtccggtactacagagaattccatcaccagaccgctctggacgaacgagagtctcatcgcctaatttttccagcggtgaccttgtgcaacattaaccccttaagacggagccggttgacacctaacgacctgcattgggctgggtcagccctgctggggttagacccagcggaacacgctgccttccttcgggcattgggtcgcccccctgccccgccaggctttatgcccagtccaacttttgacatggctcaactatatgcgcgggccggtcactccctcgacgatatgttattagactgccggttcaggggtcaaccgtgcggtcccgagaattttaccaccatctttacgagaatgggcaagtgttacacgttcaactctggcgctgacggggcagaactcttgaccacgactcgaggcggcatgggaaacggccttgacataatgttggatgtgcagcaggaagaataccttccagtgtggagagacaacgaagagacgccgtttgaagtgggaattagagtgcagatccacagtcaggaggaacctccaattatcgaccaactgggtcttggcgtatcccctgggtaccagacctttgtgtcatgccaacagcaacagctgtctttcctaccacccccctggggggactgtagctccgcttccctgaatccaaattatgaacctgaacccagcgacccgctgggtagcccaagtccttcccccagccccccttatacgttgatgggttgtagactagcatgtgagacacgatatgtcgccagaaaatgtggatgtagaatggtatacatgcccggagacgtgcccgtatgcagtccacaacagtacaagaattgcgcccaccccgccatcgatgctatgttgcggaaggacagttgtgcctgccctaacccgtgtgcctccacgcgttatgccaaagagcttagcatggtgcgcatcccaagtcgcgcagcagcccgttttttggcacggaagctgaacaggagtgaagcctatattgccgaaaatgtgctcgccctggatattttttttgaggccctcaactacgaaacagttgaacagaagaaggcttatgaaatgtctgagcttctgggggatattggaggtcagatgggactgtttattggggctagcttactgacaatcttagagatcctagattatctatgtgaggtgtttcgtgataaagtgctggggtacttctggaacaggcaacactcgcaacgccactcttccacaaatttgctgcaggaaggactgggaagccaccgtactcaggtgccacatctgagcctaggcccccggccccctacacccccatgtgctgtgaccaaaactctgtccgccagccatcgaacctgttatcttgtgacccaactgtag

SEQ ID NO: 149384 - DNA, 1596 bp, Artificial Sequence
  derived and/or modified sequence
atgaaaccgactagtgggcctgaggaggcgaggcgaccagcctctgatatcagggtgtttgcctctaactgttccatgcacgggctgggacatgttttcggacccggtagtctatcactgagacgtggaatgtgggcagccgctgtggtactgagcgtagctacttttctgtatcaggtggccgagcgggtccgctattacagagagtttcatcaccagaccgccctcgacgagcgagagagccacaggttgatctttcctgcagtgactctctgtaacatcaatccgctccgccgttcgcgtttaactccaaatgatttgcactgggcagggtctgcgttgctgggcctggaccctgctgaacacgctgccttcctaagagcactgggtagaccgcctgccccaccaggtttcatgcccagcccgacattcgacatggcccagttgtatgcccgagccggacacagcctggacgatatgctgctggactgccggtttagaggacagccatgcggcccagaaaatttcacaactatttttacccgcatgggaaaatgttacacattcaacagcggtgcagacggagccgaattgttaaccacgactcggggtggaatgggcaacggcctggacataatgctggatgttcaacaggaagaatacctcccagtctggagagataatgaggaaaccccgttcgaggttggcataagggttcagatccactcccaggaggagccccctatcattgatcagctgggtttaggtgtttctcccggataccagactttcgtcagctgccagcagcaacagctctcgtttttgccacccccttggggggattgcagttcagcttctctcaatcctaactatgaacctgaaccctctgacccacttggctctcccagcccctcacctagtcccccttatactctgatggggtgccgcctagcttgtgaaacccgctatgtagcccgtaagtgtggttgccgcatggtgtacatgcctggcgatgtgcctgtctgttccccacagcagtacaagaactgtgcccaccctgcaatcgacgcgatgctccggaaggatagctgtgcgtgtccaaacccatgcgcaagtactaggtacgctaaggagctttccatggtgaggattccttcacgcgcagcagcacgattcctcgccaggaagctaaatagatcagaggcgtatattgccgagaatgttcttgctctggatattttttttgaagctttgaattacgagacggtcgaacaaaaaaaggcctacgagatgtcagagctgcttggggacatagggggtcaaatgggtctttttatcggggcatctctgctgacgattctggaaattctcgattatctgtgcgaagtgtttcgagacaaggtcctgggctatttctggaatcggcaacactcccagcgccacagttctaccaacctgctgcaggagggtctcggaagccatagaactcaggtaccacacctatctctgggcccaaggccaccaacgccaccatgtgctgtgaccaaaacactatcagcttcccaccgcacatgttacttagttacacagctatag

SEQ ID NO: 149385 - DNA, 1596 bp, Artificial Sequence
  derived and/or modified sequence
atgaagcccaccagcggccccgaggaggccagaagacccgccagcgacatcagagtgttcgccagcaactgcagcatgcacggcctgggccacgtgttcggccccggcagcctgagcctgagaagaggcatgtgggccgccgccgtggtgctgagcgtggccaccttcctgtaccaggtggccgagagagtgagatactacagagagttccaccaccagaccgccctggacgagagagagagccacagactgatcttccccgccgtgaccctgtgcaacatcaaccccctgagaagaagcagactgacccccaacgacctgcactgggccggcagcgccctgctgggcctggaccccgccgagcacgccgccttcctgagagccctgggcagaccccccgccccccccggcttcatgcccagccccaccttcgacatggcccagctgtacgccagagccggccacagcctggacgacatgctgctggactgcagattcagaggccagccctgcggccccgagaacttcaccaccatcttcaccagaatgggcaagtgctacaccttcaacagcggcgccgacggcgccgagctgctgaccaccaccagaggcggcatgggcaacggcctggacatcatgctggacgtgcagcaggaggagtacctgcccgtgtggagagacaacgaggagacccccttcgaggtgggcatcagagtgcagatccacagccaggaggagccccccatcatcgaccagctgggcctgggcgtgagccccggctaccagaccttcgtgagctgccagcagcagcagctgagcttcctgccccccccctggggcgactgcagcagcgccagcctgaaccccaactacgagcccgagcccagcgaccccctgggcagccccagccccagccccagccccccctacaccctgatgggctgcagactggcctgcgagaccagatacgtggccagaaagtgcggctgcagaatggtgtacatgcccggcgacgtgcccgtgtgcagcccccagcagtacaagaactgcgcccaccccgccatcgacgccatgctgagaaaggacagctgcgcctgccccaacccctgcgccagcaccagatacgccaaggagctgagcatggtgagaatccccagcagagccgccgccagattcctggccagaaagctgaacagaagcgaggcctacatcgccgagaacgtgctggccctggacatcttcttcgaggccctgaactacgagaccgtggagcagaagaaggcctacgagatgagcgagctgctgggcgacatcggcggccagatgggcctgttcatcggcgccagcctgctgaccatcctggagatcctggactacctgtgcgaggtgttcagagacaaggtgctgggctacttctggaacagacagcacagccagagacacagcagcaccaacctgctgcaggagggcctgggcagccacagaacccaggtgccccacctgagcctgggccccagaccccccacccccccctgcgccgtgaccaagaccctgagcgccagccacagaacctgctacctggtgacccagctgtag

SEQ ID NO: 149386 - protein, 911 aa, Artificial Sequence
  derived and/or modified sequence
MAEKAPPGLNRKTSRSTLSLPPEPVDIIRSKTCSRRVKINVGGLNHEVLWRTLDRLPRTRLGKLRDCNTHESLLEVCDDYNLNENEYFFDRHPGAFTSILNFYRTGKLHMMEEMCALSFGQELDYWGIDEIYLESCCQARYHQKKEQMNEELRREAETMREREGEEFDNTCCPDKRKKLWDLLEKPNSSVAAKILAIVSILFIVLSTIALSLNTLPELQETDEFGQLNDNRQLAHVEAVCIAWFTMEYLLRFLSSPNKWKFFKGPLNVIDLLAILPYYVTIFLTESNKSVLQFQNVRRVVQIFRIMRILRILKLARHSTGLQSLGFTLRRSYNELGLLILFLAMGIMIFSSLVFFAEKDEDATKFTSIPASFWWATITMTTVGYGDIYPKTLLGKIVGGLCCIAGVLVIALPIPIIVNNFSEFYKEQKRQEKAIKRREALERAKRNGSIVSMNLKDAFARSMELIDVAVEKAGESANTKDSADDNHLSPSRWKWARKALSETSSNKSFENKYQEVSQKDSHEQLNNTSSSSPQHLSAQKLEMLYNEITKTQPHSHPNPDCQEKPERPSAYEEEIEMEEVVCPQEQLAVAQTEVIVDMKSTSSIDSFTSCATDFTETERSPLPPPSASHLQMKFPTDLPGTEEHQRARGPPFLTLSREKGPAARDGTLEYAPVDITVNLDASGSQCGLHSPLQSDNATDSPKSSLKGSNPLKSRSLKVNFKENRGSAPQTPPSTARPLPVTTADFSLTTPQHISTILLEETPSQGDRPLLGTEVSAPCQGPSKGLSPRFPKQKLFPFSSRERRSFTEIDTGDDEDFLELPGAREEKQVDSSPNCFADKPSDGRDPLREEGSVGSSSPQDTGHNCRQDIYHAVSEVKKDSSQEGCKMENHLFAPEIHSNPGDTGYCPTRETSM

SEQ ID NO: 149387 - DNA, 2736 bp, Artificial Sequence
  derived and/or modified sequence
atggccgaaaaagcccctccagggttgaatcgcaagacctctcgctcaaccctgagtctgccaccagagccggtggacattatcagatctaaaacttgttccaggcgagtcaagatcaacgttggcggcttaaaccacgaggttctctggaggaccttggaccgtttaccgcgtacacgcctgggaaagctgagagactgcaacactcatgagagtctcctggaagtttgtgacgattacaacctcaatgaaaacgaatacttttttgacaggcacccgggggctttcacctctatcctgaacttctatagaactggcaaactgcacatgatggaagaaatgtgcgcactgtcattcgggcaggagctagattactggggaatcgacgagatttatctggaatcatgttgccaggcaagatatcaccagaagaaggagcagatgaatgaggaactcagaagggaagctgaaactatgagggagcgagaaggcgaggaatttgataatacttgctgtcccgataagaggaagaagttatgggatctgcttgagaaaccaaattcctcagtggctgcaaagattctggccatagtttccattctcttcattgtgctcagtacaatcgcactgagtctcaacacactgcctgagctgcaagagaccgatgagtttggccagctgaatgataacagacagctcgcacatgtggaggccgtctgtatagcatggtttactatggaatatctgttgcgctttttgtcgtccccgaacaagtggaagtttttcaaaggaccgctcaatgttattgacttactggcaatcctcccatattatgtaactattttccttaccgagtctaacaaaagtgttcttcagttccagaacgtcaggagagtggtgcaaatatttaggatcatgaggatcctccgaatccttaagctcgcccgacattcaactggccttcagagcctaggctttacgctcagacgatcttataacgagctaggactattgatcctctttctcgcaatgggtattatgatcttcagctcactggtgtttttcgcagaaaaagacgaggatgctactaagttcactagcatccctgcttctttctggtgggccactatcacaatgacgacagttgggtacggggatatctaccctaaaacactattaggtaagatcgtgggcggcctatgctgtatcgccggagtccttgtcattgccttgccaattcctatcattgtgaacaatttttcagaattttataaggagcagaagcgccaggaaaaggccataaagcgcagggaggccctcgaacgggccaagaggaacggatcaatcgtgtcgatgaatctgaaagacgcctttgcacggtccatggagttgattgatgttgcagtggagaaagccggagaatccgccaacaccaaagattctgctgacgataatcacctctccccatcccggtggaagtgggctcggaaagctttgtctgagacctccagcaacaaaagtttcgaaaataagtaccaggaggtatcccagaaggacagccacgagcagctgaataacacctcttcgagctcccctcagcatctgtctgcacagaaattggaaatgctgtataatgagataacgaagacacagccccattcccaccctaacccggactgccaggagaagcctgagaggccttcagcttatgaagaggagatcgagatggaggaggtggtatgccctcaggaacagctagccgtcgcacagacggaggtcatcgtagatatgaagagtacctcctcaatagattcttttacctcatgcgccaccgactttacggagacagaacgctctcctctgcctcccccttccgcttctcatctgcagatgaaatttcctactgacctccctggaactgaagaacatcaacgtgctaggggccccccttttcttaccctgtccagagagaaaggacccgccgcacgtgatggtacgttggagtacgcccctgtagacatcactgttaatctcgatgctagcggatctcagtgcggcctgcattccccactacagtctgataacgccacagacagtcctaagagctctctgaagggttccaatcctctcaagagcagaagcctgaaagtgaactttaaagagaaccgcggctccgcccctcagaccccgcctagcaccgccagacctctgccggtgaccactgctgatttcagtcttactacgcctcaacacatcagtacgattttgctggaggagacgccttctcagggggacagacccctcctggggaccgaggtgtctgctccgtgccaagggccaagtaagggcctgtcccctcgattcccgaagcagaaactgtttcccttctcttcgcgggaacggcggtctttcaccgagattgacaccggcgacgacgaggacttcctagagttgcccggtgctcgcgaggaaaagcaggttgatagctctccgaattgtttcgccgataagccttcagatgggcgggaccctcttcgagaggaggggtccgtggggtcatcaagcccccaggataccggacataactgccggcaggacatctatcatgcagtgtcagaggtgaagaaggattcctcccaggaaggctgcaaaatggagaaccatctgttcgccccagagatccactctaaccctggagacaccggctattgtccaactagggaaacgtcaatgtag

SEQ ID NO: 149388 - DNA, 2736 bp, Artificial Sequence
  derived and/or modified sequence
atggccgagaaggcccctcctggcctgaacaggaagaccagccgcagcaccctgagcctgcccccagagcctgtggacatcatccgcagcaagacctgcagcagaagagtgaagatcaacgtgggcggcctgaaccacgaggtgctgtggaggaccctggaccggctgcccaggacccggctgggcaagctgcgggactgcaacacccatgagagcctgctggaggtgtgtgatgactacaacctgaatgaaaatgagtacttctttgacagacaccctggggccttcaccagcatcctgaacttctacagaacaggcaagctgcacatgatggaggagatgtgtgccctgagctttggccaggagctggactactggggcattgatgagatctacctggagagctgctgccaggcccgctaccaccagaagaaggagcagatgaatgaggagctgcggcgggaggccgagaccatgagggagcgggagggggaggagtttgacaacacctgctgcccagacaagaggaagaagctgtgggacctgctggagaagcccaacagctctgtggccgccaagatcctggccatcgtgtccatcctcttcatcgtgctgagcaccatcgccctgagcctgaacaccctgcctgagctgcaggagacagatgaatttggccagctgaatgacaaccggcagctggcccacgtggaggccgtgtgcatcgcctggttcaccatggagtacctgctgcgcttcctgagcagccccaacaagtggaagttcttcaagggccccctgaatgtgattgacctgctggccatcctgccctactacgtgaccatcttcctgacagagagcaacaagtctgtgctgcagttccagaatgtgagaagagtggtgcagatcttccgcatcatgaggatcctgcgcatcctgaagctggcccggcacagcacaggcctgcagagcctgggcttcaccctgcggcgcagctacaatgagctgggcctgctgatcctcttcctggccatgggcatcatgatcttcagcagcctggtgttctttgctgagaaggatgaagatgccaccaagttcaccagcatcccagccagcttctggtgggccaccatcaccatgaccaccgtgggctacggggacatctaccccaagaccctgctgggcaagatcgtgggcggcctgtgctgcatcgccggcgtgctggtgattgccctgcccatccccatcatcgtgaacaacttcagcgagttctacaaggagcagaagaggcaggagaaggccatcaagaggcgggaggccctggagcgggccaagagaaatggcagcatcgtgtccatgaacctgaaggatgcctttgcccgctccatggagctgattgatgtggccgtggagaaggccggggagagcgccaacaccaaggacagcgcagatgacaaccacctgagccccagccgctggaagtgggccaggaaggccctgtctgagaccagcagcaacaagagctttgagaacaagtaccaggaggtgtcccagaaggacagccatgagcagctgaacaacaccagcagcagcagcccccagcacctgagcgcccagaagctggagatgctgtacaatgagatcaccaagacccagccccacagccaccccaacccagactgccaggagaagccagagcggcccagcgcctatgaggaggagattgagatggaggaggtggtgtgcccccaggagcagctggccgtggcccagacagaggtgattgtggacatgaagagcaccagcagcattgacagcttcaccagctgtgccacagacttcacagaaacagagaggagccccctgcccccaccttctgccagccacctgcagatgaagttccccacagacctgcccggcacagaggagcaccagagggcccggggcccccccttcctgaccctgagccgggagaagggccctgctgccagagatggcaccctggagtatgcccctgtggacatcaccgtgaacctggatgccagcggcagccagtgtggcctgcacagccccctgcagagcgacaatgccacagacagccccaagagcagcctgaagggcagcaaccccctgaagagccgcagcctgaaggtgaacttcaaggaaaatagaggcagcgccccccagaccccacccagcacagcccggcccctgcctgtgaccacagctgacttcagcctgaccaccccccagcacatcagcaccatcctgctggaggagacccccagccagggcgaccggcccctgctgggcacagaggtgtctgccccctgccagggccccagcaagggcctgagcccccgcttccccaagcagaagctgttccccttcagcagccgggagaggaggagcttcacagaaattgacacaggagatgatgaggacttcctggagctgcccggggcccgggaggagaagcaggtggacagcagccccaactgctttgctgacaagcccagtgatggccgggaccccctgcgggaggagggctctgtgggcagcagcagcccccaggacaccggccacaactgccggcaggacatctaccacgctgtgtctgaggtgaagaaggacagcagccaggagggctgcaagatggagaaccacctgtttgcccctgagatccacagcaaccctggggacaccggctactgccccacccgggagacctccatgtag

SEQ ID NO: 149389 - DNA, 2736 bp, Artificial Sequence
  derived and/or modified sequence
atggccgagaaggccccccccggcctgaaccggaagaccagccggagcaccctttcattgcctccagagcccgtcgacatcatccggtctaaaacatgctcacgtcgagtcaagataaatgtgggggggctgaaccatgaagtgctctggaggacgttagataggctgccccgcacacgtttgggaaaattgagagactgtaacacgcatgaatctttactggaagtttgcgatgattataatctgaatgagaatgagtatttctttgatagacaccccggggctttcacatcaatcttgaacttttacagaactgggaaactgcacatgatggaagaaatgtgtgcactgagtttcgggcaggaactcgactattggggtatcgatgagatttacctggagtcttgctgtcaggcccgctaccaccaaaagaaagagcagatgaacgaggaactccgtagggaagccgaaactatgagggaacgggagggcgaggaattcgataacacttgttgtcctgacaagcgcaaaaagctgtgggacctgctggagaagccaaattcaagcgtagctgcaaagattctggccatcgtatccattttgttcatcgtgcttagtaccatcgctttgagtttgaacaccctgccagagctgcaggaaaccgacgagtttggccagctcaacgacaataggcagctagcccacgtagaggccgtatgtattgcatggtttacaatggaatacctccttagatttctgtctagccctaacaaatggaagttttttaaaggccccctgaacgtcatcgatctcttagcaattctcccctattatgtcactatattcctgaccgagagcaataagagcgtgctgcagttccagaatgtccggcgggtggtccagatattcagaatcatgaggattctaagaatccttaagctagcccgacactctaccggcctgcagtctctcggatttactctcaggagaagttataacgaactgggtctgctgatcctctttcttgcaatgggtatcatgatttttagcagcctagtgttcttcgccgaaaaagacgaagacgccacaaagttcacgtctatacctgccagtttctggtgggcaaccataaccatgactaccgtggggtatggtgatatctacccaaagaccctactcggcaagatagtgggcgggctctgctgcatcgcaggtgtgttggttatagcactgccgattccaatcatcgtcaacaacttcagcgagttttacaaagagcagaaaagacaggaaaaggccatcaagagaagagaggctctggagcgcgcaaagcgcaacggttcaattgtcagcatgaaccttaaggatgcttttgcacggagtatggagcttatcgacgtcgcagtagagaaagccggtgaatctgcaaacaccaaggacagcgcagacgacaatcacctttcaccatctcgctggaaatgggctcgcaaggcactcagtgagactagcagcaacaagagtttcgaaaacaagtaccaggaggtctcccaaaaagatagtcatgaacaactgaataacaccagttcttcaagtccccagcacctctccgcccagaaactggaaatgttgtacaatgaaattactaaaacgcagccacatagccacccgaatcctgattgtcaggaaaagcctgaacggccatctgcttatgaagaggagatcgaaatggaagaggtagtgtgcccccaggagcagctcgcagtggctcaaaccgaggttattgttgatatgaagagcacctcttccattgatagtttcacctcatgcgccaccgactttacagagacagagcggtcgccactccctccaccttcagcctcccatctgcagatgaagttcccaactgacctgccagggacggaagagcaccaacgcgcaaggggacccccttttctcacccttagcagagagaaaggccccgccgcgagagacggtaccctggaatacgcccccgtcgatatcacagtgaatcttgatgccagcggctcccaatgcggacttcattctccgcttcaaagcgacaacgctaccgacagcccgaaatcttctctcaagggcagcaatcccctcaagtcaaggagtctgaaagttaattttaaagagaaccgagggagcgccccccagacaccaccctcaacagcccggcccctgcccgtaaccaccgcagactttagtttgaccaccccacagcacatatcaaccatcctgcttgaagagacaccctcccagggagataggcccctcctaggaacagaggtatctgctccttgtcaagggccctcaaaaggactttcgccaagatttcctaaacagaagttgttcccttttagttctagggaacgcagatccttcaccgagatcgatacaggggacgacgaagatttcctggagttacctggggcccgtgaggaaaagcaggtagattcttctcccaattgtttcgctgataagccttcagacggccgcgacccactgagggaagaggggagcgtgggtagcagttcacctcaagacacaggccacaactgcagacaggatatctatcatgcagtaagcgaagttaaaaaggacagctcacaagaagggtgtaaaatggagaaccatttatttgcccccgaaattcactccaatcccggtgacaccgggtactgccccacacgggagacaagcatgtag

SEQ ID NO: 149390 - DNA, 3582 bp, Artificial Sequence
  derived and/or modified sequence
cgccgccgctgcgcctcgggcagccccagcgagcggcaactcccgggctggcgcggctcgctttctggctccttccgcgcggcgagctcagccccgctcgatttttcctcttctgttccagccctctcttgtctgggtggctgtggcggcggcagggggatggggaccccgtgtggggaaggggttgaagatcgatgaagattattgttcttttaaaggatgccttagcttcctcccgccgcctttcctctgagccttcctactagagaccgtgaaccagagtcagggatgtaaagacagggggaaagcacgccgggagctccagccagccggggagaccctcctctctgtggaggggagggggatttccagcgacaggtcattggcgaaggggatcgtcgcggggagaggctccccggagggagcggggaatcccacagccctttgtggtgcccgagcccgtgccgcctgctgagcggggtctgtgggagctagctttgtcagtggaaatgcctgccccagagggatattgcttcagttgacctcattttttaaggaccctggctctgcggctttgtccagttcaaaatggcagaaaaggctcccccgggcttaaacaggaagacttcaaggtcgacactttcccttcctccagagcctgtggacattatccggagcaaaacatgctccaggagagttaagatcaatgtggggggcctcaaccacgaagtcctgtggagaacgctggacaggctgcccaggacgcgcctggggaagcttcgagactgcaacacacacgagagcctcctggaagtgtgcgacgactataatctgaacgagaacgagtatttctttgatcggcatccaggagccttcacttccattttaaatttctaccggaccgggaaactccatatgatggaagaaatgtgtgcactttcgtttggccaagaacttgattactgggggattgatgagatctacttggagtcctgctgccaggccagatatcatcaaaaaaaagaacaaatgaacgaagaactgaggcgagaggcagagactatgcgagagcgagaaggagaagagtttgataatacctgctgccctgataaaaggaagaaactgtgggacttgctggagaaacctaactcatcagtggctgcaaagatcctggccatcgtgtctatcctgttcattgtgctttccaccattgctttgtctctcaatacgctgccggagctgcaggaaacggacgaatttggacaactcaatgacaaccgccaattagcacacgtggaggctgtgtgtattgcatggtttaccatggagtaccttttgcgattcttatcctcaccaaataaatggaagttcttcaaaggcccactgaatgtcattgatttgctggccatcttgccgtactatgtcaccatttttctgacggagtccaacaagagcgtgctgcagttccaaaacgtgaggcgcgtggtccagatcttccgaatcatgcgcatcctcaggatcctgaaactcgccaggcattcgacaggcctgcagtctctgggtttcacccttaggcggagttacaatgaattgggcttgttgatattgtttctggccatggggataatgatattttccagcctggtattttttgctgagaaggatgaagatgctaccaagttcaccagtatccctgcatcattttggtgggccaccatcaccatgaccactgttggctatggtgacatttaccctaaaacattactagggaaaattgtgggaggtctgtgctgtattgctggggttctggttattgcccttcctatcccaattattgtgaacaatttttctgagttttacaaggagcagaaacgccaagagaaagcaattaaaaggagggaggctcttgagcgggccaaaaggaacggaagcatcgtttctatgaacttaaaagatgccttcgctcgaagtatggaactgatagatgtggctgttgagaaggccggagagtccgccaacacaaaggactccgccgacgataatcacctgtcgccaagccggtggaagtgggccaggaaggctctgtcggaaacaagctccaacaagtctttcgagaataagtaccaggaggttagccaaaaagactcccacgagcagctgaacaacacgtcttcctccagcccacagcatctgagtgcccagaaactggagatgctatacaatgaaatcaccaagacacagcctcattctcacccaaacccagactgccaagaaaagcctgagaggccatctgcatatgaagaagagattgaaatggaagaagtggtgtgtccacaggagcagctggccgtggcacagaccgaggtcattgtggacatgaagagcacctccagcatcgacagcttcaccagctgtgccaccgacttcacagagacagagagatcgccgctgccgccgccctccgcctctcacttgcagatgaagttcccaaccgacctcccagggacagaagagcaccaaagagctaggggccccccgtttctaactctatccagagagaaaggacctgctgccagggatggcacgctggagtatgccccagttgacataactgtgaacctcgatgccagtggctcccagtgtgggctacatagtcctttgcagtctgacaatgccaccgacagtcctaagagctctctaaaaggcagcaacccactaaagtccagatccctcaaagtgaactttaaggaaaatagaggcagtgcaccacagaccccgcccagcacagccaggccactgccagtcaccacagctgacttttcgctcactaccccgcagcacatcagtaccatcctcttagaagaaaccccctcccagggagacagacccttgctgggcactgaggtttcagcgccttgtcagggaccttccaaagggctgtcccccaggtttcccaagcagaaactgttccctttctcttcaagagagaggaggagcttcactgaaatagatactggtgacgacgaagacttcttagagctcccaggggcaagggaggagaagcaggtggactccagcccaaattgctttgcagataagcctagtgatgggagagaccctttaagagaagagggcagtgtgggctcttcctccccgcaggacacaggtcacaactgtaggcaagacatttaccatgctgtgagtgaagtcaaaaaggacagtagtcaagaagggtgcaagatggaaaatcacttgtttgccccagaaattcattccaacccaggagacacaggttattgtcccacacgtgaaaccagcatgtgactagttacaaaagcaataaattgaaacaaaacaaaacaaaacaaaacttgtttcttaaaaatgcggttaataatgcctgtgaactaaaaaaatgggaagccctccccaaaaaaagtgcataaaatgttatttttgcatggcatgaacagtttagcttaagtactgtttaaataatgagtcaagactgcattttgtaacaaaccaacaaaaatgactgaagaacagtgaacaaataaaaagagctctattaggaaccaa

SEQ ID NO: 149391 - DNA, 2736 bp, Artificial Sequence
  derived and/or modified sequence
atggctgaaaaggcgcctcccggactgaatcgcaagaccagtcggtctaccctgtcactccctccagagccagttgatatcatccggtccaagacctgttcgagacgggttaagatcaatgtggggggactcaatcacgaagtactgtggcgaacacttgatcgacttccacgaactaggctgggcaagctccgtgactgcaatacccatgagtcgctgcttgaagtatgtgatgattacaacctcaacgaaaacgagtatttctttgataggcatccaggggcatttacctctatcttgaacttttatcgaacagggaagctccatatgatggaggagatgtgcgccctgagcttcgggcaggagttagattactggggcatcgatgaaatctatctggagtcttgctgtcaagccagataccaccagaagaaggagcagatgaatgaggagctccgacgcgaagcagagaccatgcgggaaagagagggcgaagagttcgataatacttgctgtcctgacaaaaggaaaaaattgtgggatttactggagaagccgaactcttccgtggccgcaaaaattctggccatcgtctccatcctcttcatagtgctctccactattgctctctctctcaacacccttcctgaactgcaggagactgatgagttcgggcaactgaatgacaatcggcagctggcgcatgtggaggccgtctgtattgcttggttcactatggaatacttgctccggtttctttcctctccgaataaatggaagttttttaagggacccttaaacgttattgatctcttggccatactgccttactatgttaccatttttctgacagagagtaacaagtctgtgctgcagtttcagaatgtgagacgggtcgtgcagatcttccgcatcatgcggattcttcggatcctgaagctggccaggcacagtaccgggctacagagtctgggatttaccctcaggagaagctacaacgagctggggctcctcatcctattcttagcaatgggtatcatgatcttctctagtctagtgttcttcgcagaaaaggacgaggatgccacaaagtttacgtccatcccggcttcgttttggtgggccaccattaccatgacgaccgttggttatggtgacatttatcccaagacactgctgggcaagattgtagggggtctatgttgtattgccggagtcctcgtcattgccctcccaatccccattatcgttaataacttcagcgaattttacaaggagcagaagcgccaggaaaaggctattaaacgaagagaggcgttggagagagccaaaaggaacggatccattgtgtctatgaatttgaaagacgcgtttgccaggagtatggaattgatcgacgtcgcagtcgagaaagctggtgaaagcgcaaatactaaagactccgccgacgacaatcacctaagtcccagccgatggaaatgggcgagaaaggcactgtcagagacgagcagcaacaagtcgttcgagaacaaataccaagaagtgtcccagaaggattcccatgaacagctaaacaataccagctcttccagtccacagcacttgtccgcgcagaagttagagatgctctacaacgagattacgaagactcagcctcattcgcaccccaatcctgactgtcaggagaagcctgaaaggccttctgcttatgaggaagaaatcgagatggaagaagtggtgtgtcctcaggagcagcttgctgtagcacagacagaggtgatcgtggatatgaagtcaactagcagcatagacagctttacatcctgtgcaacggacttcaccgaaacagaacggagcccactgccaccaccaagcgcatcccatctgcagatgaaattcccaactgacctcccgggaaccgaagagcaccagcgggcaagggggccaccattcctcaccctgagtagggaaaaaggacctgccgcaagagatggcactttggaatacgctcctgttgacattacagtcaacctggacgcatcaggatcccagtgtggcctgcactccccgttgcaatccgataatgctacagatagtcccaagagcagtcttaaggggtcgaatcctctcaagtcccgttcactcaaagtgaattttaaagagaatcggggtagtgctccgcagactcctccctccaccgcacgaccactgcctgtgaccaccgctgatttctctttgaccaccccacagcatatctcaacaattctgcttgaagagaccccttcccagggagacagacctctgctcggcacagaggtatccgctccttgccagggtccatccaaaggtcttagcccaaggtttcctaaacagaaattgtttcctttcagtagtcgggagaggcggtcattcaccgaaatcgatactggagacgacgaggactttctcgaattgcccggagccagggaggagaaacaagtagacagcagcccaaattgctttgcagataaaccatcagatggaagggatcctctcagggaggaaggttcagtcggcagttccagcccgcaggacaccggacataactgtcggcaggacatataccacgcagtttcagaagtcaaaaaagactcctctcaagaaggctgtaaaatggagaatcaccttttcgctcccgaaatccattccaatccaggagacaccggctattgcccgacaagagagacctctatgtag

SEQ ID NO: 149392 - DNA, 2736 bp, Artificial Sequence
  derived and/or modified sequence
atggccgagaaggccccccccggcctgaacagaaagaccagcagaagcaccctgagcctgccccccgagcccgtggacatcatcagaagcaagacctgcagcagaagagtgaagatcaacgtgggcggcctgaaccacgaggtgctgtggagaaccctggacagactgcccagaaccagactgggcaagctgagagactgcaacacccacgagagcctgctggaggtgtgcgacgactacaacctgaacgagaacgagtacttcttcgacagacaccccggcgccttcaccagcatcctgaacttctacagaaccggcaagctgcacatgatggaggagatgtgcgccctgagcttcggccaggagctggactactggggcatcgacgagatctacctggagagctgctgccaggccagataccaccagaagaaggagcagatgaacgaggagctgagaagagaggccgagaccatgagagagagagagggcgaggagttcgacaacacctgctgccccgacaagagaaagaagctgtgggacctgctggagaagcccaacagcagcgtggccgccaagatcctggccatcgtgagcatcctgttcatcgtgctgagcaccatcgccctgagcctgaacaccctgcccgagctgcaggagaccgacgagttcggccagctgaacgacaacagacagctggcccacgtggaggccgtgtgcatcgcctggttcaccatggagtacctgctgagattcctgagcagccccaacaagtggaagttcttcaagggccccctgaacgtgatcgacctgctggccatcctgccctactacgtgaccatcttcctgaccgagagcaacaagagcgtgctgcagttccagaacgtgagaagagtggtgcagatcttcagaatcatgagaatcctgagaatcctgaagctggccagacacagcaccggcctgcagagcctgggcttcaccctgagaagaagctacaacgagctgggcctgctgatcctgttcctggccatgggcatcatgatcttcagcagcctggtgttcttcgccgagaaggacgaggacgccaccaagttcaccagcatccccgccagcttctggtgggccaccatcaccatgaccaccgtgggctacggcgacatctaccccaagaccctgctgggcaagatcgtgggcggcctgtgctgcatcgccggcgtgctggtgatcgccctgcccatccccatcatcgtgaacaacttcagcgagttctacaaggagcagaagagacaggagaaggccatcaagagaagagaggccctggagagagccaagagaaacggcagcatcgtgagcatgaacctgaaggacgccttcgccagaagcatggagctgatcgacgtggccgtggagaaggccggcgagagcgccaacaccaaggacagcgccgacgacaaccacctgagccccagcagatggaagtgggccagaaaggccctgagcgagaccagcagcaacaagagcttcgagaacaagtaccaggaggtgagccagaaggacagccacgagcagctgaacaacaccagcagcagcagcccccagcacctgagcgcccagaagctggagatgctgtacaacgagatcaccaagacccagccccacagccaccccaaccccgactgccaggagaagcccgagagacccagcgcctacgaggaggagatcgagatggaggaggtggtgtgcccccaggagcagctggccgtggcccagaccgaggtgatcgtggacatgaagagcaccagcagcatcgacagcttcaccagctgcgccaccgacttcaccgagaccgagagaagccccctgcccccccccagcgccagccacctgcagatgaagttccccaccgacctgcccggcaccgaggagcaccagagagccagaggcccccccttcctgaccctgagcagagagaagggccccgccgccagagacggcaccctggagtacgcccccgtggacatcaccgtgaacctggacgccagcggcagccagtgcggcctgcacagccccctgcagagcgacaacgccaccgacagccccaagagcagcctgaagggcagcaaccccctgaagagcagaagcctgaaggtgaacttcaaggagaacagaggcagcgccccccagaccccccccagcaccgccagacccctgcccgtgaccaccgccgacttcagcctgaccaccccccagcacatcagcaccatcctgctggaggagacccccagccagggcgacagacccctgctgggcaccgaggtgagcgccccctgccagggccccagcaagggcctgagccccagattccccaagcagaagctgttccccttcagcagcagagagagaagaagcttcaccgagatcgacaccggcgacgacgaggacttcctggagctgcccggcgccagagaggagaagcaggtggacagcagccccaactgcttcgccgacaagcccagcgacggcagagaccccctgagagaggagggcagcgtgggcagcagcagcccccaggacaccggccacaactgcagacaggacatctaccacgccgtgagcgaggtgaagaaggacagcagccaggagggctgcaagatggagaaccacctgttcgcccccgagatccacagcaaccccggcgacaccggctactgccccaccagagagaccagcatgtag

SEQ ID NO: 149393 - protein, 483 aa, Artificial Sequence
  derived and/or modified sequence
MKVLPASGLAVFLIMALKFSTAAPSLVAASPRTWRNNYRLAQAYLDKYYTNKEGHQIGEMVARGSNSMIRKIKELQAFFGLQVTGKLDQTTMNVIKKPRCGVPDVANYRLFPGEPKWKKNTLTYRISKYTPSMSSVEVDKAVEMALQAWSSAVPLSFVRINSGEADIMISFENGDHGDSYPFDGPRGTLAHAFAPGEGLGGDTHFDNAEKWTMGTNGFNLFTVAAHEFGHALGLAHSTDPSALMYPTYKYKNPYGFHLPKDDVKGIQALYGPRKVFLGKPTLPHAPHHKPSIPDLCDSSSSFDAVTMLGKELLLFKDRIFWRRQVHLRTGIRPSTITSSFPQLMSNVDAAYEVAERGTAYFFKGPHYWITRGFQMQGPPRTIYDFGFPRHVQQIDAAVYLREPQKTLFFVGDEYYSYDERKRKMEKDYPKNTEEEFSGVNGQIDAAVELNGYIYFFSGPKTYKYDTEKEDVVSVVKSSSWIGC

SEQ ID NO: 149394 - DNA, 1452 bp, Artificial Sequence
  derived and/or modified sequence
atgaaggtgctgcccgccagcggcctggccgtgttcctgatcatggccctgaagttcagcaccgccgcccccagcctggtggccgccagccccagaacctggagaaacaactacagactggcccaggcctacctggacaagtactacaccaacaaggagggccaccagatcggcgagatggtggccagaggcagcaacagcatgatcagaaagatcaaggagctgcaggccttcttcggcctgcaggtgaccggcaagctggaccagaccaccatgaacgtgatcaagaagcccagatgcggcgtgcccgacgtggccaactacagactgttccccggcgagcccaagtggaagaagaacaccctgacctacagaatcagcaagtacacccccagcatgagcagcgtggaggtggacaaggccgtggagatggccctgcaggcctggagcagcgccgtgcccctgagcttcgtgagaatcaacagcggcgaggccgacatcatgatcagcttcgagaacggcgaccacggcgacagctaccccttcgacggccccagaggcaccctggcccacgccttcgcccccggcgagggcctgggcggcgacacccacttcgacaacgccgagaagtggaccatgggcaccaacggcttcaacctgttcaccgtggccgcccacgagttcggccacgccctgggcctggcccacagcaccgaccccagcgccctgatgtaccccacctacaagtacaagaacccctacggcttccacctgcccaaggacgacgtgaagggcatccaggccctgtacggccccagaaaggtgttcctgggcaagcccaccctgccccacgccccccaccacaagcccagcatccccgacctgtgcgacagcagcagcagcttcgacgccgtgaccatgctgggcaaggagctgctgctgttcaaggacagaatcttctggagaagacaggtgcacctgagaaccggcatcagacccagcaccatcaccagcagcttcccccagctgatgagcaacgtggacgccgcctacgaggtggccgagagaggcaccgcctacttcttcaagggcccccactactggatcaccagaggcttccagatgcagggcccccccagaaccatctacgacttcggcttccccagacacgtgcagcagatcgacgccgccgtgtacctgagagagccccagaagaccctgttcttcgtgggcgacgagtactacagctacgacgagagaaagagaaagatggagaaggactaccccaagaacaccgaggaggagttcagcggcgtgaacggccagatcgacgccgccgtggagctgaacggctacatctacttcttcagcggccccaagacctacaagtacgacaccgagaaggaggacgtggtgagcgtggtgaagagcagcagctggatcggctgctag

SEQ ID NO: 149395 - DNA, 1452 bp, Artificial Sequence
  derived and/or modified sequence
atgaaggtgctgcctgccagtggattggcagtgtttttgataatggcccttaaattctctacagccgccccatcattggttgccgcctctcctcgcacttggaggaataactataggctcgcccaggcatacttggacaagtactacaccaacaaggaaggacaccaaatcggcgaaatggtggctcgagggtcaaactccatgatcagaaagattaaagagctgcaggcgttctttggtctacaggtaactggcaaacttgatcagaccacgatgaatgtcattaagaaacctaggtgtggcgtcccagacgtggccaactaccggctgttcccaggcgaacctaagtggaagaaaaatacgctcacatatcgcatctctaagtacacccccagtatgtcttccgtggaggttgataaggctgtcgaaatggcactacaggcttggtcatccgctgtacccctcagctttgtccgcatcaattctggagaagccgatataatgatttcattcgagaatggcgaccatggcgattcctaccccttcgacggcccacggggtactttggcccatgccttcgcacccggtgaaggcctgggaggagatacgcactttgataacgccgaaaaatggacaatgggaactaacggctttaacctgttcactgtggcagcacacgagttcgggcacgccctggggctcgcgcacagcaccgatcctagcgccctgatgtacccgacatacaagtacaaaaacccctacgggttccacttaccgaaggacgatgtcaaggggattcaggcgctgtatgggccgcggaaagtgtttctagggaagcctacgttgccacacgctccgcaccacaaaccatctattccagatttatgcgacagttcatcttcctttgacgctgtgaccatgctgggtaaggagctattgctgttcaaagaccggatcttttggaggcgacaggtccacctgaggaccgggatcaggcctagtaccattacatcttcttttcctcaacttatgtctaatgtggacgctgcctacgaggtggcagagcgaggaaccgcctactttttcaagggaccacattactggatcactcgcggcttccaaatgcagggtcctccacggaccatttacgattttggcttcccccggcacgtccagcagattgacgcagccgtgtatttgcgcgaaccccaaaagacactcttctttgtgggagacgagtactatagttacgatgaacggaagcgcaagatggagaaggactacccaaagaacaccgaagaagaattttccggggttaatggccagatcgacgctgcggttgagttgaatggctatatctatttcttcagcggtcccaagacatacaagtacgacactgagaaggaagatgttgtgagcgtcgtgaagagcagttcgtggattggttgctag

SEQ ID NO: 149396 - DNA, 1452 bp, Artificial Sequence
  derived and/or modified sequence
atgaaggtgctgcctgccagcggcctggccgtgttcctgatcatggccctgaagttcagcacagctgcccccagcctggtggccgccagccccaggacctggaggaacaactaccgcctggcccaggcctacctggacaagtactacaccaacaaggagggccaccagattggagagatggtggcccggggcagcaacagcatgatcaggaagatcaaggagctgcaggccttcttcggcctgcaggtgacaggcaagctggaccagaccaccatgaatgtcatcaagaagccccgctgtggggtgcctgatgtggccaactaccgcctcttccctggagagcccaagtggaagaagaacaccctgacctaccgcatcagcaagtacacccccagcatgagctctgtggaggtggacaaggctgtggagatggccctgcaggcctggagcagcgctgtgcccctgagctttgtgcgcatcaacagcggggaggccgacatcatgatcagctttgaaaatggagaccacggggacagctacccctttgatggcccccggggcaccctggcccacgcctttgcccctggagagggcctgggcggggacacccactttgacaatgctgagaagtggaccatgggcaccaacggcttcaacctcttcaccgtggccgcccacgagtttggccacgccctgggcctggcccacagcacagaccccagcgccctgatgtaccccacctacaagtacaagaacccctacggcttccacctgcccaaggatgatgtgaagggcatccaggccctgtatggccccaggaaggtgttcctgggcaagcccaccctgccccacgccccccaccacaagcccagcatcccagacctgtgtgacagcagcagcagctttgatgctgtgaccatgctgggcaaggagctgctgctcttcaaggaccgcatcttctggaggcggcaggtgcacctgaggacaggcatccggcccagcaccatcaccagcagcttcccccagctgatgagcaatgtggatgctgcctatgaggtggccgagcggggcacagcctacttcttcaagggcccccactactggatcacccggggcttccagatgcagggcccccccaggaccatctatgactttggcttccccaggcatgtgcagcagattgatgctgctgtgtacctgcgggagccccagaagaccctcttctttgtgggagatgagtactacagctatgatgagaggaagaggaagatggagaaggactaccccaagaacacagaggaggagttctctggagtgaatggccagattgatgctgctgtggagctgaatggctacatctacttcttcagcggccccaagacctacaagtatgacacagagaaggaggatgtggtgtctgtggtgaagagcagctcctggattggctgctag

SEQ ID NO: 149397 - DNA, 1452 bp, Artificial Sequence
  derived and/or modified sequence
atgaaggtgctgcccgccagcggcctggccgtgttcctgatcatggcactcaagttctctactgctgctccatcactggtcgcggcctctccacgcacttggcgcaataactatcgcctggcacaagcttatcttgataagtattatactaacaaagagggacatcaaatcggggagatggtggcaagggggtcaaattctatgatacgaaagattaaagagctacaagccttctttggcctgcaggtcacaggaaagctcgaccagacaacaatgaacgtgataaaaaaaccaagatgtggagtacctgatgtcgctaattaccgactcttcccaggtgaaccaaaatggaagaagaacaccctgacttacaggatcagcaaatacacaccctctatgagttccgttgaggttgacaaagctgtggagatggctctgcaggcctggtcatctgcagtgccccttagcttcgttcggatcaattccggcgaggccgacataatgatcagttttgaaaacggggatcacggggattcctatccttttgatggacctcgtggcacattggcccatgccttcgcacctggtgaggggcttgggggggacactcacttcgacaacgcggagaaatggaccatgggcactaacggatttaatttatttacggtcgctgcacacgaattcgggcatgcactggggctcgctcattccacagacccctctgcactaatgtatcctacgtataagtacaagaacccctacggatttcacttaccgaaggacgacgtcaagggaattcaggctttgtatggccctagaaaagttttcctagggaagcccacacttccccatgcaccgcaccacaagcctagcatacctgacctgtgtgattcaagttcatccttcgacgcggtcaccatgcttggcaaggaactgctgctcttcaaagataggattttctggcggcgacaggtccacctgcgcacaggaattcggccatctaccataacctcctccttcccacagttgatgtctaatgtggacgcagcctatgaagtagccgagcgcgggaccgcgtattttttcaaggggccgcactactggatcactagggggttccagatgcagggcccccctagaaccatttatgactttgggttccccagacacgtgcagcagattgacgcagccgtatacctgcgggagcctcaaaagaccctgttttttgtcggcgatgagtactattcgtacgacgaacgaaagaggaagatggagaaagactatccaaaaaatacggaagaagaattctccggagtcaacggtcagatcgatgctgccgtggagctgaatggctatatctactttttctctggtcccaagacatataagtatgacaccgaaaaggaggacgtagtgagcgtggtgaaaagctcatcatggatcgggtgctag

SEQ ID NO: 149398 - DNA, 1452 bp, Artificial Sequence
  derived and/or modified sequence
atgaaagtgctgcccgcttccggcctggccgtgttcctgattatggcactgaagttttccaccgcggctcctagcttagttgctgccagcccgaggacttggagaaacaattaccgcctggcacaggcttacctggacaagtactacacaaacaaggagggccaccagattggagaaatggttgctaggggttcaaacagcatgattcggaagataaaggagctgcaggctttcttcggcctccaggtgacagggaagctggaccagaccaccatgaatgtcattaagaaacctagatgcggtgtaccagacgtcgcaaattatagactctttccaggagaaccaaaatggaaaaaaaacacattaacttaccgtatatcgaagtatacacctagcatgtcgagcgttgaggttgataaggccgtggaaatggccttgcaggcctggagctctgcagttcctctgagtttcgttagaattaattcaggggaagcagatatcatgatcagcttcgagaacggagatcacggggattcttacccttttgacggcccacggggaacactggcgcacgcatttgcacccggagaaggccttgggggtgatacccacttcgacaatgcagaaaagtggactatgggaacaaacggctttaatttgtttactgtcgcagctcatgagtttggccacgccctgggtctcgcccactccaccgacccttcagccctgatgtatcctacatacaagtacaaaaacccatacggattccatctgccgaaagacgacgtcaaaggtatccaggccctgtatggcccaagaaaggttttcctgggaaaacccactttgccgcacgcacctcatcacaagccctccatacccgatctttgtgactcctcctccagtttcgacgcagtcacaatgctcggtaaagaattgttgctgttcaaagacagaattttttggcggaggcaagtccatttacgaacaggcattaggccttccactatcaccagttctttcccacaacttatgtctaacgtggatgccgcatacgaggtcgcagaaagaggtacagcgtacttcttcaaaggaccccactattggataaccagaggtttccagatgcaagggccaccacgaacaatctatgactttgggtttccaagacatgtccagcagatcgacgcagccgtgtacctccgggaaccccagaagaccttattctttgtgggggatgagtactattcatatgatgagagaaaaaggaagatggagaaggactaccctaagaacacagaggaagagtttagtggggtgaacggacaaattgacgccgcagtggagctgaacggctatatctactttttttcaggcccaaagacatacaagtacgacaccgagaaggaggatgtcgtttcagtagtgaagtccagtagctggatagggtgctag

SEQ ID NO: 149399 - DNA, 1956 bp, Artificial Sequence
  derived and/or modified sequence
ctactgtgaggggatgaaggtgctccctgcatctggccttgctgtcttcctcatcatggctttgaagttttccactgcagccccctccctagttgcagcctcccccaggacctggaggaacaactaccgcctcgcacaggcgtatcttgacaaatattacacaaataaagaaggacaccagattggtgagatggttgcaagaggaagcaattccatgataaggaagattaaggagctacaagcgttctttggcctccaagtcaccgggaagttagaccagaccacaatgaacgtgatcaagaagcctcgctgtggagttcctgatgtggccaattatcgcctcttccctggtgaacccaaatggaaaaaaaatactttgacatacagaatatctaaatacacaccttccatgagttctgtcgaggtggacaaagcagtggagatggccttgcaggcctggagtagcgccgtccctctgagctttgtcagaataaactcaggagaagcggatattatgatatcttttgaaaatggagatcacggggattcctatccattcgatgggcctcgggggactctagcccatgcatttgctcctggagaaggcctgggaggagatacacatttcgacaatgctgagaagtggactatgggaacgaatggttttaatttgtttaccgttgctgctcatgaatttggccatgccctgggcctggcccattccacagacccatcagcactgatgtacccaacttataagtacaagaatccctatggattccacctccccaaagatgatgtgaaagggatccaggcattatacggacctcggaaagtattcctggggaagcccactctgccccatgccccccatcacaagccatccatccctgacctctgtgactccagctcatcctttgacgctgtgacaatgctggggaaggagctcctgctcttcaaggaccggattttctggagacggcaggttcacttgcggacaggaattcggcccagcactattaccagctccttcccccagctcatgtccaatgtggatgcagcttacgaagtggctgagaggggcactgcttacttcttcaaaggtccccactactggataacaagaggattccaaatgcaaggtcctcctcggactatttatgactttggatttccaaggcacgtgcagcaaatagatgctgctgtctacctcagggagccacagaagacccttttctttgtgggagatgaatactacagctacgacgaaaggaaaaggaaaatggaaaaagactatccaaagaatactgaagaagaattttcaggagtaaatggccaaatcgatgctgctgtagaattaaatggctacatttacttcttttcaggaccaaaaacatacaagtatgacacagagaaggaagatgtggttagtgtggtgaaatctagttcctggattggttgctaaatagaaaagcctagtcttctcaagcaatgaggatgactacaagcagcctctaactggatcttaaggactaaagcagaatgtaggagagggattcttccaaaggccttcaaatcaaattagaattcactgagaataataatacttccaatttttttcatagttgtataatcagaatttcaatccacattagaaaagtttttatatgggcaactttatgcgaaatccaaatcaacacaatgcactctgcagttagacaccattattttttcttacctaatatactgaagcagattgatccgtttgatttttatttccaggaggaagactagtggtggattccatgacatatattgtaattcttttcataggaaatgtcattacagtatgaattataattatttacaagcaatggcttttgtggccatcatttggccatcatttgttataataaatataaatttcccaatttttacttaaaagacatcacaaca

SEQ ID NO: 149400 - DNA, 492 bp, Artificial Sequence
  derived and/or modified sequence
atgcagtcggtcgactccatgctgggcactgtcggaggctgcggaggtggggaggctgcctccactttctccaaagaccccagcggctgctgcgtcggaaacgattgccgcgatggagggaggggcctggagcgaaggcatggcagatggtcccgtggggaaggcggagagagcgggctgtgttccggaggacaaatggcttcagagatcgaatactgggacggcttagctattagtgtcatggaagtcgagaaggccttcggctccacaaacgtgttgtggaaaacagagcccttcagtctgtgggcatgtaccgcagcatgcccccctagcctgtccccaacactattggctcttggtttacctagagatggtaaagagctcgccgagcagggatctttatggactgtcctggagcctgggggagattggtcacactcacagagtcagctggggactcccggacgaggcaaaggcgctctgggattctag

SEQ ID NO: 149401 - protein, 155 aa, Artificial Sequence
  derived and/or modified sequence
MASLKCSTVVCVICLEKPKYRCPACRVPYCSVVCFRKHKEQCNPETRPVEKKIRSALPTKTVKPVENKDDDDSIADFLNSDEEEDRVSLQNLKNLGESATLRSLLLNPHLRQLMVNLDQGEDKAKLMRAYMQEPLFVEFADCCLGIVEPSQNEES

SEQ ID NO: 149402 - DNA, 468 bp, Artificial Sequence
  derived and/or modified sequence
atggccagcctgaagtgctccactgtggtgtgcgtaatctgtttggagaagccgaaatatcgctgccctgcatgtagggtaccctactgcagcgtggtatgcttccgtaaacacaaggaacaatgcaaccccgagacaaggccagtggagaagaagatacgctctgctttgcccactaagactgttaaacctgtcgagaataaggacgatgatgattccatcgcagacttcttgaactcagacgaagaggaagatagagtatctctacagaacctgaagaacctgggggaaagcgccacattgagaagtttactgctgaacccacacttgagacaactgatggttaatcttgaccagggggaagataaggccaaactcatgcgggcttacatgcaggagccgctgtttgttgagttcgccgactgttgcctgggcatcgttgagcccagccagaacgaggaaagttag

SEQ ID NO: 149403 - DNA, 468 bp, Artificial Sequence
  derived and/or modified sequence
atggccagcctgaagtgcagcacagtggtgtgtgtgatctgcctggagaagcccaagtaccgctgcccagcctgccgggtgccctactgcagcgtggtgtgcttcaggaagcacaaggagcagtgcaaccctgagaccaggcctgtggagaagaagatccgcagcgccctgcccaccaagacagtgaagcctgtggagaacaaggatgatgatgacagcattgctgacttcctgaacagtgatgaggaggaggacagagtgtccctgcagaacctgaagaacctgggggagagcgccaccctgcggagcctgctgctgaacccccacctgcggcagctgatggtgaacctggaccagggcgaggacaaggccaagctgatgagggcctacatgcaggagcccctgtttgtggagtttgctgactgctgcctgggcatcgtggagcccagccagaatgaggagagctag

SEQ ID NO: 149404 - DNA, 468 bp, Artificial Sequence
  derived and/or modified sequence
atggccagcctgaagtgcagcaccgtggtgtgcgtgatctgcctggagaaacccaaataccgctgccctgcctgcagggtgccttattgttctgtggtctgtttccggaagcacaaagagcagtgcaacccggagacccggcccgtggagaagaaaatacgatcggctttgcctacaaagacagtgaaacccgtggagaacaaggacgatgatgactcaatcgcagacttcctgaatagtgacgaggaggaggatagggtgtcgttgcagaacctgaaaaatctgggtgagagtgcgacactgcgctcccttttgctgaatccgcatctgcgccagctgatggtcaatttggaccaaggagaagacaaggcgaaactgatgagggcatatatgcaggagccactttttgtcgaattcgctgattgttgtctcggcattgtagagccaagccaaaacgaagagtcctag

SEQ ID NO: 149405 - DNA, 468 bp, Artificial Sequence
  derived and/or modified sequence
atggctagtctgaaatgctcaacggtggtgtgtgtcatctgtctggaaaagccgaagtataggtgtcctgcctgcagagtgccttactgcagcgtggtgtgttttcgaaagcacaaagagcagtgcaatcctgagacacggccagtggagaagaagatcaggtctgctcttcctaccaagacagtcaagcccgtggaaaataaggacgacgatgatagcatcgccgacttcctaaacagcgatgaggaagaagatcgcgtgtcactacagaatctgaagaatttaggcgaatccgcaaccttaagatctcttctcctgaaccctcacctcagacaactgatggtgaatttagatcagggagaggataaggcaaaattgatgagagcctacatgcaggagccgctttttgttgaatttgccgattgctgtctgggaatcgttgagccttctcagaatgaggaaagttag

SEQ ID NO: 149406 - DNA, 951 bp, Artificial Sequence
  derived and/or modified sequence
gcacgcgggcgcggctgcgtgagaggcgcgcggcggcgcagtaaacagtctccttccacaaaaccatggcgtcgctcaaatgtagcaccgtcgtctgcgtgatctgcttggagaagcccaaataccgctgtccagcctgccgcgtgccctactgctcggtagtctgcttccggaagcacaaagaacagtgcaaccctgaaactcgtcctgttgagaaaaaaataagatcagctcttcctaccaaaaccgtaaagcctgtggaaaacaaagatgatgatgactctatagctgattttctcaatagtgatgaggaagaagacagagtttctttgcagaatttaaagaatttaggggaatctgcaacattaagaagcttattgctcaatccacacctcaggcagttgatggtcaacctcgatcagggagaagacaaagcaaagctcatgagagcttacatgcaagagcctttgtttgtggagtttgcagactgctgtttaggaattgtggagccatcccagaatgaggagtcttaagatggattattgtgctgcttgctcaagcgtgtgcttgactcctggaacctgcctgctccctctcccagaccagctagtttggggctggggagctcaggcaaaagaggtttccaggatgcagattaggtcatgcaggcctttaccggcattgatgtggctcatgtttcaggcagacttggggtccttaaggtggcaagtcctttatggagagaaaacttgacattcagatgattgtttttaaatgttttacttttggtacagttgatagacatcataaacgatatcaagcttacacttcatatggagttaaacttggtcagtgttaataaaatcaaaacgtgattctactgtacattgcattattcataatttaattgtttgaaattacattaaataaatcaactaattaaatactaaa

SEQ ID NO: 149407 - DNA, 468 bp, Artificial Sequence
  derived and/or modified sequence
atggccagcctgaagtgcagcaccgtggtgtgcgtgatctgcctggagaagcccaagtacagatgccccgcctgcagagtgccctactgcagcgtggtgtgcttcagaaagcacaaggagcagtgcaaccccgagaccagacccgtggagaagaagatcagaagcgccctgcccaccaagaccgtgaagcccgtggagaacaaggacgacgacgacagcatcgccgacttcctgaacagcgacgaggaggaggacagagtgagcctgcagaacctgaagaacctgggcgagagcgccaccctgagaagcctgctgctgaacccccacctgagacagctgatggtgaacctggaccagggcgaggacaaggccaagctgatgagagcctacatgcaggagcccctgttcgtggagttcgccgactgctgcctgggcatcgtggagcccagccagaacgaggagagctag

SEQ ID NO: 149408 - protein, 1581 aa, Artificial Sequence
  derived and/or modified sequence
MKAQGETEESEKLSKMSSLLERLHAKFNQNRPWSETIKLVRQVMEKRVVMSSGGHQHLVSCLETLQKALKVTSLPAMTDRLESIARQNGLGSHLSASGTECYITSDMFYVEVQLDPAGQLCDVKVAHHGENPVSCPELVQQLREKNFDEFSKHLKGLVNLYNLPGDNKLKTKMYLALQSLEQDLSKMAIMYWKATNAGPLDKILHGSVGYLTPRSGGHLMNLKYYVSPSDLLDDKTASPIILHENNVSRSLGMNASVTIEGTSAVYKLPIAPLIMGSHPVDNKWTPSFSSITSANSVDLPACFFLKFPQPIPVSRAFVQKLQNCTGIPLFETQPTYAPLYELITQFELSKDPDPIPLNHNMRFYAALPGQQHCYFLNKDAPLPDGRSLQGTLVSKITFQHPGRVPLILNLIRHQVAYNTLIGSCVKRTILKEDSPGLLQFEVCPLSESRFSVSFQHPVNDSLVCVVMDVQDSTHVSCKLYKGLSDALICTDDFIAKVVQRCMSIPVTMRAIRRKAETIQADTPALSLIAETVEDMVKKNLPPASSPGYGMTTGNNPMSGTTTPTNTFPGGPITTLFNMSMSIKDRHESVGHGEDFSKVSQNPILTSLLQITGNGGSTIGSSPTPPHHTPPPVSSMAGNTKNHPMLMNLLKDNPAQDFSTLYGSSPLERQNSSSGSPRMEICSGSNKTKKKKSSRLPPEKPKHQTEDDFQRELFSMDVDSQNPIFDVNMTADTLDTPHITPAPSQCSTPPTTYPQPVPHPQPSIQRMVRLSSSDSIGPDVTDILSDIAEEASKLPSTSDDCPAIGTPLRDSSSSGHSQSTLFDSDVFQTNNNENPYTDPADLIADAAGSPSSDSPTNHFFHDGVDFNPDLLNSQSQSGFGEEYFDESSQSGDNDDFKGFASQALNTLGVPMLGGDNGETKFKGNNQADTVDFSIISVAGKALAPADLMEHHSGSQGPLLTTGDLGKEKTQKRVKEGNGTSNSTLSGPGLDSKPGKRSRTPSNDGKSKDKPPKRKKADTEGKSPSHSSSNRPFTPPTSTGGSKSPGSAGRSQTPPGVATPPIPKITIQIPKGTVMVGKPSSHSQYTSSGSVSSSGSKSHHSHSSSSSSSASTSGKMKSSKSEGSSSSKLSSSMYSSQGSSGSSQSKNSSQSGGKPGSSPITKHGLSSGSSSTKMKPQGKPSSLMNPSLSKPNISPSHSRPPGGSDKLASPMKPVPGTPPSSKAKSPISSGSGGSHMSGTSSSSGMKSSSGLGSSGSLSQKTPPSSNSCTASSSSFSSSGSSMSSSQNQHGSSKGKSPSRNKKPSLTAVIDKLKHGVVTSGPGGEDPLDGQMGVSTNSSSHPMSSKHNMSGGEFQGKREKSDKDKSKVSTSGSSVDSSKKTSESKNVGSTGVAKIIISKHDGGSPSIKAKVTLQKPGESSGEGLRPQMASSKNYGSPLISGSTPKHERGSPSHSKSPAYTPQNLDSESESGSSIAEKSYQNSPSSDDGIRPLPEYSTEKHKKHKKEKKKVKDKDRDRDRDKDRDKKKSHSIKPESWSKSPISSDQSLSMTSNTILSADRPSRLSPDFMIGEEDDDLMDVALIGN

SEQ ID NO: 149409 - protein, 556 aa, Artificial Sequence
  derived and/or modified sequence
MKAQGETEESEKLSKMSSLLERLHAKFNQNRPWSETIKLVRQVMEKRVVMSSGGHQHLVSCLETLQKALKVTSLPAMTDRLESIARQNGLGSHLSASGTECYITSDMFYVEVQLDPAGQLCDVKVAHHGENPVSCPELVQQLREKNFDEFSKHLKGLVNLYNLPGDNKLKTKMYLALQSLEQDLSKMAIMYWKATNAGPLDKILHGSVGYLTPRSGGHLMNLKYYVSPSDLLDDKTASPIILHENNVSRSLGMNASVTIEGTSAVYKLPIAPLIMGSHPVDNKWTPSFSSITSANSVDLPACFFLKFPQPIPVSRAFVQKLQNCTGIPLFETQPTYAPLYELITQFELSKDPDPIPLNHNMRFYAALPGQQHCYFLNKDAPLPDGRSLQGTLVSKITFQHPGRVPLILNLIRHQVAYNTLIGSCVKRTILKEDSPGLLQFEVCPLSESRFSVSFQHPVNDSLVCVVMDVQDSTHVSCKLYKGLSDALICTDDFIAKVVQRCMSIPVTMRAIRRKAETIQADTPALSLIAETVEDMVKKNLPPASSPGSKNPELGSG

SEQ ID NO: 149410 - DNA, 8148 bp, Artificial Sequence
  derived and/or modified sequence
gcgaattttgggaagttccgttggggaagatggcggcggcctcgagcacccttctcttcttgccgccggggacttcagattgatccttcccgggaagagtagggactgctggtgccctgcgtcccgggatcccgagccaacttgtttcctccgttagtggtggggaagggcttatccttttgtggcggatctagcttctcctcgccttcaggatgaaagctcagggggaaaccgaggagtcagaaaagctgagtaagatgagttctctcctggaacggctccatgcaaaatttaaccaaaatagaccctggagtgaaaccattaagcttgtgcgtcaagtcatggagaagagggttgtgatgagttctggagggcatcaacatttggtcagctgtttggagacattgcagaaggctctcaaagtaacatctttaccagcaatgactgatcgtttggagtccatagcaagacagaatggactgggctctcatctcagtgccagtggcactgaatgttacatcacgtcagatatgttctatgtggaagtgcagttagatcctgcaggacagctttgtgatgtaaaagtggctcaccatggggagaatcctgtgagctgtccggagcttgtacagcagctaagggaaaaaaattttgatgaattttctaagcaccttaagggccttgttaatctgtataaccttccaggggacaacaaactgaagactaaaatgtacttggctctccaatccttagaacaagatctttctaaaatggcaattatgtactggaaagcaactaatgctggtcccttggataagattcttcatggaagtgttggctatctcacaccaaggagtgggggtcatttaatgaacctgaagtactatgtctctccttctgacctactggatgacaagactgcatctcccatcattttgcatgagaataatgtttctcgatctttgggcatgaatgcatcagtgacaattgaaggaacatctgctgtgtacaaactcccaattgcaccattaattatggggtcacatccagttgacaataaatggaccccttccttctcctcaatcaccagtgccaacagtgttgatcttcctgcctgtttcttcttgaaatttccccagccaatcccagtatctagagcatttgttcagaaactgcagaactgcacaggaattccattgtttgaaactcaaccaacttatgcacccctgtatgaactgatcactcagtttgagctatcaaaggaccctgaccccatacctttgaatcacaacatgagattttatgctgctcttcctggtcagcagcactgctatttcctcaacaaggatgctcctcttccagatggccgaagtctacagggaacccttgttagcaaaatcacctttcagcaccctggccgagttcctcttatcctaaatctgatcagacaccaagtggcctataacaccctcattggaagctgtgtcaaaagaactattctgaaagaagattctcctgggcttctccaatttgaagtgtgtcctctctcagagtctcgtttcagcgtatcttttcagcaccctgtgaatgactccctggtgtgtgtggtaatggatgtgcaggactcaacacatgtgagctgtaaactctacaaagggctgtcggatgcactgatctgcacagatgacttcattgccaaagttgttcaaagatgtatgtccatccctgtgacgatgagggctattcggaggaaagctgaaaccattcaagccgacaccccagcactgtccctcattgcagagacagttgaagacatggtgaaaaagaacctgcccccggctagcagcccagggtatggcatgaccacaggcaacaacccaatgagtggtaccactacaccaaccaacacctttccggggggtcccattaccaccttgtttaatatgagcatgagcatcaaagatcggcatgagtcggtgggccatggggaggacttcagcaaggtgtctcagaacccaattcttaccagtttgttgcaaatcacagggaacggggggtctaccattggctcgagtccgacccctcctcatcacacgccgccacctgtctcttcgatggccggcaacaccaagaaccacccgatgctcatgaaccttcttaaagataatcctgcccaggatttctcaaccctttatggaagcagccctttagaaaggcagaactcctcttccggctcaccccgcatggaaatatgctcggggagcaacaagaccaagaaaaagaagtcatcaagattaccacctgagaaaccaaagcaccagactgaagatgactttcagagggagctattttcaatggatgttgactcacagaaccctatctttgatgtcaacatgacagctgacacgctggatacgccacacatcactccagctccaagccagtgtagcactcccccaacaacttacccacaaccagtacctcacccccaacccagtattcaaaggatggtccgactatccagttcagacagcattggcccagatgtaactgacatcctttcagacattgcagaagaagcttctaaacttcccagcactagtgatgattgcccagccattggcacccctcttcgagattcttcaagctctgggcattctcagagtaccctgtttgactctgatgtctttcaaactaacaataatgaaaatccatacactgatccagctgatcttattgcagatgctgctggaagccccagtagtgactctcctaccaatcatttttttcatgatggagtagatttcaatcctgatttattgaacagccagagccaaagtggttttggagaagaatattttgatgaaagcagccaaagtggggataatgatgatttcaaaggatttgcatctcaggcactaaatactttgggggtgccaatgcttggaggtgataatggggagaccaagtttaagggcaataaccaagccgacacagttgatttcagtattatttcagtagccggcaaagctttagctcctgcagatcttatggagcatcacagtggtagtcagggtcctttactgaccactggggacttagggaaagaaaagactcaaaagagggtaaaggaaggcaatggcaccagtaatagtactctctcggggcccggattagacagcaaaccagggaagcgcagtcggaccccttctaatgatgggaaaagcaaagataagcctccaaagcggaagaaggcagacactgagggaaagtctccatctcatagttcttctaacagaccttttaccccacctaccagtacaggtggatctaaatcgccaggcagtgcaggaagatctcagactcccccaggtgttgccacaccacccattcccaaaatcactattcagattcctaagggaacagtgatggtgggcaagccttcctctcacagtcagtataccagcagtggttctgtgtcttcctcaggcagcaaaagccaccatagccattcttcctcctcttcctcatctgcttccacctcagggaagatgaaaagcagtaaatcagaaggttcatcaagttccaagttaagtagcagtatgtattctagccaggggtcttctggatctagccagtccaaaaattcatcccagtctggggggaagccaggctcctctcccataaccaagcatggactgagcagtggctctagcagcaccaagatgaaacctcaaggaaagccatcatcacttatgaatccttctttaagtaaaccaaacatatccccttctcattcaaggccacctggaggctctgacaagcttgcctctccaatgaagcctgttcctggaactcctccatcctctaaagccaagtcccctatcagttcaggttctggtggttctcatatgtctggaactagttcaagctctggcatgaagtcatcttcagggttaggatcctcaggctcgttgtcccagaaaactcccccatcatctaattcctgtacggcatcttcctcctccttttcctcaagtggctcttccatgtcatcctctcagaaccagcatgggagttctaaaggaaaatctcccagcagaaacaagaagccgtccttgacagctgtcatagataaactgaagcatggggttgtcaccagtggccctgggggtgaagacccactggacggccagatgggggtgagcacaaattcttccagccatcctatgtcctccaaacataacatgtcaggaggagagtttcagggcaagcgtgagaaaagtgataaagacaaatcaaaggtttccacctccgggagttcagtggattcttctaagaagacctcagagtcaaaaaatgtggggagcacaggtgtggcaaaaattatcatcagtaagcatgatggaggctcccctagcattaaagccaaagtgactttgcagaaacctggggaaagtagtggagaagggcttaggcctcaaatggcttcttctaaaaactatggctctccactcatcagtggttccactccaaagcatgagcgtggctctcccagccatagtaagtcaccagcatataccccccagaatctggacagtgaaagtgagtcaggctcctccatagcagagaaatcttatcagaatagtcccagctcagacgatggtatccgaccacttccagaatacagcacagagaaacataagaagcacaaaaaggaaaagaagaaagtaaaagacaaagatagggaccgagaccgggacaaagaccgagacaagaaaaaatctcatagcatcaagccagagagttggtccaaatcacccatctcttcagaccagtccttgtctatgacaagtaacacaatcttatctgcagacagaccctcaaggctcagcccagactttatgattggggaggaagatgatgatcttatggatgtggccctgattgggaattaggaaccttatttcctaaaagaaacagggccagaggaaaaaaaactattgataagtttataggcaaaccaccataaggggtgagtcagacaggtctgatttggttaagaatcctaaatggcatggctttgacatcaagctgggtgaattagaaaggcatatccagaccctattaaagaaaccacagggtttgattctggttaccaggaagtcttctttgttcctgtgccagaaagaaagttaaaatacttgcttaagaaagggaggggggtgggaggggtgtagggagagggaagggagggaaacagttttgtgggaaatattcatatatattttcttctccctttttccatttttaggccatgttttaaactcattttagtgcatgtatatgaagggctgggcagaaaatgaaaaagcaatacattccttgatgcatttgcatgaaggttgttcaactttgtttgaggtagttgtccgtttgagtcatgggcaaatgaaggactttggtcattttggacacttaagtaatgtttggtgtctgtttcttaggagtgactgggggagggaagattattttagctatttatttgtaatattttaaccctttatctgtttgtttttatacagtgtttcgttctaaatctatgaggtttagggttcaaaatgatggaaggccgaagagcaaggcttatatggtggtagggagcttatagcttgtgctaatactgtagcatcaagcccaagcaaattagtcagagcccgcctttagagttaaatataatagaaaaaccaaaatgatatttttattttaggagggtttaaatagggttcagagatcataggaatattaggagttacctctctgtggaggtattgacttgtaatctcattttcctttcaaaaaaaaaaaaaaaagctaaggtggcttgttgggatgtaaacatgttttcagatgcagtaaggtttagtgtaggacagccttcctgacccagtggcatgaaaaccattacaggattaatagttctcctacttccacaatgtgccaaaagtctgcatcccagcattttgtttgcaggagaactgatgccattcctaagagctggactcactgtttctcttcatcacaaggagaaggagtccaaactttaatcactccactgtatgctccctgagataaaacagtaaaaaatccgcagccatagttcacttaaaacaatttcaagctcacttttgaagtaatgggggcctggaatgctaggtgagcatgaagataaacccttgctactatgtagcaacccaattggacctttttggagaaataggtctgagtctggattctgggggacatcaataagagcccttcacataaaaatatagaaatccaggagactgtttcgagtgcaacagaagttctcagtatttggagggtcctctcaaaaattctgcggccttactttgatattgacacctgcactgtgccattcctgattattccattcaggatctgtatcagcgggatggggcatggtccccagcacaactcttctgggttaaaaaaaaaaagccaggtgattcctttgtgtgttatgtcgtaagtggagtgacttcatcatatatggaagaagatttctatattcagctttttctgcaggttggagtcagcatagagttggaaaatcagctttggctttctttcctgtctcatttcctctagtgttctcctttttattgtcatcagctctcaacaactctgccacttttgtgtcccaaggtaataagatgtaggaaacaaaacattgtaaagtggagcaagaaaagttatcaattaaccacatcagagtcaaatgtcttgggtgacactaaggaggatatgggcaggtgataccagagtgctttatcttgtgatgttgatacagtagcagcctctcagacattcagccaggttggatttctcatgagtttgtcacctagttttgaatcctatcccgttggtttctgcaggaaaaaaaaaaaaatttatgtggtttttaaaatttgttctgagtggggagaatcttagggggaatgtactgaatagtatcatgggctcagctcccccatgcagggccaacaaataccaaaatgagtaaactgggaagcttttctctctttctgtcttcatcccagatcaaagaatcccgagttaggatctggatgaaggataagcccctgaattgtcgatgggctcacccccacactgacccagcatctgaacttgcttaacagggagccggggctaaactgcttcaccctgcctgagaaccagggagcactgcatttctccacagggtggaggagaagaggcagaataaaccaagcctgggacacctccctcctgtctaggtgtactcattcttctgtttcaaaagaaggcaaggacatgaagtcaacttctacctatcttctgctgctggtgtcttatgtattctcagtttgacctgattcctcttctgtcttttgacttaacattaggggttcttggtcataacctgctctgatgtacataaagatttcaggttcaatatcaatgtgtcttaaaacagaagtattttagcgggtggggggtggggtggtggggacaaacaacgcaggatataattgccaaaaccaggcttgaggttggtgactcttgaaagattttctttcttcaggcctagatcagaaaattaagtgcagcaatatcatgaattctcagaagccctttcagggagccagtgagtcatacagtatccacagttgagtcacttaaagatgtcagtatacgaaacattattcacaatccttgggcaatctcatttttttttccttctcccctcctcccctgccccccatacatttctatccttgagttagttttggaggggcaggaagtacttaacatctcagaagctagattgggaaacatgctcagctataagaactgagctttaaattttgagtttaaaaatgtacatcaggagcagctggggagggtctttttttaaaaaaatctttcaaatttggttttctgtgcatatggccgttttgtaaatactttggggtttttcatttttttgaaagtagatgaaatctgttgtgggatttttttcccgaaacattacaaaataacctgtttatttacatgcaaataaacttctttgataaaaagtaa

SEQ ID NO: 149411 - DNA, 4746 bp, Artificial Sequence
  derived and/or modified sequence
atgaaagcccagggtgagaccgaggaaagcgagaaactgtccaagatgtccagcctactggaacgactgcacgccaagttcaaccaaaacagaccttggtcagagacaatcaagctagttagacaagttatggagaaaagagtcgtcatgtcctccgggggccaccagcacctagtcagctgtctggaaacactgcaaaaggcacttaaggtgacttccttgccggcgatgaccgatcggttggaatctatcgctcgccagaacggcctgggatctcacctcagcgcgtccggtaccgagtgttatatcacttcagacatgttctacgtggaagtgcagctggacccagccggccaactttgcgatgttaaggtcgcacaccatggagagaatcctgtgtcctgcccagaactggttcagcaactgcgcgaaaaaaattttgacgaatttagtaagcatttgaagggcctagtgaacctttataacctgccgggcgataacaagctcaaaaccaagatgtacttagccctgcagagcctggagcaggatttaagcaaaatggccatcatgtactggaaggccactaatgccggaccattggacaagatcttgcacggttccgtagggtatctcacccccaggtcaggtgggcacctgatgaaccttaaatattatgtgagccctagtgatctgctcgacgacaagactgcgagtcctattattctgcacgagaataatgtctctcgcagtctgggaatgaacgcctccgtgaccatcgagggaacctcagctgtttataaactccccatcgcaccactgatcatgggatcacacccagtagataacaagtggacgccatccttttctagtatcacatcagccaatagtgttgatttacccgcctgcttcttccttaagtttcctcagcctattcccgttagtcgggccttcgtccaaaaattgcagaattgtaccggaatccccctctttgaaactcagcccacttatgctcccctttacgaactcattacccagtttgagctgagcaaggatccagatccaattccccttaaccataatatgagattctatgccgcactccctgggcagcaacactgctatttcctgaacaaggatgcacctttacccgatggaagatctttgcagggcactctggtgtctaagatcacctttcagcaccccggtagagtccccctgatcctgaacctgataagacaccaagtggcttacaatacgcttattggatcctgtgtgaagaggactattctgaaagaagattctccgggtctgttgcagtttgaagtgtgtcccctttccgaatctcgtttttcagtcagctttcaacacccagtgaatgattccctcgtgtgtgtggttatggatgtgcaggatagcacccatgtttcttgcaagctctataaaggcctgtctgatgccctaatttgtaccgatgactttattgccaaggtcgtgcagcgatgtatgagcatcccggtgacgatgagggccattaggaggaaagctgaaactatccaggcagataccccagctcttagcctgatcgccgagactgtggaagatatggttaagaagaacctgccgccagcctcctctccgggctacgggatgaccacaggcaacaaccccatgtctggaaccacaacacccaccaataccttccctggtgggccaattaccacattgttcaatatgtcaatgagtataaaggatcggcacgagagcgtcggccatggggaggacttttccaaggtgtcccagaacccaatcctgacctcactgctgcaaattaccggcaacggcggtagcactattggttcctcccccacccctccgcaccatacacctcctcccgtgtcctcaatggctggcaacacaaaaaaccaccctatgcttatgaatctgctcaaagacaatcctgcgcaggattttagtacactgtacggctccagtcccctggagcggcagaattcttcaagtggctccccacgcatggagatctgcagcggctctaacaagactaagaaaaaaaagagctcgaggctccccccagagaagcctaagcaccagaccgaagacgatttccagagagaactgttctcaatggatgtcgattcccagaatccaatcttcgacgttaatatgactgccgataccctggacaccccacacattactccggcccccagtcagtgcagtacccctcccacgacttacccacagccggtcccccatcctcagccctcgatccagagaatggtccggctgagcagttcagactctatcggacccgacgtgacagatatcctatctgatattgctgaggaagcctcaaagcttccatcaacctccgacgattgtcccgccatcggaactcctctcagagacagctccagcagtggccattcacagtcgacactgtttgattccgatgtctttcaaactaataataacgaaaatccttatacagacccagccgacttgatcgctgacgctgctggtagcccatccagcgactccccgacgaaccactttttccacgatggggtggatttcaatcccgacttactgaattcccagagtcagtccggtttcggtgaggagtactttgatgagtctagccaaagcggagataatgatgactttaagggctttgcctcgcaggccttgaacaccctgggagtgccaatgctaggtggtgacaatggagagacgaagttcaagggaaacaatcaggctgacaccgtggacttttccatcattagcgtcgctggtaaagctctggccccagccgacctgatggaacatcactctggtagccaaggacctctcttaacgactggtgacttagggaaggagaaaacacagaagagggtgaaggaaggaaacggcacttcaaattccacgttaagcggtcccgggctcgatagtaagcccggtaagcggagccggacaccatccaatgatggaaaatccaaggacaagcctcctaagaggaagaaagctgatacagaaggaaagtctccctctcattcatctagcaaccggccattcactccccctaccagcacaggggggtccaaatcccctggctccgccggacgctctcaaacacctcctggggtggccaccccaccaatcccaaagataactatacagatccctaaaggcactgtgatggttgggaagcctagcagccactctcaatatacatcatccgggtcagtctccagctctggttctaaaagccaccacagtcatagcagctcttccagcagcagcgcttcaacgagtgggaaaatgaaatcttctaagagcgaaggctcatccagctctaagttatcgagcagcatgtattcctcgcaaggtagtagtgggagttcacaatctaaaaatagctctcagtctggtggaaagcctggaagctctccaattaccaagcacggcctgtcctctggcagctcatctactaaaatgaagccacaggggaagccatcatcgctaatgaacccctctttgagcaagcccaatattagtcccagtcatagcagacctccggggggcagtgataagctcgcttcccctatgaagcctgtgcccggaacgccccctagctcgaaagccaaaagccccattagctctggaagcggcggtagccacatgagcggcacgtcaagctcctctggtatgaaaagcagcagcggtttggggagctctggctccttgagtcagaaaaccccaccttcgtccaattcatgtaccgcgtcatcaagcagtttctcctcaagtgggtcctccatgtcatcttcacagaaccagcacggctccagcaaaggaaagtcaccctctagaaataaaaaaccatctctaaccgctgtcattgacaaactgaaacatggggtcgtgaccagcggtcccggcggggaggacccgcttgacggccaaatgggcgttagcacaaactcaagctcccaccccatgagtagtaaacacaacatgtcggggggggagttccagggtaagagagaaaaatcggataaggataagtcaaaggtgagcacctctgggtcctccgtcgactcctctaaaaaaacgtcagaatcaaagaacgttggcagcacaggtgtggctaagatcatcatcagcaagcatgacggtggctcgccctcgattaaggccaaagtgaccttgcagaagcccggagagtcctctggagaagggctgcgtccccagatggctagttccaagaactacggtagtcccctcattagcggtagcacacctaagcatgaacggggtagcccttcccactccaagtctccggcctatactccacagaatctggattcagaatctgagagtgggagttctatagctgagaagagttaccagaactctccgtccagcgacgatggaattagacctcttcctgagtacagcaccgaaaaacataagaaacacaagaaagagaagaagaaggtgaaggacaaggatcgcgatagggacagggacaaagaccgggataaaaagaaaagccattctataaaaccagagtcgtggtccaagagtcccatttctagcgaccagtcactgtctatgacatcaaatacgatcctgtcagctgataggccaagcagactatctcctgactttatgatcggtgaagaggacgacgatctgatggacgtggcacttatcggaaactag

SEQ ID NO: 149412 - DNA, 4746 bp, Artificial Sequence
  derived and/or modified sequence
atgaaggcccagggcgagacagaggagagcgagaagctgagcaagatgagcagcctgctggagcggctgcacgccaagttcaaccagaaccggccctggagcgagaccatcaagctggtgcggcaggtgatggagaagagggtggtgatgagcagcggcggccaccagcacctggtgtcctgcctggagaccctgcagaaggccctgaaggtgaccagcctgcctgccatgacagaccggctggagagcatcgcccggcagaatggcctgggcagccacctgagcgccagcggcacagagtgctacatcaccagtgacatgttttatgtggaggtgcagctggaccctgctggccagctgtgtgatgtgaaggtggcccaccacggggagaaccctgtgtcctgcccagagctggtgcagcagctgcgggagaagaactttgatgagttcagcaagcacctgaagggcctggtgaacctgtacaacctgcccggggacaacaagctgaagaccaagatgtacctggccctgcagagcctggagcaggacctgagcaagatggccatcatgtactggaaggccaccaatgccggccccctggacaagatcctgcacggctctgtgggctacctgacccccaggtctgggggccacctgatgaacctgaagtactacgtgagccccagcgacctgctggatgacaagacagccagccccatcatcctgcacgagaacaacgtgagccgcagcctgggcatgaatgcctctgtgaccatcgagggcaccagcgctgtgtacaagctgcccatcgcccccctcatcatgggcagccaccctgtggacaacaagtggacccccagcttcagcagcatcaccagcgccaacagcgtggacctgcctgcctgcttcttcctgaagttcccccagcccatccctgtgtcccgggcctttgtgcagaagctgcagaactgcaccggcatccccctgtttgagacccagcccacctacgcccccctgtatgagctgatcacccagtttgagctgagcaaggaccctgaccccatccccctgaaccacaacatgaggttctatgctgccctgcccggccagcagcactgctacttcctgaacaaggatgcccccctgcctgatggccgcagcctgcagggcaccctggtgtccaagatcaccttccagcaccctggccgggtgcccctcatcctgaacctgatccgccaccaggtggcctacaacaccctgattggcagctgtgtgaagaggaccatcctgaaggaggacagccctggcctgctgcagtttgaggtgtgccccctgtctgagagccgcttctctgtgtccttccagcaccctgtgaatgacagcctggtgtgtgtggtgatggatgtgcaggacagcacccacgtgtcctgcaagctgtacaagggcctgagtgatgccctgatctgcacagatgacttcatcgccaaggtggtgcagcgctgcatgagcatccctgtgaccatgagggccatccggaggaaggccgagaccatccaggccgacaccccagccctgagcctgattgctgagaccgtggaggacatggtgaagaagaacctgcccccagccagcagccctggctacggcatgaccaccggcaacaaccccatgagcggcaccaccacccccaccaacaccttccctgggggccccatcaccaccctcttcaacatgtccatgagcatcaaggacagacatgagagcgtgggccatggagaggacttcagcaaggtgtcccagaaccccatcctgaccagcctgctgcagatcactggaaatggaggcagcaccatcggcagcagccccaccccaccccaccacaccccacctcctgtgtcctccatggccggcaacaccaagaaccaccccatgctgatgaacctgctgaaggacaacccagcccaggacttcagcaccctgtatggcagcagccccctggagcggcagaacagcagcagcggcagccccaggatggagatctgcagcggcagcaacaagaccaagaagaagaagagcagccggctgcccccagagaagcccaagcaccagacagaagatgacttccagcgggagctgttctccatggatgtggacagccagaaccccatctttgatgtgaacatgacagctgacaccctggacaccccccacatcaccccagcccccagccagtgcagcaccccacccaccacctacccccagcctgtgccccacccccagcccagcatccagaggatggtgcggctgagcagcagtgacagcattggaccagatgtgacagacatcctgagtgacattgctgaggaggccagcaagctgcccagcaccagtgatgactgcccagccatcggcacccccctgcgggacagcagcagcagcggccacagccagagcaccctgtttgacagtgatgtgttccagaccaacaacaatgaaaacccctacacagatcctgctgacctgattgctgatgctgctggcagccccagcagtgacagccccaccaaccacttcttccatgatggagtggacttcaacccagacctgctgaacagccagagccagagcggctttggagaggagtactttgatgagagcagccagagcggggacaatgatgacttcaagggctttgccagccaggccctgaacaccctgggcgtgcccatgctgggcggggacaatggagagaccaagttcaagggcaacaaccaggccgacacagtggacttcagcatcatctctgtggccggcaaggccctggccccagctgacctgatggagcaccacagcggcagccagggccccctgctgaccaccggggacctgggcaaggagaagacccagaagagggtgaaggagggcaatggcaccagcaacagcaccctgagcggccctggcctggacagcaagccaggcaagaggagcaggacccccagcaatgatggcaagagcaaggacaagccacccaagaggaagaaggctgacacagagggcaagagccccagccacagcagcagcaaccggcccttcaccccacccaccagcactggaggcagcaagagccctggcagcgctggccgcagccagaccccacctggggtggccaccccacccatccccaagatcaccatccagatccccaagggcaccgtgatggtgggcaagcccagcagccacagccagtacaccagcagcggctctgtgagcagcagcggcagcaagagccaccacagccacagcagcagcagcagcagcagcgccagcaccagcggcaagatgaagagcagcaagtctgagggcagcagcagcagcaagctgagcagctccatgtacagcagccagggcagcagcggcagcagccagagcaagaacagcagccagagcggcggcaagccaggcagcagccccatcaccaagcacggcctgagcagcggcagcagcagcaccaagatgaagccccagggcaagcccagcagcctgatgaaccccagcctgagcaagcccaacatcagccccagccacagccggcccccaggcggcagtgacaagctggccagccccatgaagcctgtgcccggcaccccacccagcagcaaggccaagagccccatcagcagcggcagcggcggcagccacatgagcggcaccagcagcagcagcggcatgaagagcagcagcggcctgggcagcagcggcagcctgagccagaagaccccacccagcagcaacagctgcacagccagcagcagcagcttcagcagcagcggcagctccatgagcagcagccagaaccagcacggcagcagcaagggcaagagccccagcaggaacaagaagcccagcctgacagctgtgattgacaagctgaagcacggcgtggtgaccagcggccctggaggagaggaccccctggatggccagatgggcgtgtccaccaacagcagcagccaccccatgagcagcaagcacaacatgtctggaggagagttccagggcaagcgggagaagagtgacaaggacaagagcaaggtgtccaccagcggcagctctgtggacagcagcaagaagaccagcgagagcaagaatgtgggcagcactggagtggccaagatcatcatcagcaagcatgatggcggcagccccagcatcaaggccaaggtgaccctgcagaagccaggagagagcagtggagagggcctgcggccccagatggccagcagcaagaactacggcagccccctcatcagcggcagcacccccaagcatgagcggggcagccccagccacagcaagagccctgcctacaccccccagaacctggacagcgagagcgagagcggcagcagcattgctgagaagagctaccagaacagccccagcagtgatgatggcatccggcccctgcctgagtacagcacagagaagcacaagaagcacaagaaggagaagaagaaggtgaaggacaaggaccgggaccgggaccgggacaaggaccgggacaagaagaagagccacagcatcaagccagagagctggagcaagagccccatcagcagtgaccagagcctgtccatgaccagcaacaccatcctgtctgctgaccggcccagccggctgagcccagacttcatgattggagaagaagatgatgacctgatggatgtggccctgattggcaactag

SEQ ID NO: 149413 - DNA, 5826 bp, Artificial Sequence
  derived and/or modified sequence
tttgggaagttccgttggggaagatggcggcggcctcgagcacccttctcttcttgccgccggggacttcagattgatccttcccgggaagagtagggactgctggtgccctgcgtcccgggatcccgagccaacttgtttcctccgttagtggtggggaagggcttatccttttgtggcggatctagcttctcctcgccttcaggatgaaagctcagggggaaaccgaggagtcagaaaagctgagtaagatgagttctctcctggaacggctccatgcaaaatttaaccaaaatagaccctggagtgaaaccattaagcttgtgcgtcaagtcatggagaagagggttgtgatgagttctggagggcatcaacatttggtcagctgtttggagacattgcagaaggctctcaaagtaacatctttaccagcaatgactgatcgtttggagtccatagcaagacagaatggactgggctctcatctcagtgccagtggcactgaatgttacatcacgtcagatatgttctatgtggaagtgcagttagatcctgcaggacagctttgtgatgtaaaagtggctcaccatggggagaatcctgtgagctgtccggagcttgtacagcagctaagggaaaaaaattttgatgaattttctaagcaccttaagggccttgttaatctgtataaccttccaggggacaacaaactgaagactaaaatgtacttggctctccaatccttagaacaagatctttctaaaatggcaattatgtactggaaagcaactaatgctggtcccttggataagattcttcatggaagtgttggctatctcacaccaaggagtgggggtcatttaatgaacctgaagtactatgtctctccttctgacctactggatgacaagactgcatctcccatcattttgcatgagaataatgtttctcgatctttgggcatgaatgcatcagtgacaattgaaggaacatctgctgtgtacaaactcccaattgcaccattaattatggggtcacatccagttgacaataaatggaccccttccttctcctcaatcaccagtgccaacagtgttgatcttcctgcctgtttcttcttgaaatttccccagccaatcccagtatctagagcatttgttcagaaactgcagaactgcacaggaattccattgtttgaaactcaaccaacttatgcacccctgtatgaactgatcactcagtttgagctatcaaaggaccctgaccccatacctttgaatcacaacatgagattttatgctgctcttcctggtcagcagcactgctatttcctcaacaaggatgctcctcttccagatggccgaagtctacagggaacccttgttagcaaaatcacctttcagcaccctggccgagttcctcttatcctaaatctgatcagacaccaagtggcctataacaccctcattggaagctgtgtcaaaagaactattctgaaagaagattctcctgggcttctccaatttgaagtgtgtcctctctcagagtctcgtttcagcgtatcttttcagcaccctgtgaatgactccctggtgtgtgtggtaatggatgtgcaggactcaacacatgtgagctgtaaactctacaaagggctgtcggatgcactgatctgcacagatgacttcattgccaaagttgttcaaagatgtatgtccatccctgtgacgatgagggctattcggaggaaagctgaaaccattcaagccgacaccccagcactgtccctcattgcagagacagttgaagacatggtgaaaaagaacctgcccccggctagcagcccagggtatggcatgaccacaggcaacaacccaatgagtggtaccactacaccaaccaacacctttccggggggtcccattaccaccttgtttaatatgagcatgagcatcaaagatcggcatgagtcggtgggccatggggaggacttcagcaaggtgtctcagaacccaattcttaccagtttgttgcaaatcacagggaacggggggtctaccattggctcgagtccgacccctcctcatcacacgccgccacctgtctcttcgatggccggcaacaccaagaaccacccgatgctcatgaaccttcttaaagataatcctgcccaggatttctcaaccctttatggaagcagccctttagaaaggcagaactcctcttccggctcaccccgcatggaaatatgctcggggagcaacaagaccaagaaaaagaagtcatcaagattaccacctgagaaaccaaagcaccagactgaagatgactttcagagggagctattttcaatggatgttgactcacagaaccctatctttgatgtcaacatgacagctgacacgctggatacgccacacatcactccagctccaagccagtgtagcactcccccaacaacttacccacaaccagtacctcacccccaacccagtattcaaaggatggtccgactatccagttcagacagcattggcccagatgtaactgacatcctttcagacattgcagaagaagcttctaaacttcccagcactagtgatgattgcccagccattggcacccctcttcgagattcttcaagctctgggcattctcagagtaccctgtttgactctgatgtctttcaaactaacaataatgaaaatccatacactgatccagctgatcttattgcagatgctgctggaagccccagtagtgactctcctaccaatcatttttttcatgatggagtagatttcaatcctgatttattgaacagccagagccaaagtggttttggagaagaatattttgatgaaagcagccaaagtggggataatgatgatttcaaaggatttgcatctcaggcactaaatactttgggggtgccaatgcttggaggtgataatggggagaccaagtttaagggcaataaccaagccgacacagttgatttcagtattatttcagtagccggcaaagctttagctcctgcagatcttatggagcatcacagtggtagtcagggtcctttactgaccactggggacttagggaaagaaaagactcaaaagagggtaaaggaaggcaatggcaccagtaatagtactctctcggggcccggattagacagcaaaccagggaagcgcagtcggaccccttctaatgatgggaaaagcaaagataagcctccaaagcggaagaaggcagacactgagggaaagtctccatctcatagttcttctaacagaccttttaccccacctaccagtacaggtggatctaaatcgccaggcagtgcaggaagatctcagactcccccaggtgttgccacaccacccattcccaaaatcactattcagattcctaagggaacagtgatggtgggcaagccttcctctcacagtcagtataccagcagtggttctgtgtcttcctcaggcagcaaaagccaccatagccattcttcctcctcttcctcatctgcttccacctcagggaagatgaaaagcagtaaatcagaaggttcatcaagttccaagttaagtagcagtatgtattctagccaggggtcttctggatctagccagtccaaaaattcatcccagtctggggggaagccaggctcctctcccataaccaagcatggactgagcagtggctctagcagcaccaagatgaaacctcaaggaaagccatcatcacttatgaatccttctttaagtaaaccaaacatatccccttctcattcaaggccacctggaggctctgacaagcttgcctctccaatgaagcctgttcctggaactcctccatcctctaaagccaagtcccctatcagttcaggttctggtggttctcatatgtctggaactagttcaagctctggcatgaagtcatcttcagggttaggatcctcaggctcgttgtcccagaaaactcccccatcatctaattcctgtacggcatcttcctcctccttttcctcaagtggctcttccatgtcatcctctcagaaccagcatgggagttctaaaggaaaatctcccagcagaaacaagaagccgtccttgacagctgtcatagataaactgaagcatggggttgtcaccagtggccctgggggtgaagacccactggacggccagatgggggtgagcacaaattcttccagccatcctatgtcctccaaacataacatgtcaggaggagagtttcagggcaagcgtgagaaaagtgataaagacaaatcaaaggtttccacctccgggagttcagtggattcttctaagaagacctcagagtcaaaaaatgtggggagcacaggtgtggcaaaaattatcatcagtaagcatgatggaggctcccctagcattaaagccaaagtgactttgcagaaacctggggaaagtagtggagaagggcttaggcctcaaatggcttcttctaaaaactatggctctccactcatcagtggttccactccaaagcatgagcgtggctctcccagccatagtaagtcaccagcatataccccccagaatctggacagtgaaagtgagtcaggctcctccatagcagagaaatcttatcagaatagtcccagctcagacgatggtatccgaccacttccagaatacagcacagagaaacataagaagcacaaaaaggaaaagaagaaagtaaaagacaaagatagggaccgagaccgggacaaagaccgagacaagaaaaaatctcatagcatcaagccagagagttggtccaaatcacccatctcttcagaccagtccttgtctatgacaagtaacacaatcttatctgcagacagaccctcaaggctcagcccagactttatgattggggaggaagatgatgatcttatggatgtggccctgattgggaattaggaaccttatttcctaaaagaaacagggccagaggaaaaaaaactattgataagtttataggcaaaccaccataaggggtgagtcagacaggtctgatttggttaagaatcctaaatggcatggctttgacatcaagctgggtgaattagaaaggcatatccagaccctattaaagaaaccacagggtttgattctggttaccaggaagtcttctttgttcctgtgccagaaagaaagttaaaatacttgcttaagaaagggaggggggtgggaggggtgtagggagagggaagggagggaaacagttttgtgggaaatattcatatatattttcttctccctttttccatttttaggccatgttttaaactcattttagtgcatgtatatgaagggctgggcagaaaatgaaaaagcaatacattccttgatgcatttgcatgaaggttgttcaactttgtttgaggtagttgtccgtttgagtcatgggcaaatgaaggactttggtcattttggacacttaagtaatgtttggtgtctgtttcttaggagtgactgggggagggaagattattttagctatttatttgtaatattttaaccctttatctgtttgtttttatacagtgtttcgttctaaatctatgaggtttagggttcaaaatgatggaaggccgaagagcaaggcttatatggtggtagggagcttatagcttgtgctaatactgtagcatcaagcccaagcaaattagtcagagcccgcctttagagttaaatataatagaaaaaccaaaatgatatttttattttaggagggtttaaatagggttcagagatcataggaatattaggagttacctctctgtggaggtat

SEQ ID NO: 149414 - DNA, 4746 bp, Artificial Sequence
  derived and/or modified sequence
atgaaggcccagggcgagaccgaggagagcgagaagctgagcaagatgtcctctctactcgaaaggctgcacgctaagttcaatcagaatcggccttggtcagaaaccatcaaactcgtgaggcaagtcatggagaagagggtagtgatgtcctccggagggcaccagcacctggttagctgtcttgaaactttacagaaggctctgaaagtgacctcactacctgcgatgactgacagactagagtccattgctagacagaacggattggggagccacctgagcgcctctggaactgagtgctatatcacgtcagatatgttttatgttgaggtgcagcttgatccagcaggtcaactctgtgacgtgaaggtggcccaccacggagaaaatcccgtgtcttgtcctgaacttgttcagcagctgcgggaaaagaacttcgatgagttctcaaagcatctaaaggggctcgtgaacttgtacaacttgccaggggataacaaactgaagacaaaaatgtatttggcgctgcaaagtctggagcaggatctgtctaagatggccatcatgtattggaaggcaaccaacgccggccccctggacaaaatcctgcatgggagcgtgggttatcttacccccagaagtggagggcacttgatgaacctgaaatactatgtttcgccttcagatctgctggacgacaaaacagcttctccaatcattctccatgaaaacaacgtgagccggagtctgggaatgaatgcctccgtgactatcgaaggcacttccgccgtttacaagctccccatagctcctctcataatgggctctcaccctgtagacaacaagtggaccccgtccttctcatcaatcacaagtgccaattctgttgacctgcccgcatgctttttcttgaagttcccacaacctattccggttagtagggccttcgttcagaagctgcaaaattgcactgggattccactgtttgaaacgcagcccacttatgcccccttgtacgagctcattactcagttcgagctcagtaaagaccccgaccctatacctctcaatcacaatatgaggttctatgccgctctgccaggccagcagcactgctatttcctgaacaaggacgcgcccctccccgacgggaggtctctgcaagggacactggttagcaagatcacgttccagcatcctggaagggtgccactgatactgaacctcattagacatcaggttgcttacaataccctcatcggttcgtgcgtgaagcgaacaattctaaaggaggatagcccaggtttgctgcagtttgaggtgtgcccgctgtcagaatcacgcttttctgtaagtttccagcatcccgtgaacgacagtctggtgtgcgtcgttatggatgtgcaagattctacgcatgtgtcttgcaagctctacaaaggcctttctgatgcactgatctgcaccgatgactttatcgctaaagttgtgcagcgctgcatgtccattcctgtgaccatgcgagccattcggcgaaaggccgagacgatccaagctgatactcctgcattgagcctgatcgctgagaccgttgaggacatggtcaaaaaaaatctcccccctgcctccagtccaggttacggcatgaccactgggaacaaccctatgtcaggaactacaactcccaccaatacctttcccgggggaccaattacgacacttttcaacatgtcaatgagcattaaagacaggcatgaaagcgtgggtcatggcgaagacttcagcaaggtgtcacagaatccaatacttacctccttgctgcagatcacggggaatgggggctcaacaattggatcctctcctacacccccccatcatacgcccccacctgtgagtagtatggccggtaacactaaaaaccaccccatgcttatgaacttgttaaaggacaaccccgcacaggactttagtaccctttacgggagcagccccctcgaacgtcaaaatagttcttccggctccccacgtatggaaatttgttctggcagcaacaagaccaaaaaaaaaaaatccagtcgcctacctccagagaaacccaaacatcagacagaggacgatttccagcgcgaactcttcagcatggacgttgatagccagaatcccattttcgacgttaacatgactgcagacaccttagatactcctcacattacacctgcgccatcccaatgcagcaccccacctactacatatccacagcctgtgcctcatccccagccatctattcagcgcatggttaggctgtcctcttctgacagcattggtccagacgtgacggatatccttagcgacatagccgaggaagcctctaaactgccttccaccagcgacgattgtcctgcgatcggtactcccctcagagactcatcttcgagcggccactcacagtcaaccctattcgatagcgatgtgtttcaaacaaacaataacgagaatccttacactgaccccgccgatctgatcgccgacgctgccgggtcccctagctcggattccccaacaaaccattttttccacgacggggtggattttaacccagatcttctgaactcccagagtcaaagcgggttcggcgaggagtactttgatgaatctagccagtccggggacaacgatgatttcaagggtttcgctagccaagctctcaacacccttggggtgcctatgctgggaggtgataacggcgagactaagtttaagggcaacaatcaggctgatacagtcgacttttccattatttcagtggccggtaaagcactcgcgccagcagaccttatggaacaccatagcgggagccaggggccactgttgacaactggagacctgggcaaggagaaaacgcaaaagagggttaaagaaggaaatgggacatctaattccaccctgtcaggtcccggtcttgatagcaaacctggcaagagaagccgtaccccaagtaatgatggcaagagcaaagacaagcctcctaaaagaaagaaggcggacacagaaggcaagtcaccctctcatagctctagcaacaggccttttacaccgcctactagtacaggaggatcaaagtcacccggatccgcaggtcgatctcagaccccccccggagtggcaactccaccaatccccaaaatcacaatacaaatcccgaaaggaactgtaatggtggggaaaccttcaagtcattcacaatataccagttccggcagcgtatcttcctcaggttcaaaaagtcaccattctcactcatccagcagcagcagctccgcctccacctcaggcaagatgaaatcgtccaaaagcgaagggagctcaagctccaagctgtcttctagtatgtattcctctcaaggcagcagcgggtcctcacagtcaaagaattcttcacagagcggaggtaaacctggaagtagccctattactaagcatggcctatcatctggcagcagctcaacaaaaatgaaaccccaaggcaagcccagctctctgatgaatccctcccttagcaaacccaatatttcaccttcccactcccgcccccccggtgggagtgacaagctggctagcccaatgaaacccgtgcctggtaccccaccatcctccaaagccaagtcaccaatctctagtggatcaggggggagccatatgtcaggtacctcttcctcaagtggtatgaagtcatcctcagggctaggatcatctggatcccttagccagaagacccccccttccagtaatagctgcactgcgtcctcaagcagctttagctcatccgggagttccatgtccagctcgcagaatcagcacggctctagcaagggaaagtccccttccaggaacaagaaaccatctctcacagccgtgattgacaagctgaagcacggagttgtaacatctggccccggcggcgaggatcccctcgatggacaaatgggcgtgagcactaatagctcttcacaccctatgtcatcaaagcataacatgagtgggggtgagttccagggaaagcgcgaaaagagcgacaaagacaaatctaaggtctcgactagcggaagttctgtggatagtagcaagaaaacaagtgaatcaaagaatgtgggatcaactggagtcgctaaaatcatcatatctaagcacgacggggggagcccatctatcaaggcaaaagtgaccctacaaaagccaggtgaaagcagcggtgaaggcttgcgcccccagatggcctccagcaaaaactatggttcacctttgatctcagggtccaccccaaagcacgaaagggggtctccatctcacagcaagagcccggcctacactccacagaacctcgatagcgaaagcgagagtggctctagtatcgctgaaaagtcttatcagaattcacctagcagcgacgacggcatcagacccctgcccgaatactcaacggaaaagcataaaaagcataaaaaggagaaaaagaaagttaaagataaagatcgcgatagagatcgggacaaagaccgggacaaaaagaagtcccactctataaagccagagagctggtccaaatcgccaatttcctctgaccaatctttatccatgacgtccaataccatattgtcagctgaccgaccctctaggctgtctcccgatttcatgatcggtgaagaggacgatgatctgatggacgtggccttgatcgggaattag

SEQ ID NO: 149415 - DNA, 4746 bp, Artificial Sequence
  derived and/or modified sequence
atgaaagcccagggcgaaacagaggagtccgagaaactgagtaagatgtcctcgctcctggaacgcttacacgctaaattcaaccaaaatcgcccatggtcagagaccattaaactggtgcgccaggtgatggagaagcgagtcgtaatgtcgagtggcggtcaccagcacctggtctcatgtctggaaacactgcagaaagccctgaaagtcactagtctccccgctatgactgatcgtctggaaagcatcgcaagacaaaatggtctgggttcccatctgtccgccagcgggacggagtgctacattacctcagatatgttttacgttgaggtacagctggaccctgccggacaactgtgtgacgtgaaagtggctcatcatggcgagaacccagtgtcttgcccagagctggttcagcagctccgggaaaaaaatttcgacgaatttagcaagcaccttaaaggcctggtgaacctgtataacctccctggcgacaacaaactgaagactaagatgtaccttgcactccagtctttggaacaggatctctctaagatggcaattatgtactggaaggctacgaacgcgggacccctagataagattctccacggcagtgttggttacctgacccccaggtccggaggtcacctgatgaacttaaaatactatgtcagccccagcgacctgctggacgacaagacagcgtcaccaatcattcttcatgagaacaacgtctccaggtccctgggtatgaacgcttccgtcaccatcgaaggaacttcagctgtctataaactccccatcgccccactgatcatgggttcacatccagtggacaataagtggacgccatccttcagctcaatcacctcagcaaattcagtcgaccttcctgcatgctttttcttgaagttccctcaaccaatccctgtcagtcgagcttttgtccaaaagctccagaattgtactggaatccccttattcgaaacacagcccacgtacgctccactgtacgaactcatcacgcagttcgaactgtccaaggatccagacccgatccccctgaaccataatatgcgattctatgctgccctgcctggccaacagcactgctactttctgaataaggatgcacctctgccggacggacggagtctgcagggcaccctcgtgtccaagataacatttcagcacccaggacgtgtgccgctaatcctaaacctgattaggcatcaagtggcctataatactctgattggatcctgcgtgaaaaggaccatcctgaaagaggatagccccggactgcttcagttcgaagtctgtcctctgtccgagagcaggttctccgtctctttccagcatcctgtgaacgatagcttggtttgcgtcgtgatggatgtgcaggactctactcacgtctcttgtaagttgtataagggtctgtcagatgcactgatctgtaccgacgacttcattgccaaagtcgttcaacgctgcatgagcattcccgtcacaatgcgcgcaattaggcggaaagcggaaaccatccaggcagacacaccagctctgtcattgattgcagagaccgtcgaggacatggtcaaaaagaatctgcccccagcttctagcccagggtacggaatgaccactggtaacaaccccatgagcggaacaacaacccctaccaatacttttcctggcggtcctattactaccctgtttaacatgtcaatgtccatcaaggacaggcacgaaagcgttggacacggggaggacttcagcaaggtcagccagaacccaatcctgacatccctgcttcagattactggcaacggaggtagcaccatcggcagctcacctacccctcctcatcatacaccacctccagtgtcctcgatggctggaaatacaaagaaccacccaatgctgatgaatctcctgaaagataatccagcacaggatttttcgaccttatatggcagttcaccccttgaaaggcagaattccagcagtggcagcccgaggatggaaatttgctccggctcgaacaaaacaaagaagaagaaatctagcagactgccacccgagaaaccaaagcaccaaaccgaagatgactttcagcgagagctctttagcatggacgtggactcacagaaccccatctttgacgtgaacatgacagcagataccctagacacacctcacatcactccagctccttctcagtgctccactcctcctactacttaccctcagccagtgcctcaccctcagccctctatccagcggatggtaaggctctcttcttcagatagcataggacctgatgtaaccgacattctatcagatatcgccgaagaggcgagcaaacttccctcaacatctgatgactgtcccgcaattggcactccgctgagggacagtagttcctcgggacactcgcaaagtacattgttcgattctgacgtgttccagaccaataataacgagaatccttatactgaccctgccgacttgattgcggacgcagcaggctcccccagtagcgacagcccgaccaatcatttttttcacgacggggtggattttaatccagatcttttaaattcacagagccaatcgggtttcggagaggaatactttgatgagtcaagccagtccggtgataatgatgactttaaaggttttgcatctcaggccttgaacacccttggggtccccatgcttggaggcgacaacggggaaacaaaattcaaaggtaataaccaggctgatactgtcgatttcagcataatttccgtggctggcaaagcacttgcccctgcagacctgatggaacaccacagcggttcacaaggtccccttctgaccaccggcgacttaggtaaagagaagactcagaagcgcgtcaaggaaggaaacggaacatctaattctacccttagcgggccaggcctagactccaagcccggtaagaggtccaggacaccaagtaacgacggtaagagcaaagacaaacctccaaaaaggaaaaaggccgataccgagggaaagagcccaagccacagctctagtaaccgtccgtttaccccgcctacatccaccggcggatctaagagccctggctccgccggtaggtcacagactcctcctggggtggcaacacctccaatccctaaaattacaatccagattcctaagggaacagtaatggtgggaaaaccatcgtcccactcccaatacaccagcagtggctctgttagctcaagcggctcaaagtctcaccatagccacagtagctcgtccagtagcagtgccagcacaagcggcaaaatgaaaagcagtaagtccgagggcagctctagcagcaagctatctagctctatgtactcaagccaaggttcctctggctctagccagtctaagaacagcagccagtccgggggtaagcccggatcatcaccaataacgaaacacggcctgagtagcggctcaagttcaactaagatgaaaccccagggtaaaccaagctccctgatgaacccatcactgtccaaaccaaacatcagcccatcccacagccgacctccaggagggtccgacaagcttgcctctccaatgaagccagtgcctggaacacccccttctagcaaggcaaagagtcccatttccagcgggtccggcggttcccatatgagcgggaccagctcctccagcgggatgaagtcctcaagcgggctcggctctagtggatctctcagccagaagacccccccttcgtcgaattcctgtacagcatcgagctccagttttagttccagcggctcgagcatgtcctcaagtcaaaaccagcatggatcgtccaaggggaagagtccctcacgcaacaaaaagccttccctcaccgccgtaatagacaaactcaagcatggggtcgttacatctgggcctggcggagaagaccccttggatggccaaatgggagtgtcaacgaattcctctagtcatccaatgtctagcaaacataatatgagtggtggcgagttccagggcaaaagagagaagtctgataaggataaaagcaaagtttctacttcaggatcttctgtggactcgtccaaaaaaacttctgaaagcaaaaacgtcggctccacaggggtagccaaaatcatcatctctaagcatgacggaggatcgccaagcattaaggctaaagtaactttgcagaaacccggagagtcatctggagagggccttcgcccacaaatggcctcgagcaaaaattatgggagcccgttgatctctggtagcacaccgaagcatgagagaggttcgcccagtcattctaaaagccccgcatatacaccccagaatttggacagcgagagcgagtctgggtcctcaatcgccgaaaaaagttaccagaattccccctcaagcgacgatggcatcaggcctctcccagagtactccaccgaaaaacacaaaaaacataaaaaagagaaaaaaaaagttaaggataaggacagagaccgtgaccgcgataaagatcgtgacaaaaaaaaaagccactctatcaaaccagagagttggtccaaatcacccatctcatccgatcagagccttagcatgacctccaacaccatcttaagcgccgacaggccgagccgtctgtcaccggacttcatgatcggagaagaggatgatgacctgatggatgtcgcgctcatcgggaactag

SEQ ID NO: 149416 - DNA, 4746 bp, Artificial Sequence
  derived and/or modified sequence
atgaaggcccagggcgagaccgaggagagcgagaagctgagcaagatgagcagcctgctggagagactgcacgccaagttcaaccagaacagaccctggagcgagaccatcaagctggtgagacaggtgatggagaagagagtggtgatgagcagcggcggccaccagcacctggtgagctgcctggagaccctgcagaaggccctgaaggtgaccagcctgcccgccatgaccgacagactggagagcatcgccagacagaacggcctgggcagccacctgagcgccagcggcaccgagtgctacatcaccagcgacatgttctacgtggaggtgcagctggaccccgccggccagctgtgcgacgtgaaggtggcccaccacggcgagaaccccgtgagctgccccgagctggtgcagcagctgagagagaagaacttcgacgagttcagcaagcacctgaagggcctggtgaacctgtacaacctgcccggcgacaacaagctgaagaccaagatgtacctggccctgcagagcctggagcaggacctgagcaagatggccatcatgtactggaaggccaccaacgccggccccctggacaagatcctgcacggcagcgtgggctacctgacccccagaagcggcggccacctgatgaacctgaagtactacgtgagccccagcgacctgctggacgacaagaccgccagccccatcatcctgcacgagaacaacgtgagcagaagcctgggcatgaacgccagcgtgaccatcgagggcaccagcgccgtgtacaagctgcccatcgcccccctgatcatgggcagccaccccgtggacaacaagtggacccccagcttcagcagcatcaccagcgccaacagcgtggacctgcccgcctgcttcttcctgaagttcccccagcccatccccgtgagcagagccttcgtgcagaagctgcagaactgcaccggcatccccctgttcgagacccagcccacctacgcccccctgtacgagctgatcacccagttcgagctgagcaaggaccccgaccccatccccctgaaccacaacatgagattctacgccgccctgcccggccagcagcactgctacttcctgaacaaggacgcccccctgcccgacggcagaagcctgcagggcaccctggtgagcaagatcaccttccagcaccccggcagagtgcccctgatcctgaacctgatcagacaccaggtggcctacaacaccctgatcggcagctgcgtgaagagaaccatcctgaaggaggacagccccggcctgctgcagttcgaggtgtgccccctgagcgagagcagattcagcgtgagcttccagcaccccgtgaacgacagcctggtgtgcgtggtgatggacgtgcaggacagcacccacgtgagctgcaagctgtacaagggcctgagcgacgccctgatctgcaccgacgacttcatcgccaaggtggtgcagagatgcatgagcatccccgtgaccatgagagccatcagaagaaaggccgagaccatccaggccgacacccccgccctgagcctgatcgccgagaccgtggaggacatggtgaagaagaacctgccccccgccagcagccccggctacggcatgaccaccggcaacaaccccatgagcggcaccaccacccccaccaacaccttccccggcggccccatcaccaccctgttcaacatgagcatgagcatcaaggacagacacgagagcgtgggccacggcgaggacttcagcaaggtgagccagaaccccatcctgaccagcctgctgcagatcaccggcaacggcggcagcaccatcggcagcagccccacccccccccaccacacccccccccccgtgagcagcatggccggcaacaccaagaaccaccccatgctgatgaacctgctgaaggacaaccccgcccaggacttcagcaccctgtacggcagcagccccctggagagacagaacagcagcagcggcagccccagaatggagatctgcagcggcagcaacaagaccaagaagaagaagagcagcagactgccccccgagaagcccaagcaccagaccgaggacgacttccagagagagctgttcagcatggacgtggacagccagaaccccatcttcgacgtgaacatgaccgccgacaccctggacaccccccacatcacccccgcccccagccagtgcagcaccccccccaccacctacccccagcccgtgccccacccccagcccagcatccagagaatggtgagactgagcagcagcgacagcatcggccccgacgtgaccgacatcctgagcgacatcgccgaggaggccagcaagctgcccagcaccagcgacgactgccccgccatcggcacccccctgagagacagcagcagcagcggccacagccagagcaccctgttcgacagcgacgtgttccagaccaacaacaacgagaacccctacaccgaccccgccgacctgatcgccgacgccgccggcagccccagcagcgacagccccaccaaccacttcttccacgacggcgtggacttcaaccccgacctgctgaacagccagagccagagcggcttcggcgaggagtacttcgacgagagcagccagagcggcgacaacgacgacttcaagggcttcgccagccaggccctgaacaccctgggcgtgcccatgctgggcggcgacaacggcgagaccaagttcaagggcaacaaccaggccgacaccgtggacttcagcatcatcagcgtggccggcaaggccctggcccccgccgacctgatggagcaccacagcggcagccagggccccctgctgaccaccggcgacctgggcaaggagaagacccagaagagagtgaaggagggcaacggcaccagcaacagcaccctgagcggccccggcctggacagcaagcccggcaagagaagcagaacccccagcaacgacggcaagagcaaggacaagccccccaagagaaagaaggccgacaccgagggcaagagccccagccacagcagcagcaacagacccttcaccccccccaccagcaccggcggcagcaagagccccggcagcgccggcagaagccagaccccccccggcgtggccaccccccccatccccaagatcaccatccagatccccaagggcaccgtgatggtgggcaagcccagcagccacagccagtacaccagcagcggcagcgtgagcagcagcggcagcaagagccaccacagccacagcagcagcagcagcagcagcgccagcaccagcggcaagatgaagagcagcaagagcgagggcagcagcagcagcaagctgagcagcagcatgtacagcagccagggcagcagcggcagcagccagagcaagaacagcagccagagcggcggcaagcccggcagcagccccatcaccaagcacggcctgagcagcggcagcagcagcaccaagatgaagccccagggcaagcccagcagcctgatgaaccccagcctgagcaagcccaacatcagccccagccacagcagaccccccggcggcagcgacaagctggccagccccatgaagcccgtgcccggcaccccccccagcagcaaggccaagagccccatcagcagcggcagcggcggcagccacatgagcggcaccagcagcagcagcggcatgaagagcagcagcggcctgggcagcagcggcagcctgagccagaagaccccccccagcagcaacagctgcaccgccagcagcagcagcttcagcagcagcggcagcagcatgagcagcagccagaaccagcacggcagcagcaagggcaagagccccagcagaaacaagaagcccagcctgaccgccgtgatcgacaagctgaagcacggcgtggtgaccagcggccccggcggcgaggaccccctggacggccagatgggcgtgagcaccaacagcagcagccaccccatgagcagcaagcacaacatgagcggcggcgagttccagggcaagagagagaagagcgacaaggacaagagcaaggtgagcaccagcggcagcagcgtggacagcagcaagaagaccagcgagagcaagaacgtgggcagcaccggcgtggccaagatcatcatcagcaagcacgacggcggcagccccagcatcaaggccaaggtgaccctgcagaagcccggcgagagcagcggcgagggcctgagaccccagatggccagcagcaagaactacggcagccccctgatcagcggcagcacccccaagcacgagagaggcagccccagccacagcaagagccccgcctacaccccccagaacctggacagcgagagcgagagcggcagcagcatcgccgagaagagctaccagaacagccccagcagcgacgacggcatcagacccctgcccgagtacagcaccgagaagcacaagaagcacaagaaggagaagaagaaggtgaaggacaaggacagagacagagacagagacaaggacagagacaagaagaagagccacagcatcaagcccgagagctggagcaagagccccatcagcagcgaccagagcctgagcatgaccagcaacaccatcctgagcgccgacagacccagcagactgagccccgacttcatgatcggcgaggaggacgacgacctgatggacgtggccctgatcggcaactag

SEQ ID NO: 149417 - protein, 343 aa, Artificial Sequence
  derived and/or modified sequence
MSVLRRMMRVSNRSLLAFIFFFSLSSSCLYFIYVAPGIDYPEGNNSSDYLVQTTTYLPENFTYSPYLPCPEKLPYMRGFLNVNVSEVSFDEIHQLFSKDLDIEPGGHWRPKDCKPRWKVAVLIPFRNRHEHLPIFFLHLIPMLQKQRLEFAFYVIEQTGTQPFNRAMLFNVGFKEAMKDSVWDCVIFHDVDHLPENDRNYYGCGEMPRHFAAKLDKYMYILPYKEFFGGVSGLTVEQFRKINGFPNAFWGWGGEDDDLWNRVHYAGYNVTRPEGDLGKYKSIPHHHRGEVQFLGRYKLLRYSKERQYIDGLNNLIYRPKILVDRLYTNISVNLMPELAPIEDY

SEQ ID NO: 149418 - protein, 382 aa, Artificial Sequence
  derived and/or modified sequence
MSVLRRMMRVSNRSLLAFIFFFSLSSSCLYFIYVAPGIANTYLFMVQARGIMLRENVKTIGHMIRLYTNKNSTLNGTDYPEGNNSSDYLVQTTTYLPENFTYSPYLPCPEKLPYMRGFLNVNVSEVSFDEIHQLFSKDLDIEPGGHWRPKDCKPRWKVAVLIPFRNRHEHLPIFFLHLIPMLQKQRLEFAFYVIEQTGTQPFNRAMLFNVGFKEAMKDSVWDCVIFHDVDHLPENDRNYYGCGEMPRHFAAKLDKYMYILPYKEFFGGVSGLTVEQFRKINGFPNAFWGWGGEDDDLWNRVHYAGYNVTRPEGDLGKYKSIPHHHRGEVQFLGRYKLLRYSKERQYIDGLNNLIYRPKILVDRLYTNISVNLMPELAPIEDY

SEQ ID NO: 149419 - protein, 343 aa, Artificial Sequence
  derived and/or modified sequence
MSVLRRMMRVSNRSLLAFIFFFSLSSSCLYFIYVAPGIANTYLFMVQARGIMLRENVKTIGHMIRLYTNKNSTLNGTDYPEGNNSSDYLVQTTTYLPENFTYSPYLPCPEKLPYMRGFLNVNVSEVSFDEIHQLFSKDLDIEPGGHWRPKDCKPRWKTGTQPFNRAMLFNVGFKEAMKDSVWDCVIFHDVDHLPENDRNYYGCGEMPRHFAAKLDKYMYILPYKEFFGGVSGLTVEQFRKINGFPNAFWGWGGEDDDLWNRVHYAGYNVTRPEGDLGKYKSIPHHHRGEVQFLGRYKLLRYSKERQYIDGLNNLIYRPKILVDRLYTNISVNLMPELAPIEDY

SEQ ID NO: 149420 - DNA, 1032 bp, Artificial Sequence
  derived and/or modified sequence
atgagcgtgctgagaagaatgatgagagtgagcaacagaagcctgctggccttcatcttcttcttcagcctgagcagcagctgcctgtacttcatctacgtggcccccggcatcgactaccccgagggcaacaacagcagcgactacctggtgcagaccaccacctacctgcccgagaacttcacctacagcccctacctgccctgccccgagaagctgccctacatgagaggcttcctgaacgtgaacgtgagcgaggtgagcttcgacgagatccaccagctgttcagcaaggacctggacatcgagcccggcggccactggagacccaaggactgcaagcccagatggaaggtggccgtgctgatccccttcagaaacagacacgagcacctgcccatcttcttcctgcacctgatccccatgctgcagaagcagagactggagttcgccttctacgtgatcgagcagaccggcacccagcccttcaacagagccatgctgttcaacgtgggcttcaaggaggccatgaaggacagcgtgtgggactgcgtgatcttccacgacgtggaccacctgcccgagaacgacagaaactactacggctgcggcgagatgcccagacacttcgccgccaagctggacaagtacatgtacatcctgccctacaaggagttcttcggcggcgtgagcggcctgaccgtggagcagttcagaaagatcaacggcttccccaacgccttctggggctggggcggcgaggacgacgacctgtggaacagagtgcactacgccggctacaacgtgaccagacccgagggcgacctgggcaagtacaagagcatcccccaccaccacagaggcgaggtgcagttcctgggcagatacaagctgctgagatacagcaaggagagacagtacatcgacggcctgaacaacctgatctacagacccaagatcctggtggacagactgtacaccaacatcagcgtgaacctgatgcccgagctggcccccatcgaggactactag

SEQ ID NO: 149421 - DNA, 1149 bp, Artificial Sequence
  derived and/or modified sequence
atgagcgtgctgagaagaatgatgagagtgagcaacagaagcctgctggccttcatcttcttcttcagcctgagcagcagctgcctgtacttcatctacgtggcccccggcatcgccaacacctacctgttcatggtgcaggccagaggcatcatgctgagagagaacgtgaagaccatcggccacatgatcagactgtacaccaacaagaacagcaccctgaacggcaccgactaccccgagggcaacaacagcagcgactacctggtgcagaccaccacctacctgcccgagaacttcacctacagcccctacctgccctgccccgagaagctgccctacatgagaggcttcctgaacgtgaacgtgagcgaggtgagcttcgacgagatccaccagctgttcagcaaggacctggacatcgagcccggcggccactggagacccaaggactgcaagcccagatggaaggtggccgtgctgatccccttcagaaacagacacgagcacctgcccatcttcttcctgcacctgatccccatgctgcagaagcagagactggagttcgccttctacgtgatcgagcagaccggcacccagcccttcaacagagccatgctgttcaacgtgggcttcaaggaggccatgaaggacagcgtgtgggactgcgtgatcttccacgacgtggaccacctgcccgagaacgacagaaactactacggctgcggcgagatgcccagacacttcgccgccaagctggacaagtacatgtacatcctgccctacaaggagttcttcggcggcgtgagcggcctgaccgtggagcagttcagaaagatcaacggcttccccaacgccttctggggctggggcggcgaggacgacgacctgtggaacagagtgcactacgccggctacaacgtgaccagacccgagggcgacctgggcaagtacaagagcatcccccaccaccacagaggcgaggtgcagttcctgggcagatacaagctgctgagatacagcaaggagagacagtacatcgacggcctgaacaacctgatctacagacccaagatcctggtggacagactgtacaccaacatcagcgtgaacctgatgcccgagctggcccccatcgaggactactag

SEQ ID NO: 149422 - DNA, 1032 bp, Artificial Sequence
  derived and/or modified sequence
atgagcgtgctgagaagaatgatgagagtgagcaacagaagcctgctggccttcatcttcttcttcagcctgagcagcagctgcctgtacttcatctacgtggcccccggcatcgccaacacctacctgttcatggtgcaggccagaggcatcatgctgagagagaacgtgaagaccatcggccacatgatcagactgtacaccaacaagaacagcaccctgaacggcaccgactaccccgagggcaacaacagcagcgactacctggtgcagaccaccacctacctgcccgagaacttcacctacagcccctacctgccctgccccgagaagctgccctacatgagaggcttcctgaacgtgaacgtgagcgaggtgagcttcgacgagatccaccagctgttcagcaaggacctggacatcgagcccggcggccactggagacccaaggactgcaagcccagatggaagaccggcacccagcccttcaacagagccatgctgttcaacgtgggcttcaaggaggccatgaaggacagcgtgtgggactgcgtgatcttccacgacgtggaccacctgcccgagaacgacagaaactactacggctgcggcgagatgcccagacacttcgccgccaagctggacaagtacatgtacatcctgccctacaaggagttcttcggcggcgtgagcggcctgaccgtggagcagttcagaaagatcaacggcttccccaacgccttctggggctggggcggcgaggacgacgacctgtggaacagagtgcactacgccggctacaacgtgaccagacccgagggcgacctgggcaagtacaagagcatcccccaccaccacagaggcgaggtgcagttcctgggcagatacaagctgctgagatacagcaaggagagacagtacatcgacggcctgaacaacctgatctacagacccaagatcctggtggacagactgtacaccaacatcagcgtgaacctgatgcccgagctggcccccatcgaggactactag

SEQ ID NO: 149423 - DNA, 1032 bp, Artificial Sequence
  derived and/or modified sequence
atgagcgtgctcaggcgcatgatgagggtgtctaatagatcgctgctcgctttcattttctttttcagcttatctagcagttgcctgtatttcatttacgtggctcctgggattgattacccagagggaaacaattcgtctgattacctggttcagaccacaacttatctgccggagaacttcacctattccccctacctgccatgtccagagaagctgccctatatgcgggggttcctaaacgtgaatgtgtctgaagtgtccttcgacgagatccaccaactgtttagcaaagacctcgatatcgaaccaggcggacactggcgcccaaaggactgcaagcctagatggaaggttgccgtcctgatacccttcagaaatcggcacgagcaccttccaatctttttcctgcacttaattcctatgctccagaaacagagattggagtttgctttttatgttatcgagcagactggtacacaacccttcaaccgcgccatgctgtttaatgtaggctttaaggaagccatgaaagatagtgtttgggattgcgtgattttccacgacgtggaccatctgcctgaaaacgatcgtaattactacgggtgcggcgaaatgccgaggcatttcgcggccaagttggacaagtatatgtatattctgccatacaaggagtttttcggcggcgttagcggactgactgtcgaacaattcaggaagattaatggcttcccgaacgccttctggggctggggcggtgaagatgatgatctgtggaatagggtgcactacgccggctataacgtaactcggccggagggggatctgggcaaatataagtccatcccccaccaccacagaggagaggtccagtttctaggtcgttataaactactgcggtacagcaaggagagacagtatattgacggactgaacaacctgatttatcggccgaagattctggttgacagactatacacaaacatctcagttaaccttatgccagagctcgctccgattgaggattattag

SEQ ID NO: 149424 - DNA, 1149 bp, Artificial Sequence
  derived and/or modified sequence
atgtcagtgcttaggcgcatgatgagggtaagtaacaggtctctgctcgcttttatctttttttttagtttgtcatcgagctgcctgtattttatttacgttgcgcctggaatcgccaatacttatctgttcatggtccaggcgcgtggaatcatgctgagggaaaacgtgaagacaataggacacatgatacggctctatactaacaaaaactcaaccctaaatggaacagattatcccgaggggaacaacagttctgattatctggtgcagacaaccacatatttacctgagaatttcacttactctccatatctcccctgtccagagaaactgccctacatgcggggcttcctgaatgtaaacgtgtcagaagtctcgttcgatgagatccaccagctgttctccaaagacctggatattgaaccgggcggccattggcgcccaaaagactgtaaaccccggtggaaagtggctgtgttgattccttttaggaacagacatgagcacctgccaattttctttctgcaccttatccctatgttacaaaagcagagacttgagtttgccttctacgttatcgaacagaccggcacgcagccattcaatagagctatgctgttcaacgttggcttcaaagaagcaatgaaggactcggtctgggattgcgtgatctttcacgatgttgaccaccttcctgaaaacgatagaaattactatgggtgtggcgaaatgccacggcacttcgccgcaaaattagacaaatatatgtacatcctcccatataaggagttttttggaggcgtttcagggctcacagtggagcaattccggaagataaacggttttccaaacgcattttggggctgggggggtgaggatgacgacctctggaatcgcgttcactatgccgggtataatgtcacaaggcccgagggagatctgggcaagtacaaaagtatccctcaccaccatagaggggaagtgcagtttttagggcggtacaaactcttgcggtatagtaaagaacggcagtatattgatgggctgaacaatctgatctatagacctaagatccttgtggatagattgtacactaacatcagcgtgaatttaatgcccgaactcgcccctattgaggattattag

SEQ ID NO: 149425 - DNA, 1032 bp, Artificial Sequence
  derived and/or modified sequence
atgtcagtcttgcggcgtatgatgagggtcagtaatcggtctctgctggcgtttatcttcttttttagtctgagctcatcatgcctgtactttatctatgtcgcgcctggaatcgcaaatacatatcttttcatggtgcaggcacgagggatcatgctgagagaaaacgtcaaaactattgggcatatgattaggctttatacaaacaaaaattcaactcttaacggaactgactacccggagggcaacaacagctcagattatctggtgcagactaccacatacttgccggaaaacttcacctattctccttaccttccttgcccggagaaactgccttacatgagaggttttcttaatgtaaacgtctcagaagtatcatttgatgagatccatcagttattttccaaagacctcgacatagaacccgggggacattggagaccaaaagattgtaagccacgctggaagaccggcacacagcccttcaatagagcgatgctgttcaatgtgggatttaaggaggctatgaaagattccgtctgggattgtgtgatctttcatgatgtggatcatttgcccgaaaacgatcgcaactactatggatgtggggagatgccacgacacttcgcagccaaattggacaagtatatgtatattctgccctacaaagaattctttggcggagtgtccggtttaaccgtggaacagttccgcaaaattaacgggtttcccaatgcattttggggatggggaggagaagacgatgacctgtggaaccgcgtacactacgcaggctacaatgtgacccgccctgagggggatttggggaagtacaagagcatccctcaccaccatagaggtgaggtgcaatttctgggacgctacaaattgctaagatacagtaaagaacgacagtacatagatggcctcaataacctcatctataggcccaagatcctggtggaccggctttatacaaatataagcgtcaatctgatgcccgagctggcacccatagaagattattag

SEQ ID NO: 149426 - DNA, 1032 bp, Artificial Sequence
  derived and/or modified sequence
atgtctgtgctgcggaggatgatgagggtgagcaacagaagcctgctggccttcatcttcttcttcagcctgagcagcagctgcctgtacttcatctacgtggcccctggcatcgactacccagagggcaacaacagcagtgactacctggtgcagaccaccacctacctgcctgagaacttcacctacagcccctacctgccctgcccagagaagctgccctacatgaggggcttcctgaatgtgaatgtgtctgaggtgtcctttgatgagatccaccagctgttcagcaaggacctggacatcgagcccggcggccactggaggcccaaggactgcaagccccgctggaaggtggccgtgctgatccccttcaggaacagacatgagcacctgcccatcttcttcctgcacctgatccccatgctgcagaagcagaggctggagtttgccttctacgtgattgagcagacaggcacccagcccttcaacagagccatgctgttcaacgtgggcttcaaggaggccatgaaggacagcgtgtgggactgtgtgatcttccatgatgtggaccacctgcctgaaaatgacaggaactactacggctgtggggagatgcccaggcactttgctgccaagctggacaagtacatgtacatcctgccctacaaggagttctttggaggagtgtctggcctgactgtggagcagttcaggaagatcaatggcttccccaatgccttctggggctggggcggggaggatgatgacctgtggaacagagtgcactacgccggctacaacgtgaccaggcctgagggggacctgggcaagtacaagagcatcccccaccaccacagaggagaggtgcagttcctgggccgctacaagctgctgcgctacagcaaggagcggcagtacattgatggcctgaacaacctgatctaccggcccaagatcctggtggaccggctgtacaccaacatctctgtgaacctgatgcctgagctggcccccatcgaggactactag

SEQ ID NO: 149427 - DNA, 1149 bp, Artificial Sequence
  derived and/or modified sequence
atgtctgtgctgcggaggatgatgagggtgagcaacagaagcctgctggccttcatcttcttcttcagcctgagcagcagctgcctgtacttcatctacgtggcccctggcatcgccaacacctacctgttcatggtgcaggcccggggcatcatgctgagagaaaatgtgaagaccatcggccacatgatccggctgtacaccaacaagaacagcaccctgaatggaacagactacccagagggcaacaacagcagtgactacctggtgcagaccaccacctacctgcctgagaacttcacctacagcccctacctgccctgcccagagaagctgccctacatgaggggcttcctgaatgtgaatgtgtctgaggtgtcctttgatgagatccaccagctgttcagcaaggacctggacatcgagcccggcggccactggaggcccaaggactgcaagccccgctggaaggtggccgtgctgatccccttcaggaacagacatgagcacctgcccatcttcttcctgcacctgatccccatgctgcagaagcagaggctggagtttgccttctacgtgattgagcagacaggcacccagcccttcaacagagccatgctgttcaacgtgggcttcaaggaggccatgaaggacagcgtgtgggactgtgtgatcttccatgatgtggaccacctgcctgaaaatgacaggaactactacggctgtggggagatgcccaggcactttgctgccaagctggacaagtacatgtacatcctgccctacaaggagttcttcggcggcgtgtctggcctgactgtggagcagttcaggaagatcaatggcttccccaatgccttctggggctggggcggagaagatgatgacctgtggaacagagtgcactacgccggctacaacgtgaccaggcctgagggggacctgggcaagtacaagagcatcccccaccaccacagaggagaggtgcagttcctgggccgctacaagctgctgcgctacagcaaggagcggcagtacattgatggcctgaacaacctgatctaccggcccaagatcctggtggaccggctgtacaccaacatctctgtgaacctgatgcctgagctggcccccatcgaggactactag

SEQ ID NO: 149428 - DNA, 1032 bp, Artificial Sequence
  derived and/or modified sequence
atgtctgtgctgcggaggatgatgagggtgagcaacagaagcctgctggccttcatcttcttcttcagcctgagcagcagctgcctgtacttcatctacgtggcccctggcatcgccaacacctacctgttcatggtgcaggcccggggcatcatgctgagagaaaatgtgaagaccatcggccacatgatccggctgtacaccaacaagaacagcaccctgaatggaacagactacccagagggcaacaacagcagtgactacctggtgcagaccaccacctacctgcctgagaacttcacctacagcccctacctgccctgcccagagaagctgccctacatgaggggcttcctgaatgtgaatgtgtctgaggtgtcctttgatgagatccaccagctgttcagcaaggacctggacatcgagcccggcggccactggaggcccaaggactgcaagccccgctggaagacaggcacccagcccttcaacagagccatgctgttcaacgtgggcttcaaggaggccatgaaggacagcgtgtgggactgtgtgatcttccatgatgtggaccacctgcctgaaaatgacaggaactactacggctgtggggagatgcccaggcactttgctgccaagctggacaagtacatgtacatcctgccctacaaggagttctttggaggagtgtctggcctgactgtggagcagttcaggaagatcaatggcttccccaatgccttctggggctggggcggggaggatgatgacctgtggaacagagtgcactacgccggctacaacgtgaccaggcctgagggggacctgggcaagtacaagagcatcccccaccaccacagaggagaggtgcagttcctgggccgctacaagctgctgcgctacagcaaggagcggcagtacattgatggcctgaacaacctgatctaccggcccaagatcctggtggaccggctgtacaccaacatctctgtgaacctgatgcctgagctggcccccatcgaggactactag

SEQ ID NO: 149429 - DNA, 1032 bp, Artificial Sequence
  derived and/or modified sequence
atgagcgtgctgcggcggatgatgcgggtgagcaaccggagcctgctcgcatttattttctttttctcactctcctccagttgcctgtactttatttacgtggcacccgggattgactatcccgagggtaataattcctctgactacttggtccagaccactacatacttaccagagaacttcacttatagcccttatcttccatgtccagagaagctcccctatatgagaggatttctgaatgttaacgtgagcgaagtgagttttgacgagatacaccagttgttctctaaggacctggacatagaaccaggaggacattggcgccccaaggattgtaagccccggtggaaggtcgctgtattgattcccttccggaatagacacgagcacttgcctatattctttctgcacctgatcccaatgctccagaagcagcgactggaatttgctttttacgtgatagaacaaacaggcacccagccatttaatcgggctatgctgttcaacgtcggctttaaggaggctatgaaagactctgtctgggattgtgtgattttccacgacgtagaccacctgccagaaaatgatagaaattactacggatgcggcgaaatgcctcgccatttcgccgccaagctggataagtacatgtacatactgccctacaaggagtttttcggaggagtgtccggactgacggttgaacagtttcgtaagatcaatggctttcctaacgctttctggggctggggcggcgaggacgacgacctctggaaccgggtccactacgctggctacaatgtcacacggcctgaaggagaccttggcaagtacaaatcaattccacaccaccacagaggagaggtgcagttcctgggccgttataagctgctaagatattccaaggagcggcagtacatcgatgggttgaacaacctgatttaccgcccaaaaatcctggtggaccgactgtacactaatatttccgtcaacttaatgcccgaattggcacctatcgaagattattag

SEQ ID NO: 149430 - DNA, 1149 bp, Artificial Sequence
  derived and/or modified sequence
atgagcgtgctgcggcggatgatgcgggtgagcaaccggagcctgctggccttcatcttctttttctccctcagcagctcctgcctttatttcatctatgtggcaccgggaatagccaatacatacctgtttatggtccaggcccgcggcatcatgctcagggaaaatgtcaaaacgatcggccacatgatacgactgtatacaaacaagaactcaaccctgaacggaaccgactacccagaggggaataacagcagcgattacctggtccagaccactacttatcttccagagaattttacatactctccatatctgccatgtcctgagaagctgccctacatgagggggtttctgaacgtgaacgttagtgaagtgagctttgatgaaattcaccagctattctcaaaggatctagatattgaacctggagggcactggcgaccgaaggattgtaagcctagatggaaggtggcagttctcatccctttcagaaaccggcatgagcatttgccaatctttttcctccacttgattccaatgctgcagaaacagagattggagttcgccttttatgtgattgagcagactggcacacagcctttcaacagggccatgctgttcaacgtgggatttaaagaagccatgaaggattccgtttgggattgcgttatcttccatgacgtagaccatctgcctgaaaatgatcggaactactatggctgtggcgaaatgcccaggcatttcgcggctaagttggacaagtacatgtatattctaccctacaaggaattctttggtggggtgtccggacttaccgtagagcagttcagaaaaatcaatggctttcccaacgctttttggggatggggcggcgaggacgatgacctatggaatcgcgtacactacgcaggatacaacgtgacccggcccgagggcgatctaggcaagtataagagcataccacaccaccaccgcggggaagtgcaattcctggggaggtacaaattgcttcggtactctaaggagcgacagtacatagatggtctgaataacttgatctaccgccccaagatcctcgtggaccggctgtacaccaacatctcagtgaacctgatgcccgaacttgctcccatcgaagattactag

SEQ ID NO: 149431 - DNA, 1032 bp, Artificial Sequence
  derived and/or modified sequence
atgagcgtgctgcggcggatgatgcgggtgagcaaccggagcctgttggcattcatctttttcttttctctgagttcaagctgtttatattttatttacgtcgccccaggcatcgccaatacatatctgtttatggtgcaagccagaggcattatgctgagggaaaatgttaagacaatcggtcacatgattcggctatacaccaataagaacagtacacttaacggtactgattacccagaaggtaataactcgagtgactacctggttcagacaactacttatctgcccgagaactttacatacagcccatatctcccttgtccagaaaagctgccctatatgagggggttcctaaatgttaatgtcagcgaggtgagctttgatgaaatccaccaactgttctccaaagacctagacattgaaccgggtggacactggaggcctaaggactgcaagccccgctggaaaactgggacccaaccgtttaatcgggctatgctgtttaatgtgggttttaaggaggctatgaaggactccgtttgggattgtgttatctttcacgatgtggatcacctgcctgaaaatgatcggaattactacggttgcggtgagatgccccggcactttgccgctaaactggacaaatacatgtacatcttaccctacaaagagttcttcggcggagtatcaggattgactgttgaacagttccggaagatcaacgggttcccaaacgccttctggggatggggtggggaagatgatgatctctggaaccgcgtacactatgctgggtacaacgttactagacccgaaggggatctcgggaagtataaaagcatcccccatcaccacagaggcgaggtccagtttctcggccggtataagctgctgcgctactcaaaggagagacaatatattgatggactcaacaacctgatctaccgtcctaaaatcctcgtggatagactgtatactaacatatccgttaatctgatgccggagttggctccgatcgaggattattag

SEQ ID NO: 149432 - DNA, 1032 bp, Artificial Sequence
  derived and/or modified sequence
atgtcggtactgaggagaatgatgagagtttccaataggtctcttctagctttcattttctttttcagtctgtcatcttcttgtctgtatttcatctatgtcgccccaggcatagattatccagagggcaacaattccagcgactatctggtgcagacaaccacgtatctgcctgaaaatttcacctattccccctacctgccatgccccgagaagcttccttacatgaggggattcctgaacgtgaatgtgagcgaagtgtcgttcgatgagatccaccagcttttctctaaggacttagacatagaaccaggaggacactggcgcccaaaggattgtaaacctagatggaaagtggcggtgctgatccccttcagaaacagacatgaacatctccctattttctttctccatctgattcccatgctacagaaacagcgtcttgaatttgcgttctacgtgatcgagcagacgggtacccagccctttaaccgcgctatgctgttcaatgttgggtttaaggaggccatgaaggattcagtctgggactgcgtgattttccacgacgtggatcacctgcccgagaatgaccgtaactactatggctgtggcgagatgccaaggcacttcgctgccaaattggacaagtatatgtacatccttccatataaggaattcttcggaggtgtctctggtctgacagtcgaacagttccgcaaaatcaatggttttccaaacgccttttgggggtggggcggagaggacgacgatctgtggaacagagtccactatgccggatacaacgtgacacgacctgaaggtgatctcggcaaatataagagcatacctcatcaccaccgcggagaggtgcagttcttggggaggtataagctgttgaggtattccaaggaaagacagtacatcgacggcttaaataatttgatctatcgacccaagattttggtggacagactatacacaaatatttcagtgaatcttatgccagagttagcaccaattgaggattattag

SEQ ID NO: 149433 - DNA, 1149 bp, Artificial Sequence
  derived and/or modified sequence
atgagtgtcttgcggaggatgatgagggtgagcaacaggtctctcctggcatttatcttcttcttctcgctgagctcatcctgcctctattttatctacgttgccccagggattgccaatacttatctttttatggttcaggccaggggaattatgctgagagagaatgtgaagacgattggccacatgattcgcctctacacaaacaagaattctacacttaacggtaccgattatcccgagggaaacaactcctctgattatctggtgcagactactacctatctgccagagaatttcacctattccccctacctaccatgcccagagaagctaccctacatgagaggattcctgaatgttaacgtaagcgaagtatcctttgatgaaatccatcaactgttttcaaaggacttggatattgagcctggaggccattggcgccctaaagattgcaaaccacggtggaaggtggccgtccttatcccttttcggaaccgccatgagcatctgccgatctttttcctgcaccttatcccgatgctccagaaacagcgtctcgaattcgccttttatgtgatcgagcagacaggaacacaaccctttaaccgcgctatgctcttcaacgttggctttaaagaagctatgaaagacagcgtttgggactgcgtgattttccatgacgttgatcacttacccgagaatgaccgaaactactatggatgcggggagatgcctaggcacttcgctgccaaactggataagtatatgtatatcctcccctataaagagttcttcggcggagtcagcgggctgactgttgagcaattccggaaaatcaatggattccctaatgccttttggggatggggtggagaagacgacgacctgtggaaccgcgtgcattacgccggatataatgtgactaggcccgaaggcgacctcggcaaatataagtccatacctcaccaccatagaggtgaagtccagttcctcggtcggtataaacttctgcgctactccaaggagcgtcagtatatcgacggactaaacaacctgatttaccgcccaaaaatcttagtggaccgcctgtacacaaacattagcgttaacctgatgccggagctcgcccctatagaagactactag

SEQ ID NO: 149434 - DNA, 1032 bp, Artificial Sequence
  derived and/or modified sequence
atgagtgttctgcggagaatgatgcgggtctcaaatcgatctctgttagcctttattttttttttcagcttaagcagcagctgcctgtatttcatttatgtggccccaggaatcgctaatacatatctgtttatggtccaggctagggggattatgctgcgggagaacgttaagaccattgggcacatgatcagactgtatactaataaaaattcgaccctcaacggcaccgactacccagagggcaacaactctagcgactacctggtacagacgacaacttacctgccggagaacttcacatacagcccttatctaccctgtccggaaaagctgccttatatgaggggcttcctgaatgtgaacgtgtctgaagtctcattcgacgaaattcatcaactgttctctaaggaccttgatatcgagccaggcggacattggaggcccaaggactgcaaacctagatggaaaaccggcacccagcccttcaatcgagctatgctgttcaatgtgggattcaaggaggcaatgaaagacagcgtttgggactgcgtgatattccatgacgtcgatcatttacctgaaaatgatcgcaactactatgggtgcggcgagatgcctcgccatttcgcagctaagttagataagtacatgtacatactcccgtataaagaattctttggcggtgtgagtggtctcactgtcgaacaatttcgtaagattaacggatttccaaatgcgttctgggggtggggaggagaagacgacgatctgtggaatagggtgcactacgccggatataatgttactcgacctgagggagacctgggaaagtataagtctattccacatcaccaccgcggtgaggtgcagttcctcggtaggtataaactcctgcggtatagcaaggaaagacagtatatcgatggcctgaataacctgatctaccgtccaaaaattctagtcgatcggctctacacgaatatttctgttaatttaatgccagaacttgcccctatagaagattattag

SEQ ID NO: 149435 - DNA, 2120 bp, Artificial Sequence
  derived and/or modified sequence
ctcgggccctctccccagagcctccccgcgcggaccccgctgcagtctcggggttctcagcacatttatggaagtttagggcctggacagtggccccgagtccggcctgagagcgcagcctgggctgctggcagggaagaggaagatgtctgtgctcaggcggatgatgcgggtttccaatcgctctctcctcgccttcatcttcttcttctccctctcttcgtcctgtctgtacttcatctatgtggccccaggcatcgattatcccgaaggcaataattcaagtgattatcttgttcaaacaacaacgtatctcccggaaaacttcacatactcaccatacctcccctgtccagaaaagctgccttatatgcgaggattcctcaatgtcaatgtaagcgaagtcagttttgatgaaattcatcaactcttctccaaggatttagatattgagccagggggtcattggaggccaaaagactgtaaacccagatggaaggtggcagttctcattcctttccgtaatcgccatgaacatcttccaatttttttcttacatctgattccaatgctccagaagcagcggctggaatttgcgttttatgtcattgaacagactggcacacaaccttttaaccgtgcgatgcttttcaatgtgggcttcaaagaggccatgaaagacagtgtctgggactgtgtaatcttccacgatgtggatcatctacctgaaaatgaccggaactattacggatgtggagaaatgccacgtcattttgctgcaaagctggataaatacatgtatattcttccatataaagaattttttggtggtgtaagtgggctgacagtggaacaatttagaaagatcaatggttttcctaatgccttctggggatggggaggagaagatgatgacctttggaacagagttcactatgctggatataatgtaaccagaccagagggagacttaggaaaatacaagtcaattcctcatcaccatagaggtgaagtccagtttttaggacggtataaattactaaggtattccaaggagcgtcagtacatcgatggactgaacaatttaatatataggccaaaaatactggttgataggttgtatacaaacatatctgtaaacctcatgccagagttagctccaatcgaagactattaaaagaagtggctgtcgtggcaaggtagaccacaatgctggatcataaacttggagcgcgctcttagtggaggtcagtgattggctgtgtcacagtgcccttttctctgagaagagccagcagtccacagtgtttacagagtgggactatatacagtcacccttctctcacccgtcctccctgctctgagacacacccctgtggcgagcaccgcagaaacgggaagccactacttaagatcggaagttaagagagctccctccgaagagaaaatttttatactaaaatctataatttaattcaagagaatgcttttatttccgtttaaacatattttgtatatatgtgatataaattaatgtgtgcaaattgtttaaaaattagatgtgttgcagttttgcatgtaatcggttatacctttattggacttttatagacattttttatttgcatgaaaaaaactcactaaatttacatcactaaacaaaggttaacccttgtgtgaaatgaaggaactgtcaataattgacagccaactaatacagtaaactgttatactagttttgagctttagacctcagccttttgtgtggaagaagtcacagctttcttaggctttaaaggaaaagaaggaaggacttaaatagcttttcttcctaccgggattacctatgtttttccttgcttgcaatctcatctgattttgctagaaatcacaaccatattgtttatgcatattgcatgagtattaccaagaaaaatcttaaaagttgtgatgtgacatgatataaaggatctctttatgttaaatgtctttccatgtacctctggtgtgtcagggattttgtgcctcaaaaaatgtttccaaggttgtgtgtttatactgtgtattttttttaaattcacggtgaacagcacttttattatttccagttcagaagagcc

SEQ ID NO: 149436 - DNA, 4814 bp, Artificial Sequence
  derived and/or modified sequence
ccggctttcttccgtcctgccgtccccgggcccctagcccccagtcccctctcccccctccacctcttgtccctcggcctccgcgcctcccctcccccgactctctggcctcccattcattccgtccgctccctcccatttcctcttttccgctcgggccctctccccagagcctccccgcgcggaccccgctgcagtctcggggttctcagcacatttatggaagtttagggcctggacagtggccccgagtccggcctgagagcgcagcctgggctgctggcagggaagaggaagatgtctgtgctcaggcggatgatgcgggtttccaatcgctctctcctcgccttcatcttcttcttctccctctcttcgtcctgtctgtacttcatctatgtggccccaggcatcgccaacacatatctctttatggtacaagctcgaggtataatgttgagagaaaatgtgaaaacaataggtcatatgatcaggctgtacacaaataaaaacagtacgctcaacggtacagattatcccgaaggcaataattcaagtgattatcttgttcaaacaacaacgtatctcccggaaaacttcacatactcaccatacctcccctgtccagaaaagctgccttatatgcgaggattcctcaatgtcaatgtaagcgaagtcagttttgatgaaattcatcaactcttctccaaggatttagatattgagccagggggtcattggaggccaaaagactgtaaacccagatggaaggtggcagttctcattcctttccgtaatcgccatgaacatcttccaatttttttcttacatctgattccaatgctccagaagcagcggctggaatttgcgttttatgtcattgaacagactggcacacaaccttttaaccgtgcgatgcttttcaatgtgggcttcaaagaggccatgaaagacagtgtctgggactgtgtaatcttccacgatgtggatcatctacctgaaaatgaccggaactattacggatgtggagaaatgccacgtcattttgctgcaaagctggataaatacatgtatattcttccatataaagaattttttggtggtgtaagtgggctgacagtggaacaatttagaaagatcaatggttttcctaatgccttctggggatggggaggagaagatgatgacctttggaacagagttcactatgctggatataatgtaaccagaccagagggagacttaggaaaatacaagtcaattcctcatcaccatagaggtgaagtccagtttttaggacggtataaattactaaggtattccaaggagcgtcagtacatcgatggactgaacaatttaatatataggccaaaaatactggttgataggttgtatacaaacatatctgtaaacctcatgccagagttagctccaatcgaagactattaaaagaagtggctgtcgtggcaaggtagaccacaatgctggatcataaacttggagcgcgctcttagtggaggtcagtgattggctgtgtcacagtgcccttttctctgagaagagccagcagtccacagtgtttacagagtgggactatatacagtcacccttctctcacccgtcctccctgctctgagacacacccctgtggcgagcaccgcagaaacgggaagccactacttaagatcggaagttaagagagctccctccgaagagaaaatttttatactaaaatctataatttaattcaagagaatgcttttatttccgtttaaacatattttgtatatatgtgatataaattaatgtgtgcaaattgtttaaaaattagatgtgttgcagttttgcatgtaatcggttatacctttattggacttttatagacattttttatttgcatgaaaaaaactcactaaatttacatcactaaacaaaggttaacccttgtgtgaaatgaaggaactgtcaataattgacagccaactaatacagtaaactgttatactagttttgagctttagacctcagccttttgtgtggaagaagtcacagctttcttaggctttaaaggaaaagaaggaaggacttaaatagcttttcttcctaccgggattacctatgtttttccttgcttgcaatctcatctgattttgctagaaatcacaaccatattgtttatgcatattgcatgagtattaccaagaaaaatcttaaaagttgtgatgtgacatgatataaaggatctctttatgttaaatgtctttccatgtacctctggtgtgtcagggattttgtgcctcaaaaaatgtttccaaggttgtgtgtttatactgtgtattttttttaaattcacggtgaacagcacttttattatttccagttcagaagagccaaaaaaaagtatcttcatttaaaaagaaatcaagtcagtttttttaaaagaatgatctatggaagaaaacccaatagtacttataatatacaaatgaattatactattagataagaattaaatattctatttttataaagataaatacttagtagataaaaacaaattttaagtttagttttcagacatagaatttcacttttggaggggacccttgaatgttagtttcattcaaactatattttgtttttttcacttttaagagattatatctctggtgttaattactaaaattttctttctaaaagtataatttaatagaattatcttaaaatacatgatcagtattcagtgcgctgatattataatgtcttctatatgtagtatctaaaagcataatttaatagcattgtcttaaaatacgtgatgagttatttggtgcactgatgccataatgtcttctatatgtaatatcttacatgtttgcatgagtgtcagggctttgtccagttatcttcatatgactgttctctgaaaaaaggtcttactacctgatatcaagtacatatcttaattttggatgaatttttccacagtaaagccgaacagtattcttttttgaaaattagcaattataaagattgtttaaaatatcttgatattttcacaaattttaaacaaaaaattaaatatctataaagtgaatgttcaacaacaatgatgagcaatagaaatctatatatgagaaacgtttggataatatttgcctcaaggattgtttacctaaaacagaactatggttatttatctcagattgtaagttttattttgaagtgtcatttttatggcaatattgataacacaaatgaccacaaactaaatcataaaataattgaatccttacactttgagaaaatggatagcttctgtgttatgataccaaacaaaatattttcatatttatttcttagaactatttccaaaatatttatatttcagtttttttatggtactcgaaaaatcaaaccttctgaaaattatgatatttgtacttcatttgtgtattagttcattttctgtttctattacatagtttttaaagtcaatgaaagagattgagaatgttaacatttgttgatcaatgtggagctgtccacattcggtatcttttcatttttatatatattttacagtttcaagaaaacttagtactactagtatctgccttattttcttaagtctgatgttaatttttgtttcaggagtgagatataaacattttgctttttttcagttttgaaatatagtttgtcatcctgtgaaaaccacctcgtttgctttttgtttgtttgttttgcttttttagtgtagacctaaaattatttttgcctataaacagtgaacttaatatgtttctgtgagagtgacagagctgtgcccgtttatcttcattgtattaattattacataaagattaacaaatacattgcaaatgcaaattataggatgtttggaggatttattaatgagcatgtattgattgcctattccatatccagtgcaatgctaggtatgtctatggaaggagtattattacttcatttctaaacaaatgaagtcaagcaaattgagatctttctgaaattatgaagacatcttctgataacttatctgttgtatttcctagtctcaaagtcaagaaacccgtatatgtggacctagggctaataggaggtccctatggcactaactgggaaaattacatggtgcttttcaactacagaaagaagtaatgactaatgggcctgtctgtagagaagaaaaggagaagagtacacatttgctggaactatatataattcacagtggagatagttaattctttgctaaaactagggttttatgagtattttttaaatctacatttaagtttttgtttttgtgaaaagttattcagtaagaaaactttataatattaagtagatacagttatgtattaaaaatttccttatatacccttttgccagccaagatactgatattttaaaacaaaatggaaaaatgtccaatacaatattctctttctggaggcttcctacaagtgaaagcagattttgtcattttatttggcctttgcttgtctttgatatatttctttatgtgtttttcaaatacatactgttgtagatttattgtcttgtatttgcaagtatgccggttgagagaactaaaatggttatagtattgtttatcagaaagaggaagtgtacttaagattattttatttatttagatgaaaggcttctacataaatgcactgaaataaatgctagtaatttcttgtatcccacttctttttttgcttctcatggaaatgtttgtacttttttatcattgtcttttatgaaatataatgttctaaaga

SEQ ID NO: 149437 - DNA, 1239 bp, Artificial Sequence
  derived and/or modified sequence
atggaagtttagggcctggacagtggccccgagtccggcctgagagcgcagcctgggctgctggcagggaagaggaagatgtctgtgctcaggcggatgatgcgggtttccaatcgctctctcctcgccttcatcttcttcttctccctctcttcgtcctgtctgtacttcatctatgtggccccaggcatcgccaacacatatctctttatggtacaagctcgaggtataatgttgagagaaaatgtgaaaacaataggtcatatgatcaggctgtacacaaataaaaacagtacgctcaacggtacagattatcccgaaggcaataattcaagtgattatcttgttcaaacaacaacgtatctcccggaaaacttcacatactcaccatacctcccctgtccagaaaagctgccttatatgcgaggattcctcaatgtcaatgtaagcgaagtcagttttgatgaaattcatcaactcttctccaaggatttagatattgagccagggggtcattggaggccaaaagactgtaaacccagatggaagactggcacacaaccttttaaccgtgcgatgcttttcaatgtgggcttcaaagaggccatgaaagacagtgtctgggactgtgtaatcttccacgatgtggatcatctacctgaaaatgaccggaactattacggatgtggagaaatgccacgtcattttgctgcaaagctggataaatacatgtatattcttccatataaagaattttttggtggtgtaagtgggctgacagtggaacaatttagaaagatcaatggttttcctaatgccttctggggatggggaggagaagatgatgacctttggaacagagttcactatgctggatataatgtaaccagaccagagggagacttaggaaaatacaagtcaattcctcatcaccatagaggtgaagtccagtttttaggacggtataaattactaaggtattccaaggagcgtcagtacatcgatggactgaacaatttaatatataggccaaaaatactggttgataggttgtatacaaacatatctgtaaacctcatgccagagttagctccaatcgaagactattaaaagaagtggctgtcgtggcaaggtagaccacaatgctggatcataaacttggagcgcgctcttagtggaggtcagtgattggctgtgtcacagtgcccttttctctgagaagagccagcagtccacagt

SEQ ID NO: 149438 - protein, 388 aa, Artificial Sequence
  derived and/or modified sequence
MRARRGLLRLPRRSLLAALFFFSLSSSLLYFVYVAPGIVNTYLFMMQAQGILIRDNVRTIGAQVYEQVLRSAYAKRNSSVNDSDYPLDLNHSETFLQTTTFLPEDFTYFANHTCPERLPSMKGPIDINMSEIGMDYIHELFSKDPTIKLGGHWKPSDCMPRWKVAILIPFRNRHEHLPVLFRHLLPMLQRQRLQFAFYVVEQVGTQPFNRAMLFNVGFQEAMKDLDWDCLIFHDVDHIPESDRNYYGCGQMPRHFATKLDKYMYLLPYTEFFGGVSGLTVEQFRKINGFPNAFWGWGGEDDDLWNRVQNAGYSVSRPEGDTGKYKSIPHHHRGEVQFLGRYALLRKSKERQGLDGLNNLNYFANITYDALYKNITVNLTPELAQVNEY

SEQ ID NO: 149439 - DNA, 1167 bp, Artificial Sequence
  derived and/or modified sequence
atgagagccagaagaggcctgctgagactgcccagaagaagcctgctggccgccctgttcttcttcagcctgagcagcagcctgctgtacttcgtgtacgtggcccccggcatcgtgaacacctacctgttcatgatgcaggcccagggcatcctgatcagagacaacgtgagaaccatcggcgcccaggtgtacgagcaggtgctgagaagcgcctacgccaagagaaacagcagcgtgaacgacagcgactaccccctggacctgaaccacagcgagaccttcctgcagaccaccaccttcctgcccgaggacttcacctacttcgccaaccacacctgccccgagagactgcccagcatgaagggccccatcgacatcaacatgagcgagatcggcatggactacatccacgagctgttcagcaaggaccccaccatcaagctgggcggccactggaagcccagcgactgcatgcccagatggaaggtggccatcctgatccccttcagaaacagacacgagcacctgcccgtgctgttcagacacctgctgcccatgctgcagagacagagactgcagttcgccttctacgtggtggagcaggtgggcacccagcccttcaacagagccatgctgttcaacgtgggcttccaggaggccatgaaggacctggactgggactgcctgatcttccacgacgtggaccacatccccgagagcgacagaaactactacggctgcggccagatgcccagacacttcgccaccaagctggacaagtacatgtacctgctgccctacaccgagttcttcggcggcgtgagcggcctgaccgtggagcagttcagaaagatcaacggcttccccaacgccttctggggctggggcggcgaggacgacgacctgtggaacagagtgcagaacgccggctacagcgtgagcagacccgagggcgacaccggcaagtacaagagcatcccccaccaccacagaggcgaggtgcagttcctgggcagatacgccctgctgagaaagagcaaggagagacagggcctggacggcctgaacaacctgaactacttcgccaacatcacctacgacgccctgtacaagaacatcaccgtgaacctgacccccgagctggcccaggtgaacgagtactag

SEQ ID NO: 149440 - DNA, 1167 bp, Artificial Sequence
  derived and/or modified sequence
atgagagcaaggagagggcttctgagactgccgcgcagatccttgctggcagccctctttttctttagcctcagctcgtcactcctgtattttgtgtatgtggcaccagggatagtaaatacctatctgttcatgatgcaggcccagggcatcctcatccgggataatgtgcgcacaataggggctcaagtttacgaacaggtgctgcgatccgcttacgctaagagaaatagctcagtaaacgactcagattaccctctggatctgaatcacagcgaaacttttttgcagactaccacattcttaccagaagactttacttattttgccaaccacacctgtccagagcgcttaccatcaatgaagggtccaatcgacattaacatgtctgaaattggcatggattacatccacgagctctttagtaaagacccgactatcaagctgggtggtcattggaaaccttctgattgtatgccccgctggaaagtggctattctgatcccttttcggaaccggcatgaacatctgcctgtgctgttccgccatctccttccgatgcttcagcgtcagcgcctccagtttgcattctatgtggtggagcaagtcgggactcaacctttcaacagagctatgctgtttaatgtcgggttccaggaggctatgaaagatctcgactgggattgcctgatcttccacgatgtggaccacatcccagaatctgaccgaaactattacggctgtggacagatgccacggcatttcgccactaagttggacaagtatatgtacctgctgccttataccgagtttttcggaggtgtctctggcttaaccgtggagcagtttcgaaaaatcaacgggtttccaaatgctttttgggggtggggtggagaggacgatgacctgtggaacagggtgcagaacgcgggctattctgtgagccggcctgagggtgacacaggcaagtacaagtctattcctcatcaccacaggggggaagtgcagttcctcggcaggtatgctttgctgaggaaaagtaaagaaaggcaaggattggatggcttgaataatctgaattacttcgcaaatatcacctacgacgcgctctataaaaacataactgtgaacttaacgccagaattggctcaagtaaacgaatattag

SEQ ID NO: 149441 - DNA, 1167 bp, Artificial Sequence
  derived and/or modified sequence
atgagggcccggcggggcctgctgcggctgccccggcgcagcctgctggccgccctcttcttcttcagcctgagcagcagcctgctgtactttgtgtatgtggcccctggcatcgtgaacacctacctgttcatgatgcaggcccagggcatcctgatccgggacaacgtgaggaccatcggggcccaggtgtatgagcaggtgctgcggagcgcctatgccaagaggaacagctctgtgaatgacagcgactaccccctggacctgaaccacagcgagaccttcctgcagaccaccaccttcctgcctgaggacttcacctactttgccaaccacacctgcccagagcggctgcccagcatgaagggccccatcgacatcaacatgtctgagatcggcatggactacatccacgagctgttcagcaaggaccccaccatcaagctgggcggccactggaagcccagcgactgcatgccccgctggaaggtggccatcctgatccccttcaggaacagacatgagcacctgcctgtgctcttccgccacctgctgcccatgctgcagaggcagaggctgcagtttgccttctacgtggtggagcaggtgggcacccagcccttcaacagagccatgctgttcaacgtgggcttccaggaggccatgaaggacctggactgggactgcctgatcttccatgatgtggaccacatccctgagagtgacaggaactactacggctgcggccagatgcccaggcactttgccaccaagctggacaagtacatgtacctgctgccctacacagagttcttcggcggcgtgtctggcctgactgtggagcagttcaggaagatcaatggcttccccaatgccttctggggctggggcggagaagatgatgacctgtggaacagagtgcagaatgccggctacagcgtgtccaggcctgagggggacaccgggaagtacaagagcatcccccaccaccacagaggagaggtgcagttcctgggccgctatgccctgctgaggaagagcaaggagcggcagggcctggatggcctgaacaacctgaactactttgccaacatcacctatgatgccctgtacaagaacatcaccgtgaacctgaccccagagctggcccaggtgaatgagtactag

SEQ ID NO: 149442 - DNA, 1167 bp, Artificial Sequence
  derived and/or modified sequence
atgcgggcccggcggggcctgctgcggctgccccggcggagcctgttggcggctctgttcttcttctccttgtccagtagccttctctattttgtatacgttgcacccgggattgttaatacgtacctctttatgatgcaagcgcaggggatcctgatcagagataacgtgcgcaccattggggcccaggtgtacgagcaagtgctgagatctgcatatgctaagcggaatagtagcgtcaatgattctgactatccgctagacctgaaccactctgaaactttcctgcaaaccacgacctttttacccgaggactttacttacttcgcaaatcatacctgcccagaacgtctgccttccatgaaaggcccgattgatatcaacatgagcgagatcggaatggactatattcacgagctgttttcaaaagaccccaccattaagctgggaggccattggaagccaagcgactgcatgccgagatggaaggtggcaattctgatcccattcaggaaccggcacgagcatctcccagtcctgtttcgccacctacttcccatgctgcagagacaacggctccaattcgctttctatgtagttgaacaagtcggcacccagcccttcaatagagctatgctctttaatgtcggcttccaggaagccatgaaagacctggactgggattgcctgatcttccatgacgtagatcatattcccgaatccgacaggaactactatggttgtggacagatgcctaggcattttgcgaccaagttggataagtatatgtatttgttgccctatacggaatttttcggcggcgtttctggcctgacagtggaacagtttcgcaaaatcaacgggttccccaatgccttctggggctgggggggggaagatgacgacctctggaacagagtccagaatgcaggatactccgtttctcggccagaaggcgacaccgggaaatataaaagcatcccacaccatcacagaggtgaagtgcaatttctcggcagatacgcactcctccgaaagtccaaggaaagacaggggctggatggactcaacaacctgaactatttcgccaatatcacatacgatgctttgtacaagaatataacagttaacctaactccggagctagcccaagttaatgaatactag

SEQ ID NO: 149443 - DNA, 1167 bp, Artificial Sequence
  derived and/or modified sequence
atgagggccagacggggactgctgcgcctgccacgtagaagccttctcgccgcactctttttctttagcttgtcaagtagcttgctgtactttgtgtatgtagcgcctggcatagtcaatacatatttgtttatgatgcaggcgcaagggatcttaattagagacaatgtgcgcacaatcggcgctcaagtctacgaacaggtgctcagatctgcctacgctaagaggaacagcagcgtcaatgattctgactatcccctggatttaaatcacagcgaaacattcctgcaaactacgacgttcctcccagaagacttcacctattttgctaatcacacttgtcctgagaggcttcctagtatgaaggggcctattgacatcaacatgtctgagattggcatggactacatacacgagcttttttctaaagatccgaccataaagctcgggggtcactggaagccgagcgattgcatgccgagatggaaagtagccattcttattccctttaggaaccgccacgagcacttgccagtactgttccggcatcttctcccaatgctccagcgccagcgactgcagttcgcattttacgtcgtggaacaggtcggtacgcagcctttcaaccgggcaatgctgttcaatgttgggttccaggaggctatgaaggatctggactgggactgtctgattttccacgatgtggatcacatacctgagagcgaccgcaactattatggctgcggacaaatgcctaggcatttcgcaacgaagctagataaatacatgtatctgcttccctacacggagttctttggcggagtcagtggattgaccgtcgagcagttcagaaaaatcaacggatttcccaacgctttttgggggtggggcggtgaagatgacgacctgtggaaccgagtccaaaatgccggatactccgtgagtcgcccagagggagatactgggaaatacaaatctattccacatcaccacagaggagaggttcagttcctgggcagatacgcactcctgaggaagtcaaaggagcgccagggcctggatggccttaacaatctgaactatttcgccaacatcacatatgatgccctgtacaagaacatcaccgtgaatctgacaccggagctggctcaggtcaacgagtattag

SEQ ID NO: 149444 - DNA, 4722 bp, Artificial Sequence
  derived and/or modified sequence
atgtggcccggcccgcgacggccggcggctgggagcggcgaggcggcggcggcggcgagtggcggcccgcgaggcccgggaggcggtggccgaggcccaggcggtggcggcggcggcccaggaggcggcggacggggagctgcgggagcaggcccggcctggctctctagcggccgcctggctgcagcatgcgcgcccgccgggggctgctgcggctgccgcgccgctcgctgctcgccgcgctcttcttcttttctctctcgtcctcgctgctgtacttcgtctatgtggcgcccggcatagtgaacacctacctcttcatgatgcaagcccaaggcattctgatccgggacaacgtgagaacaatcggtgctcaggtttatgagcaggtgcttcggagtgcttatgccaagaggaacagcagtgtaaatgactcagattatcctcttgacttgaaccacagtgaaaccttcctgcaaactacaacatttcttcctgaagacttcacctactttgcaaaccatacctgccctgaaagactcccttccatgaagggcccaatagacataaacatgagtgaaattggaatggattacattcatgaactcttctccaaagacccaaccatcaagctcggaggtcactggaagccttctgattgcatgcctcggtggaaggtggcgatccttatccccttccggaaccgccacgagcacctcccagtcctgttcagacacctgcttcccatgctccagcgccagcgcttgcagtttgcattttatgtggttgaacaagttggtacccaaccctttaatcgagccatgcttttcaacgttggctttcaagaggcaatgaaagacttggattgggactgtttgatttttcatgatgtagatcacataccggaaagtgatcgcaactattatggatgtggacagatgccgaggcattttgcaaccaaattggataagtatatgtatctgcttccttataccgagttctttggcggagtgagtggcttaacagtggaacaatttcggaaaatcaatggctttcctaatgctttctggggttggggtggagaagatgacgacctctggaacagagtacagaatgcaggctattctgtgagccggccagagggtgacacaggaaagtacaagtccattcctcatcaccatcgaggagaagtccagtttcttggaaggtatgctctgctgaggaagtcaaaagaacggcaagggctggatggcctcaacaacctgaactactttgcaaacatcacatacgacgccttgtataaaaacataactgtcaacctgacacccgagctggctcaggtgaacgagtactgagaggagagaatgtacgtttgctttacccaccgccaccaagaaagcagtccgatgagatttttttttggaggggggagggtctacacagcaagagaacagaaatactgtgtctcatgaaggatcacagagttcagggggaaaatgtgacagcacacgcacaaacgccttcactggatcagccgctggaactgagggagtgagcttggggacttccttcgtcagcactggctttctgttttcacaagacagacgtctgtcccgctgctctctccccatctcctaccccacatcctgtcttagccgcagtctccagaacccatgatgaactgtgatctgccgtggtcctgccgtggtcctgccgtggagcctgtccctacacatgaccttggagcctcttggccttcagagcagaggcaaacccaccacagggcagctgcgttttaggaagagcaaatgaaactccacaccattcttctagatctctggtgttctctttggtttcatttttttaaaaaattaccttctttgggtggggattgagggtggaggggagggtgtttgggaaagataaatagacataaatatataacaatcacttcttgaagaagtataattgtaaataagccatgtaaaatgcctttttaaaatttaattttctagctggctccaattcaaattgaggatttatgtattaggccacttacttggttggcaagtgcaggaactcagttaaaatgcagttgaagaatgtcatctcccgaattgctgtcactttggcgagggagtggatatagggcatgtcacaaaagaacaaaataacccgacctttattgctgggagctggcttctgtccctttcttcccccccccacgagtcttgcccttgacttctgctctggattcactcttccctgtcggccgcgcatgtgctcatcccactctccgctaagcgggaggctgctgttagagcaggctgcttcctgcctaaagcaggcccttcggggctcgctgcacacacatctctggctctccaggcttcgtgttctgtcttttcatcagcatggcggggcggggggcggggggcgggggtgtgtatgggaatccctccccctcttactttttctcttgtggaacttggccacagtttctgaacaatgtgcctacattaccagctggcttcagtgattcctctgtgtccctttttggtttctggaaagattctttgtcaacattagtaactgatacatagaaccaaggagcactcaaatagggagccaggagccagggagctggtgacacttgtgtgctgtggggcagctgggatccaggtaagaccggattgaagctttgaaattagactaacaaagctccagacagcaagagcccaggtgcactgctcacacccccacctgcattttgaagtcatattattttttgttttgttttttaagacggtctggctctgtcgcctaagctggagtgtggtggcacgatcacagctcactgcagcctccatctcctaggctcaagccattttcccacctcagcctcccgagtagctgggactacaggtgcacaccaccacacctggctaattttttgtatttttagtagagacaggggtttcttccatgttgcccaggctggtctcgaactcctggactcaagcaatccgcccaccttgacttcccaaagtgctgggattatgggcgggtgtgagccattgcgcccagccttgaagtcatgttctaaattgtatttgaatttgtgcctctttgtttttccccaaaccaaagccctcaaattgtagtctctgtcggcttctgcagaattctggaaaatgccagttttcctcccccgcccttgttttccataaaacatatttatatattgtgatgaggagtactttctgaagagtacttcgtatttttttttaattgccttgtttgccttcaacttccttgattttcatagtttacatgggtgtgtgtaggggtgtgtgtgtgtatgtgtgtgggttagggcttttttcgttgcatgtgatggttctgtggacatatgatccccacaaactgtgggagtgattggccaggccttgttttgtttgtttgtttgtttgtgtttttgttcttttgaagaatagagtggtatttagaaaataaattgcattgcaaagctcttatcggctcatatgagagagcaggttcctgcccttgaaaatgccggtaagctatagcatatgttttttaagacttaagcatttcatgctttaaaataccttcacaagtgaacattacacacagaagttcatttggttttcctttgttttatggtgcatatagcaataaagacccccctccaccctgcaacccccatcccccaccgggcctttgtccctgccttggcttttctccccttctcattctcctctcccctttcctcactgaaggctgtgagttgctttcaatgtgacaacactatgatgtcatttggaaggatttgccaggacagactgattctgagtcctgggtgccgtatgtgtatgcggcagtgttgtcaggcgatcttgtttgaagctctatgttgccataattaccatcaagtacacactgttggcaaaaggctaacacctgactttagaaaatgctgatttgagaacaaaaggaaaggtcttttttcactgcttaaagtggggtcactttgatacctttgcggtcatgtctgtgtctgatgagtgtagaatctctggatgtgcactgtcagtcatgtgtccaccaggcctcgaatatcatatgggaaatgtcatagttaaaaacgtacagccaggcccgtgtgctgttaatagtgtgaaattgtcatgttaaaaaaaaaaacaggaaccaaatgtgaccttgtgcatatattggtagctgaaaatcttcaaggctactgatgggtggccccttaatcttgtctttgattgctgtgtgcagggaaaggtgtccccgtttgttcatgctgttttggggggtgggggggtatttgcaagaatactcattttgacataataggtcctcttgtcagagatcctctaccacagacattaatagctgagcaggagccacatggattgattgtatccactcaccattgacgatggcattgagcgtagctagcttatttccatcactacgtgtttttgagcttgctcttacgttttaagaggtgccaggggtacatttttgcactgaaatctaaagatgttttaaaaaacacttttcacaaaaatagtcctttgtcattacattatttactcatgtgtttgtacatttttgtatgttaatttatgaatgattttttcagtaaaaaatacatattcaagaaccaaa

SEQ ID NO: 149445 - protein, 395 aa, Artificial Sequence
  derived and/or modified sequence
MSANATLKPLCPILEQMSRLQSHSNTSIRYIDHAAVLLHGLASLLGLVENGVILFVVGCRMRQTVVTTWVLHLALSDLLASASLPFFTYFLAVGHSWELGTTFCKLHSSIFFLNMFASGFLLSAISLDRCLQVVRPVWAQNHRTVAAAHKVCLVLWALAVLNTVPYFVFRDTISRLDGRIMCYYNVLLLNPGPDRDATCNSRQVALAVSKFLLAFLVPLAIIASSHAAVSLRLQHRGRRRPGRFVRLVAAVVAAFALCWGPYHVFSLLEARAHANPGLRPLVWRGLPFVTSLAFFNSVANPVLYVLTCPDMLRKLRRSLRTVLESVLVDDSELGGAGSSRRRRTSSTARSASPLALCSRPEEPRGPARLLGWLLGSCAASPQTGPLNRALSSTSS

SEQ ID NO: 149446 - DNA, 1188 bp, Artificial Sequence
  derived and/or modified sequence
atgagcgccaacgccaccctgaagcccctgtgccccatcctggagcagatgagcagactgcagagccacagcaacaccagcatcagatacatcgaccacgccgccgtgctgctgcacggcctggccagcctgctgggcctggtggagaacggcgtgatcctgttcgtggtgggctgcagaatgagacagaccgtggtgaccacctgggtgctgcacctggccctgagcgacctgctggccagcgccagcctgcccttcttcacctacttcctggccgtgggccacagctgggagctgggcaccaccttctgcaagctgcacagcagcatcttcttcctgaacatgttcgccagcggcttcctgctgagcgccatcagcctggacagatgcctgcaggtggtgagacccgtgtgggcccagaaccacagaaccgtggccgccgcccacaaggtgtgcctggtgctgtgggccctggccgtgctgaacaccgtgccctacttcgtgttcagagacaccatcagcagactggacggcagaatcatgtgctactacaacgtgctgctgctgaaccccggccccgacagagacgccacctgcaacagcagacaggtggccctggccgtgagcaagttcctgctggccttcctggtgcccctggccatcatcgccagcagccacgccgccgtgagcctgagactgcagcacagaggcagaagaagacccggcagattcgtgagactggtggccgccgtggtggccgccttcgccctgtgctggggcccctaccacgtgttcagcctgctggaggccagagcccacgccaaccccggcctgagacccctggtgtggagaggcctgcccttcgtgaccagcctggccttcttcaacagcgtggccaaccccgtgctgtacgtgctgacctgccccgacatgctgagaaagctgagaagaagcctgagaaccgtgctggagagcgtgctggtggacgacagcgagctgggcggcgccggcagcagcagaagaagaagaaccagcagcaccgccagaagcgccagccccctggccctgtgcagcagacccgaggagcccagaggccccgccagactgctgggctggctgctgggcagctgcgccgccagcccccagaccggccccctgaacagagccctgagcagcaccagcagctag

SEQ ID NO: 149447 - DNA, 1188 bp, Artificial Sequence
  derived and/or modified sequence
atgtctgcgaacgcgactttgaagcccttgtgtcctatcctggagcaaatgagtagactgcagagtcacagtaatacctcgatcaggtatatcgaccacgctgccgttctcctgcacggcctggccagcttgttagggctagtggaaaatggagtgatcttatttgtagttggttgtcgcatgaggcaaacagtagtaacaacctgggtgcttcatctcgccttgagtgatctgctagcctccgccagtttgcccttttttacctactttttggctgtaggccattcttgggaactgggaacaacgttttgcaagctgcacagctccatctttttccttaacatgtttgcaagcggatttttgctctcagcaatttcgctggatagatgccttcaggttgtgcggccagtatgggcccaaaaccaccgcactgtggcggccgcacataaggtatgcttagtactttgggcgttggcagtgctcaacacggtcccgtattttgtgtttcgcgacacgattagccgcctcgacggtcgcatcatgtgttattataatgtgttactcctgaaccctggacccgacagggatgccacctgcaactctaggcaagtggcacttgctgtcagcaagttcctcctcgccttcctggtacccctcgccatcatcgcatcttctcacgccgctgtcagtctgaggctgcagcatcgcggcaggcggcggccaggccggtttgtcaggctggtggctgctgtggtagctgccttcgcgctgtgctggggaccgtatcacgtattctcgctcctggaagctagagcacacgcaaatcctgggcttcgtcctctcgtctggagaggcctccctttcgtcacttcactcgccttttttaactcagttgctaatcccgtactgtatgtcttaacatgccccgacatgcttaggaaacttcgcagaagcttacgtactgtactggagagcgtgttggtggacgactccgaacttggcggcgctggctcttcacgcaggagacgcacatcttccacagcacgctccgcttctcccttggccctgtgctcacgacccgaagagccccggggacctgcccgacttctgggctggttgctgggtagctgcgctgcaagcccacagacaggtccactcaacagagccctttccagcacttcctcatag

SEQ ID NO: 149448 - DNA, 1188 bp, Artificial Sequence
  derived and/or modified sequence
atgtctgccaatgccaccctgaagcccctgtgccccatcctggagcagatgagccggctgcagagccacagcaacaccagcatccgctacatcgaccacgccgctgtgctgctgcacggcctggccagcctgctgggcctggtggagaatggagtcatcctgtttgtggtgggctgcaggatgaggcagacagtggtgaccacctgggtgctgcacctggccctgagtgacctgctggccagcgccagcctgcccttcttcacctacttcctggccgtgggccacagctgggagctgggcaccaccttctgcaagctgcacagcagcatcttcttcctgaacatgtttgccagcggcttcctgctgagcgccatcagcctggaccgctgcctgcaggtggtgcggcctgtgtgggcccagaaccacaggacagtggccgccgcccacaaggtgtgcctggtgctgtgggccctggccgtgctgaacacagtgccctactttgtgttccgggacaccatcagccggctggatggccgcatcatgtgctactacaacgtgctgctgctgaaccctggccctgacagagatgccacctgcaacagccggcaggtggccctggccgtgtccaagttcctgctggccttcctggtgcccctggccatcatcgccagcagccatgctgctgtgtccctgcggctgcagcaccggggcagaagaagacctggccgctttgtgcggctggtggccgctgtggtggccgcctttgccctgtgctggggcccctaccacgtgttcagcctgctggaggcccgggcccacgccaaccctggcctgcggcccctggtgtggaggggcctgccctttgtgaccagcctggccttcttcaacagcgtggccaaccctgtgctgtatgtgctgacctgcccagacatgctgaggaagctgcggcgcagcctgaggacagtgctggagagcgtgctggtggatgattctgagctgggcggggccggcagcagcagaagaagaaggaccagcagcacagcccggagcgccagccccctggccctgtgcagcaggcctgaggagccccggggccctgcccggctgctgggctggctgctgggcagctgtgccgccagcccccagacaggccccctgaacagagccctgagcagcaccagcagctag

SEQ ID NO: 149449 - DNA, 1188 bp, Artificial Sequence
  derived and/or modified sequence
atgagcgccaacgccaccctgaagcccctgtgccccatcctggagcagatgtctcgactccagtcccatagcaatacttccatccgatacatcgatcacgccgctgtgcttctgcacggtctcgcgtcactcctgggccttgttgagaatggcgtaatactgttcgtggtggggtgtcgaatgcgtcagacagtggtaactacctgggttttacatcttgcactgtctgacctgttggcttcagccagtctgccattcttcacttatttcctggctgtcggtcatagttgggagcttgggactaccttttgtaagttacatagtagcattttttttctgaatatgttcgccagcgggttccttttatctgctatctcccttgatcggtgcttgcaggtggtccggcctgtttgggctcagaatcatcgtaccgtggccgcagcgcataaggtatgtttggtgctgtgggctctggccgtactaaacaccgtaccctacttcgtcttcagggacaccataagccggctggatggtcggattatgtgctactacaatgtgcttttgttgaatcctggacctgaccgggacgcgacttgtaacagtcgccaggtggccctcgcagtctcgaagttcttactggcctttctggtcccgctcgccattatcgcctcatcacacgccgcagtatctctgcgtctccagcatcgtggcagaaggagacctggacgctttgtgaggctggtggcagccgtggtggcagcattcgctttgtgctgggggccctatcacgtgttttccctgcttgaagctcgcgcacacgctaatcctggcttgcgaccccttgtgtggcgtggcctgcctttcgtgacgtctctggccttttttaatagcgtggcaaacccagtcctttatgtcttaacttgccccgacatgcttcggaaattgagacgatcactgcgaactgtgctggaaagcgtgttggtggacgacagtgaactcggaggagctggatcctcccgtcgccgcaggacttcgtccacggcacggtccgcaagtcctcttgccctgtgctcgagacccgaggagccgcgcgggcccgcgagactgctcggatggcttctgggttcgtgcgccgcctctccacagacaggtccactgaatagagcgctttcaagcacctcctcctag

SEQ ID NO: 149450 - DNA, 2895 bp, Artificial Sequence
  derived and/or modified sequence
cagcctccctctcccacctctgtctgcccgctgcctcttgtctagctgctgtcaggagctgactgcctccagggctggaatcctgtgctccctctgtgcccagagccccacgatgtcggccaacgccacactgaagccactctgccccatcctggagcagatgagccgtctccagagccacagcaacaccagcatccgctacatcgaccacgcggccgtgctgctgcacgggctggcctcgctgctgggcctggtggagaatggagtcatcctcttcgtggtgggctgccgcatgcgccagaccgtggtcaccacctgggtgctgcacctggcgctgtccgacctgttggcctctgcttccctgcccttcttcacctacttcttggccgtgggccactcgtgggagctgggcaccaccttctgcaaactgcactcctccatcttctttctcaacatgttcgccagcggcttcctgctcagcgccatcagcctggaccgctgcctgcaggtggtgcggccggtgtgggcgcagaaccaccgcaccgtggccgcggcgcacaaagtctgcctggtgctttgggcactagcggtgctcaacacggtgccctatttcgtgttccgggacaccatctcgcggctggacgggcgcattatgtgctactacaatgtgctgctcctgaacccggggcctgaccgcgatgccacgtgcaactcgcggcaggtggccctggccgtcagcaagttcctgctggccttcctggtgccgctggcgatcatcgcctcgagccacgcggccgtgagcctgcggttgcagcaccgcggccgccggcggccaggccgcttcgtgcgcctggtggcggccgtcgtggccgccttcgcgctctgctgggggccctaccacgtgttcagcctgctggaggcgcgggcgcacgcaaacccggggctgcggccgctcgtgtggcgcgggctgcccttcgtcaccagcctggccttcttcaacagcgtggccaacccggtgctctacgtgctcacctgccccgacatgctgcgcaagctgcggcgctcgctgcgcacggtgctggagagcgtgctggtggacgacagcgagctgggtggcgcgggaagcagccgccgccgccgcacctcctccaccgcccgctcggcctcccctttagctctctgcagccgcccggaggaaccgcggggccccgcgcgtctcctcggctggctgctgggcagctgcgcagcgtccccgcagacgggccccctgaaccgggcgctgagcagcacctcgagttagaacccggcccacgtagggcggcactcacacgcgaaagtatcaccagggtgccgcggttcaattcgatatccggactcctgccgcagtgatcaaagtccgaggggcgggacccaggcacctgcattttaaagcgccccgggagactctgaatctttttcagaaacagtgagttaaagcagtgcttctcaaaccttgatgtgcctgtgaatcacctaggggtcttgttaagtgcagtctgatccaggaggccggggccgggtactgagagtctgcacttaacaagctcccaggccgagaagccagtgcggcaggttcacaggcgaggcctggagtaacacaaagtgaaactcataatagacttcccactctagggcagtggagtcggaagggcacacggggtgcgtctccccggagttcagttttaccagatgatgggggaggggggaaggagttttatgttaaaccatccatgtatttttggagaagagagaggaaaggtttgagaagcactgttccagcctgccctcttcatttagccaatgcttactgcgctagacgcttcatcccacaatcttaaggggcagcttctattagccagtctttacagctgagcacattctggctcagggaggttaagtgacttgcccagtttcagggctaacgaccacagggtctgcactctaaccctaggcatcacatgctcaatgactctctggtgagcgaggacattctctgacctactcgagggacttaagatgctaccttgtgacccagcactgcccaaagtgcttccaaggcagaagcagcaggggatggcgtggtcaagcactcgggaaacctggggctaatcaaatccaatgggggaaatgactaaaagtcttcggtcgttagaagttgaatgggcacagcaactctaagactacagcacacgtcatttcttagctaagcggaccagcctccctgtcggcctggtgttctgtgggatccctctgggcactggtaatcccaagatctgtgcagccccgcctccaggccacatggggctgggcagctaccatttcccttttgcggatgggaggggtaacttgcacctctgacctatcacttccactgcaccccgtctcattcctccacctgccgtggacttggggtcagagactgctgtgtttgagctctgcagcccagggaccgaaaagttggtgtcaatgaattttgcttggtggatgaaatgtcagtggaagaagcagatgagaaactcttgagatcttggtcctgtgttttttctgccaccaaaggccagggtcactgaaggcctggcccacagcaggtgctgagcaaagggaacagtgaggtgcccagctagctgcagagccaccctgtgttgacacctcgcccctgctccctcccatcccttccccctttactcatagcacttcccccattggacacgtggtgcattttgcttgtttattatgttttctctccatcagaatgaaagctcctcgagggcagggactttggtctattgtctgtatttgccggtgcctaggattgtgcctgtatgcaacaggcactcaataaatatttttgctgta

SEQ ID NO: 149451 - DNA, 1188 bp, Artificial Sequence
  derived and/or modified sequence
atgtcggccaatgccacactcaaaccgttatgcccaatattggaacagatgtcaagactgcagagccattccaatacttctattcgatacattgatcacgccgctgtactgctgcatggcctggcttcattactcggcctggtggaaaacggagtgatcctgttcgtagtgggatgtaggatgcgccagaccgtggtgactacctgggtactccacttggccctctctgacctgctggcttctgcctcacttcccttctttacatattttctggctgtgggtcattcctgggagctggggactacattctgtaagctgcactcatctatttttttcctgaacatgtttgcttcaggcttcctgctctcggcaattagcctggataggtgtctccaggtagtgcgtccagtctgggctcagaatcaccggaccgtggcagcagcccacaaggtgtgcttggtgttgtgggccttggccgtcctcaacaccgtgccatactttgttttcagggataccatcagtaggctcgatggcaggatcatgtgttactataacgtcctccttttaaacccaggccctgatcgagatgcaacttgcaactctcgacaggttgccttagcagtctctaagttcttgttggcattcctggtgcccttggccatcattgctagcagccacgcggcagtttcccttcggctgcagcacagagggcgaagaagacctggccgatttgtgagattagtggcggcagtcgtggctgcctttgcactgtgctggggcccatatcatgtgtttagcctcctcgaagccagagctcatgctaatccgggtctccgtcccctcgtctggcggggtctgccatttgttaccagcctggccttttttaactcagtcgctaatcccgtcctctatgttctaacttgtcccgacatgctccggaaactgagaagaagtctgcgtacggtgctggaaagcgtgctcgttgacgacagtgagttgggaggagccggttccagtaggagacgcaggacttcaagtactgccagatctgcatcccctctcgctttgtgttctaggcctgaagaacccagaggccctgccagactcctgggctggctgctggggagctgtgccgctagtccccagaccggaccgttaaacagggctttatctagtaccagctcttag

SEQ ID NO: 149452 - protein, 292 aa, Artificial Sequence
  derived and/or modified sequence
MPAALVENSQVICEVWASNLEEEMRKIREIVLSYSYIAMDTEFPGVVVRPIGEFRSSIDYQYQLLRCNVDLLKIIQLGLTFTNEKGEYPSGINTWQFNFKFNLTEDMYSQDSIDLLANSGLQFQKHEEEGIDTLHFAELLMTSGVVLCDNVKWLSFHSGYDFGYMVKLLTDSRLPEEEHEFFHILNLFFPSIYDVKYLMKSCKNLKGGLQEVADQLDLQRIGRQHQAGSDSLLTGMAFFRMKELFFEDSIDDAKYCGRLYGLGTGVAQKQNEDVDSAQEKMSILAIINNMQQ

SEQ ID NO: 149453 - protein, 118 aa, Artificial Sequence
  derived and/or modified sequence
MPAALVENSQVICEVWASNLEEEMRKIREIVLSYSYIAMDTEFPGVVVRPIGEFRSSIDYQYQLLRCNVDLLKIIQLGLTFTNEKGEYPSGINTWQFNFKFNLTEDMYSQDSIDLLAN

SEQ ID NO: 149454 - protein, 55 aa, Artificial Sequence
  derived and/or modified sequence
MPAALVENSQVICEVWASNLEEEMRKIREIVLSYSYIAMDTEFPGVVVRPIGEFR

SEQ ID NO: 149455 - protein, 119 aa, Artificial Sequence
  derived and/or modified sequence
MPAALVENSQVICEVWASNLEEEMRKIREIVLSYSYIAMDTEFPGVVVRPIGEFRSSIDYQYQLLRCNVDLLKIIQLGLTFTNEKGEYPSGINTWQFNFKFNLTEDMYSQDSIDLLANS

SEQ ID NO: 149456 - protein, 133 aa, Artificial Sequence
  derived and/or modified sequence
MPAALVENSQVICEVWASNLEEEMRKIREIVLSYSYIAMDTEFPGVVVRPIGEFRSSIDYQYQLLRCNVDLLKIIQLGLTFTNEKGEYPSGINTWQFNFKFNLTEDMYSQDSIDLLANSGLQFQKHEEEGIDT

SEQ ID NO: 149457 - protein, 186 aa, Artificial Sequence
  derived and/or modified sequence
MYSQDSIDLLANSGLQFQKHEEEGIDTLHFAELLMTSGVVLCDNVKWLSFHSGYDFGYMVKLLTDSRLPEEEHEFFHILNLFFPSIYDVKYLMKSCKNLKGGLQEVADQLDLQRIGRQHQAGSDSLLTGMAFFRMKELFFEDSIDDAKYCGRLYGLGTGVAQKQNEDVDSAQEKMSILAIINNMQQ

SEQ ID NO: 149458 - protein, 128 aa, Artificial Sequence
  derived and/or modified sequence
MVKLLTDSRLPEEEHEFFHILNLFFPSIYDVKYLMKSCKNLKGGLQEVADQLDLQRIGRQHQAGSDSLLTGMAFFRMKELFFEDSIDDAKYCGRLYGLGTGVAQKQNEDVDSAQEKMSILAIINNMQQ

SEQ ID NO: 149459 - protein, 269 aa, Artificial Sequence
  derived and/or modified sequence
MRKIREIVLSYSYIAMDTEFPGVVVRPIGEFRSSIDYQYQLLRCNVDLLKIIQLGLTFTNEKGEYPSGINTWQFNFKFNLTEDMYSQDSIDLLANSGLQFQKHEEEGIDTLHFAELLMTSGVVLCDNVKWLSFHSGYDFGYMVKLLTDSRLPEEEHEFFHILNLFFPSIYDVKYLMKSCKNLKGGLQEVADQLDLQRIGRQHQAGSDSLLTGMAFFRMKELFFEDSIDDAKYCGRLYGLGTGVAQKQNEDVDSAQEKMSILAIINNMQQ

SEQ ID NO: 149460 - DNA, 2550 bp, Artificial Sequence
  derived and/or modified sequence
ggagcagatccggggtagagggaaaagagctccgggccaggggctgccgtcgccgccgtcggggagtcagcccgccagcccgccagctcgtcagcccgccagccagcgcttcgcgggccctgtcggtcccggtaagcgggcctgcgcttaccggaaagaggagcgtaagatgaaagagtatcagaccaaacattgtctggcttgcactgtaaaactagttagctgaagacgacttctcaggtttcttcaggatgcctgcagcacttgtggagaatagccaggttatctgtgaagtgtgggccagtaatctagaagaagagatgaggaagatccgagaaatcgtgctcagttacagttatattgccatggacacagaatttccaggtgttgtggtgcgaccaattggtgaatttcgtagttccatagattaccaatatcagcttctgcggtgcaatgttgaccttttaaaaattatccagctgggccttacattcacaaatgagaagggagagtatccttctggaatcaatacttggcagttcaatttcaaatttaaccttacagaggacatgtactcccaggattccatagatctccttgctaactcaggactacagtttcagaagcatgaagaggaagggattgacacactgcactttgcagagctgcttatgacatcaggagtggttctctgtgacaatgtcaaatggctttcatttcatagtggctatgattttggctatatggtaaagttgcttacagattctcgtttgccagaagaggaacatgaattctttcatattctgaaccttttcttcccatccatttatgatgtgaaatacctgatgaagagctgcaaaaatcttaagggaggtcttcaggaagttgctgatcagttggatttgcagaggattggaaggcagcaccaggcaggctcagactcactgctgacaggaatggctttctttaggatgaaagagttgttttttgaggacagcattgatgatgccaagtactgtgggcggctctatggcttaggcacaggagtggcccagaagcagaatgaggatgtggactctgcccaggagaagatgagcatcctggcgattatcaacaacatgcagcagtgatggcgccaggctctgcagggtgggcctgatcccagagtggtgcttactgtgctgactgtgtacttatcttccccaagagaaaatgcttcttttgagcacactgtacctaccatctgcattgagcagaaagacttttgttttactgaagacaaaagatgtttttattttagacccagaagagaggagtttgctctgaatttgtaaataagtcttccccattcctcatactcgagcctctcctctctggttgcctcctgccaccagcatccatggctcatttgacacctttttaaatatcaggacaagtctgaaacaaagtagtaaaatgtatataactcttacctgttgtcattctttttcttttaaatttgttgctaatctctgataatgaagattcttactctgattctcagctgagctgtgagggcttccagggaaaatggaacaaaatggtgttcttaggtaatgggttgtagatactgagtcttcctttccttttctgacccttctcgaggacatttgctttcctcacacttttgtagtctctctttacatattactatatggaaatgaattgctctgtgctgaaatttgaagaccagataatgaaactgaaaagcaaacaattttactgaatctgtctacccttcattcatgagaactccagaatgagtgttgaccactgaagcatcttttaagtctgtgttccattgtgccattcaggtttgctgtcacatatgcatcatctgaaatcatttgaaatttttgtacaataaaatatcctggatttgatcctgaaggaaactagtaagatcagatttttgggtcatgtctgttgtattttcagtaatgtgatttcagatggtcatctggattctcccacttctctactccattatttctctacttttccttccagcaaacctgaaacgtgagggagatggattaatgtgagtaacaggaatgtgtctttaaaaagctagagtggttacatttaatcaggcagtaagataatttgggttcttgagttgttttggagtaatatcccacaactggggtaggaagctcaggacttttttctttaaagctagtcatttcaaaagcatattgtatttttttgaatgactacagtatggacaatttcaaaaaccaaaacccactttggattggtggaagtaaaaactggtaactcactcaagtgaatgaatggtcttgcattttaaaagcttatgggaaactcaatttgaaatgattagaaaatgtcaagtattataagctggtatttaagatgcttgtaaatactatttatgtttttaattttgtaaaataaagatttctttttaaccactggcaaaaaaaaaaaaaaaaaaaaaaaaaaaaaaaaaaaaaaaaaaaaaaaaaaaaaaaaaaaaaaaaaaaa

SEQ ID NO: 149461 - DNA, 879 bp, Artificial Sequence
  derived and/or modified sequence
atgcctgctgccttggtcgagaacagccaggtaatttgtgaagtgtgggcgtccaacctagaagaggagatgcggaagatccgcgaaatcgttctctcttattcatatatcgccatggacacggagtttcccggtgtggtggtgaggcccatcggagagttcaggtcttcaatcgattatcagtaccagctgctgcgatgtaatgttgatctgctcaagatcattcagttgggcctgacatttaccaatgaaaaaggggagtatccttccgggattaatacttggcaattcaactttaagttcaacctgactgaggacatgtattctcaggactcaatcgacctgttagctaacagtggtctgcagttccagaagcatgaagaggagggaatcgacaccctgcattttgcagaacttttgatgacctcaggggtggtgctatgtgataacgtaaagtggctgtccttccatagtgggtacgacttcggctatatggttaaactacttacagatagcaggttgccggaagaggagcacgaatttttccacattctgaatctcttttttccttccatctacgacgtgaagtatctgatgaagtcgtgtaagaacctaaagggaggcctgcaagaagtcgctgaccaactggacctacagcgaattggtaggcagcaccaggccgggtcagattcattactgaccgggatggcatttttccgtatgaaggaactgttcttcgaagactccatcgacgacgctaagtattgcggaagactgtacggcttgggcacaggggtggctcagaagcaaaatgaagacgttgactccgcccaggagaagatgagcattttggccattatcaacaacatgcagcagtag

SEQ ID NO: 149462 - DNA, 879 bp, Artificial Sequence
  derived and/or modified sequence
atgcctgctgcactggtggagaactcacaagtgatatgcgaggtgtgggcatctaacctggaggaggagatgaggaagatacgcgagatcgtgctatcctactcatacatcgctatggacactgaattcccgggggtggtggtgaggcccattggggaattccggtcctcaattgactaccagtaccagctgttaagatgtaacgtggatctgctcaagataatccagctggggttgacatttaccaacgagaagggagagtatcccagcggcatcaatacttggcaatttaacttcaaattcaatctgactgaggacatgtactctcaagacagcattgacctcctggccaatagcggcctgcagtttcagaagcacgaagaagaagggatcgatactctgcacttcgccgagctactcatgacatccggcgttgtgttgtgcgataacgtcaagtggctgtccttccacagcgggtacgatttcggctacatggtcaaattgctgaccgactcccgactgccagaagaagagcatgagttcttccacattcttaacttattcttcccctctatttatgatgtcaaatacctgatgaagagctgtaagaatctaaaagggggactccaggaggtggcagaccagctcgatctccagagaattggtcggcagcaccaggctgggtcggacagcctactgaccggcatggcattttttagaatgaaagagcttttctttgaggactcaatcgacgacgctaagtactgcggaaggttatacggtctcggtaccggagtggcgcagaagcagaacgaggacgtagatagtgcgcaggaaaaaatgtcgatcctagccatcatcaataatatgcaacagtag

SEQ ID NO: 149463 - DNA, 357 bp, Artificial Sequence
  derived and/or modified sequence
atgcccgccgctctggtggagaactctcaggtcatttgcgaggtgtgggcaagcaacctcgaggaggagatgcggaagatcagggagatagtgctatcgtacagctatattgccatggacactgagtttcctggggtggtggtgcgacccatcggagagttccgttcctctatcgactaccaatatcagcttcttaggtgcaacgttgacctgctgaagatcattcaactcgggctgacatttaccaatgaaaagggagagtacccgtcaggcatcaacacttggcagttcaattttaaattcaacctcaccgaggacatgtatagccaggacagcattgacttgctggcaaattag

SEQ ID NO: 149464 - DNA, 879 bp, Artificial Sequence
  derived and/or modified sequence
atgcctgcagcactcgtcgaaaattctcaagttatttgtgaagtgtgggcctccaatcttgaggaagaaatgcgcaagatccgcgagatagtgctgtcctattcttatatcgcaatggacacagagttcccgggcgtggtcgtgcgccccataggagagtttagaagttcgatagattatcagtaccagcttctgagatgcaacgtggatctgctgaaaattatccagttgggtctcactttcacaaacgagaagggcgagtatccttccggaataaacacttggcagttcaatttcaagtttaacctgactgaagacatgtattcacaggacagcattgacctgctcgccaactcaggcctccagttccaaaagcatgaggaagagggcatcgacaccctccactttgccgaactcctgatgacaagcggagttgtcctttgtgataatgtgaagtggcttagctttcacagcggctacgactttggatatatggtcaagctcctgaccgattccagactgcccgaagaggagcatgagttctttcatatccttaacctgttcttcccttctatatatgacgttaagtacttaatgaaatcatgtaaaaacctcaaggggggcttacaggaggtggccgatcagctcgatttacagcgtataggcaggcagcatcaggctgggtcagattcactgctcactggcatggctttcttccggatgaaggaattgtttttcgaagattctattgacgacgcaaaatattgtggccggctctatggcctcgggactggcgtagctcagaaacagaacgaagacgtggactctgcccaggaaaaaatgtcaatcctcgctataatcaataatatgcagcaatag

SEQ ID NO: 149465 - DNA, 360 bp, Artificial Sequence
  derived and/or modified sequence
atgcccgctgccctcgtggagaactctcaggtgatttgcgaggtctgggccagcaatctcgaggaggagatgaggaaaatccgcgaaattgtcctctcatactcatacatcgcgatggacacagaattccctggggtagtggtacgcccaataggtgaatttcgaagttcaatagattatcagtaccaactgctgaggtgcaacgtagacctattgaagatcatccaactgggactcactttcactaatgagaagggcgaatacccatcaggcatcaacacctggcagttcaattttaaatttaacctgacggaggatatgtatagtcaggattctatagatctacttgccaactcctag

SEQ ID NO: 149466 - DNA, 402 bp, Artificial Sequence
  derived and/or modified sequence
atgcctgctgccctcgtggagaactcccaggtgatctgcgaggtttgggcctcaaaccttgaagaagagatgcgcaaaatccgggagatcgtcctgagctactcctacatcgccatggataccgagttccccggagtagttgtgcggcccataggcgaattcagaagcagcatcgactaccagtaccaactactaaggtgcaatgtggatctactcaagataattcagctgggtcttaccttcacgaatgaaaagggcgagtaccctagtggtattaacacttggcagtttaacttcaaatttaatctgacggaggacatgtactctcaggacagtattgatctgcttgcaaattccgggcttcagttccaaaaacacgaggaagaaggcatagacacatag

SEQ ID NO: 149467 - DNA, 810 bp, Artificial Sequence
  derived and/or modified sequence
atgaggaaaatccgggaaatcgtgctcagctattcatatattgccatggacactgagtttcctggcgtggtagtcagaccaataggcgagtttcggagctcgatcgactaccaatatcaactgcttaggtgtaacgtagatctgctgaagatcatccagctcggactcactttcaccaacgagaagggggagtacccatctggaattaacacctggcaatttaacttcaagtttaacctcaccgaggacatgtactctcaggattcaattgacctgctggccaattctgggctgcagttccagaagcatgaagaggagggaatagacaccctgcatttcgccgaactgctcatgacgtctggcgtggttctatgtgataacgtcaagtggctgtcattccatagcgggtacgacttcggatatatggtgaaattgcttaccgactctcggctgcctgaagaagagcacgaattcttccacattctaaacctcttcttcccaagcatttacgacgtgaagtacctgatgaaatcttgtaaaaatctcaaaggcggattgcaggaggtggctgaccagctggatcttcagagaatcggacggcagcaccaggcaggctccgatagcctgcttacaggcatggctttctttcgaatgaaggaattattcttcgaagactctattgacgacgctaagtattgcggccgtttatacgggctcggcaccggtgtggcacaaaaacagaacgaagatgtcgatagtgcccaggagaaaatgtctatcctggcaatcatcaacaacatgcagcagtag

SEQ ID NO: 149468 - DNA, 879 bp, Artificial Sequence
  derived and/or modified sequence
atgcctgctgccctggtggagaacagccaggtgatctgtgaggtgtgggccagcaacctggaggaggagatgaggaagatccgggagatcgtgctgagctacagctacatcgccatggacacagagttccctggggtggtggtgcggcccatcggggagttccgcagcagcattgactaccagtaccagctgctgcgctgcaatgtggacctgctgaagatcatccagctgggcctgaccttcaccaatgaaaaaggagagtaccccagcggcatcaacacctggcagttcaacttcaagttcaacctgacagaggacatgtacagccaggacagcattgacctgctggccaacagcggcctgcagttccagaagcatgaggaggagggcatcgacaccctgcactttgctgagctgctgatgaccagcggcgtggtgctgtgtgacaacgtgaagtggctgtccttccacagcggctatgactttggctacatggtgaagctgctgacagacagccggctgcctgaggaggagcacgagttcttccacatcctgaacctcttcttccccagcatctatgatgtgaagtacctgatgaagagctgcaagaacctgaagggcggcctgcaggaggtggccgaccagctggacctgcagagaattggccggcagcaccaggccggcagtgacagcctgctgaccggcatggccttcttcaggatgaaggagctgttctttgaagattccattgatgatgccaagtactgcggccgcctgtatggcctgggcaccggggtggcccagaagcagaatgaagatgtggacagcgcccaggagaagatgagcatcctggccatcatcaacaacatgcagcagtag

SEQ ID NO: 149469 - DNA, 357 bp, Artificial Sequence
  derived and/or modified sequence
atgcctgctgccctggtggagaacagccaggtgatctgtgaggtgtgggccagcaacctggaggaggagatgaggaagatccgggagatcgtgctgagctacagctacatcgccatggacacagagttccctggggtggtggtgcggcccatcggggagttccgcagcagcattgactaccagtaccagctgctgcgctgcaatgtggacctgctgaagatcatccagctgggcctgaccttcaccaatgaaaaaggagagtaccccagcggcatcaacacctggcagttcaacttcaagttcaacctgacagaggacatgtacagccaggacagcattgacctgctggccaactag

SEQ ID NO: 149470 - DNA, 360 bp, Artificial Sequence
  derived and/or modified sequence
atgcctgctgccctggtggagaacagccaggtgatctgtgaggtgtgggccagcaacctggaggaggagatgaggaagatccgggagatcgtgctgagctacagctacatcgccatggacacagagttccctggggtggtggtgcggcccatcggggagttccgcagcagcattgactaccagtaccagctgctgcgctgcaatgtggacctgctgaagatcatccagctgggcctgaccttcaccaatgaaaaaggagagtaccccagcggcatcaacacctggcagttcaacttcaagttcaacctgacagaggacatgtacagccaggacagcattgacctgctggccaacagctag

SEQ ID NO: 149471 - DNA, 402 bp, Artificial Sequence
  derived and/or modified sequence
atgcctgctgccctggtggagaacagccaggtgatctgtgaggtgtgggccagcaacctggaggaggagatgaggaagatccgggagatcgtgctgagctacagctacatcgccatggacacagagttccctggggtggtggtgcggcccatcggggagttccgcagcagcattgactaccagtaccagctgctgcgctgcaatgtggacctgctgaagatcatccagctgggcctgaccttcaccaatgaaaaaggagagtaccccagcggcatcaacacctggcagttcaacttcaagttcaacctgacagaggacatgtacagccaggacagcattgacctgctggccaacagcggcctgcagttccagaagcatgaggaggagggcatcgacacctag

SEQ ID NO: 149472 - DNA, 810 bp, Artificial Sequence
  derived and/or modified sequence
atgaggaagatccgggagatcgtgctgagctacagctacatcgccatggacacagagttccctggggtggtggtgcggcccatcggggagttccgcagcagcattgactaccagtaccagctgctgcgctgcaatgtggacctgctgaagatcatccagctgggcctgaccttcaccaatgagaagggggagtaccccagcggcatcaacacctggcagttcaacttcaagttcaacctgacagaggacatgtacagccaggacagcattgacctgctggccaacagcggcctgcagttccagaagcatgaggaggagggcatcgacaccctgcactttgctgagctgctgatgaccagcggcgtggtgctgtgtgacaacgtgaagtggctgtccttccacagcggctatgactttggctacatggtgaagctgctgacagacagccggctgcctgaggaggagcacgagttcttccacatcctgaacctcttcttccccagcatctatgatgtgaagtacctgatgaagagctgcaagaacctgaagggcggcctgcaggaggtggccgaccagctggacctgcagagaattggccggcagcaccaggccggcagtgacagcctgctgaccggcatggccttcttcaggatgaaggagctgttctttgaggacagcattgatgatgccaagtactgcggccgcctgtatggcctgggcactggagtggcccagaagcagaatgaagatgtggacagcgcccaggagaagatgagcatcctggccatcatcaacaacatgcagcagtag

SEQ ID NO: 149473 - DNA, 879 bp, Artificial Sequence
  derived and/or modified sequence
atgcccgccgccctggtggagaacagccaggtgatctgcgaggtgtgggcctctaacctggaggaagaaatgcgcaaaatcagggagattgtgctgtcctactcctacattgcgatggatacggaatttcctggagttgtagtgcggcctataggagagttccgctcaagcatcgattatcagtatcaacttctcagatgtaatgtagacctgttaaagatcattcaattgggactcacattcactaatgagaaaggcgaatacccctctgggattaacacatggcaattcaacttcaagttcaacctgaccgaagacatgtactcacaggattccatcgacttgctggctaactccggtctgcaattccagaagcacgaggaagaaggaattgatacccttcactttgccgagttactgatgacctcaggggttgtcctgtgtgacaacgtcaagtggctaagcttccacagtgggtatgactttggttatatggtgaagttgctgacggacagcagactgcccgaagaggagcacgagttctttcatatcctgaatctgtttttcccatccatttatgacgtgaagtacctcatgaagtcctgcaaaaatttaaagggcggactccaggaggtagccgaccaactggacctacagcgaatcgggcgtcagcatcaggcaggtagtgattctctattgactggtatggctttttttcggatgaaggaactgttctttgaggattccatcgacgatgcaaagtactgtgggaggttatacggactcgggactggagtggcccagaaacaaaacgaagacgtggactctgcccaggaaaaaatgtcaatcctggccatcataaacaacatgcagcagtag

SEQ ID NO: 149474 - DNA, 879 bp, Artificial Sequence
  derived and/or modified sequence
atgcccgccgccctggtggagaacagccaggtgatctgcgaggtgtgggcttcaaacctggaggaagaaatgagaaaaatcagagagatcgtgctgtcttacagctatatagctatggacaccgaatttccgggcgtggtcgttagaccgattggggagtttcgctcctccatcgactatcagtaccaactgctgaggtgcaatgtggatttattgaagataatccagctcggtctcacgtttacaaacgaaaagggcgaatatccatctggaatcaatacttggcaattcaatttcaaattcaacctgacggaggatatgtattcccaggactcaatcgacctgctggccaattccggactacagttccagaagcacgaggaagaaggaatcgacactttacacttcgccgaattgcttatgacatccggggtggtcctgtgcgataacgtcaaatggttgtctttccactccgggtacgactttggatacatggtcaaactgctgaccgacagtaggctgcccgaagaggagcacgaatttttccacatactcaatttgttcttcccatctatatatgacgtcaagtacctcatgaaaagctgcaagaatttaaaaggcggcctgcaagaggtggccgaccagctggacttgcagaggataggacggcagcatcaggcaggatccgatagcctgctcaccggaatggctttcttcaggatgaaagaactgtttttcgaagacagcatcgacgacgccaagtactgcggtcggctttatggcctcggtaccggagtcgcgcagaagcaaaatgaggatgtcgacagcgcccaggagaagatgtctatcttggctatcatcaacaacatgcagcagtag

SEQ ID NO: 149475 - DNA, 357 bp, Artificial Sequence
  derived and/or modified sequence
atgcccgccgccctggtggagaacagccaggtgatctgcgaggtgtgggcctcgaatctggaggaggagatgaggaagatcagagaaatcgtgctgtcgtactcctacatcgctatggatacagaatttcccggagttgtagtgagaccgattggcgaatttcgtagcagcattgattatcagtaccagttgctgaggtgtaacgtcgacctgctgaaaattatacagttgggcctcaccttcactaacgagaaaggcgagtatccatcgggaattaacacttggcagtttaacttcaagttcaacctgacggaagacatgtactcccaggacagtatcgatctgctagccaattag

SEQ ID NO: 149476 - DNA, 879 bp, Artificial Sequence
  derived and/or modified sequence
atgcccgccgccctggtggagaacagccaggtgatctgcgaggtgtgggctagtaatttagaggaggagatgcgcaagataagggagatcgtcttatcctatagttacattgcaatggatacagagtttcccggggtggtcgtccgacccatcggggagtttaggagtagcattgattaccagtatcagctgttacgctgtaatgtcgacttgcttaagataatccagctcggcctgacatttacgaatgagaagggtgaatacccatctgggattaatacttggcagttcaatttcaagttcaacctcacagaagatatgtacagtcaggattccattgatttattggcaaattcaggcttacagttccagaaacacgaggaagagggaatcgacaccctacacttcgccgagctcctgatgacaagcggagtggtgctgtgcgacaacgtgaagtggctctcctttcacagcgggtacgacttcggctacatggtaaagctcctcactgatagcaggctgccagaggaagagcacgagttttttcatattctcaatcttttctttcctagcatctacgatgttaaatacttaatgaaatcttgcaagaatctcaagggagggttgcaagaggtagcggatcagctcgacctccagcggattgggcgacagcatcaagccggtagcgacagtcttctgaccggtatggctttcttccgcatgaaagaactcttttttgaagactctattgacgatgccaaatattgtgggcgtctgtacgggttaggaactggagtagctcagaaacaaaacgaggacgtggattcagcccaggaaaagatgtccatactcgctataattaataatatgcagcagtag

SEQ ID NO: 149477 - DNA, 360 bp, Artificial Sequence
  derived and/or modified sequence
atgcccgccgccctggtggagaacagccaggtgatctgcgaggtgtgggcatccaacctggaggaagagatgcgaaagataagagagattgtgctctcttatagttatattgctatggacaccgagttcccaggtgtcgtagtccgtcctatcggagaatttcgcagctccattgactaccagtaccaactgctgcggtgtaacgtcgatctgcttaagattattcagctgggactgacatttacgaatgagaagggagaatacccttctgggatcaatacttggcagtttaactttaagttcaacttaactgaggacatgtactcacaggactctattgacctactcgctaattcctag

SEQ ID NO: 149478 - DNA, 402 bp, Artificial Sequence
  derived and/or modified sequence
atgcccgccgccctggtggagaacagccaggtgatctgcgaggtgtgggcaagcaacttggaagaggagatgcgcaagatcagagagatcgtattgagctattcctacattgcaatggatacagaattccctggcgtggtagtgaggcccataggagagttccgcagttccattgattatcagtatcagttgctgcgttgcaatgttgacctcttgaagatcatccagcttgggttgactttcaccaacgaaaagggtgagtacccgtccggaatcaatacatggcaatttaattttaagtttaatctcacagaggacatgtacagccaggattctatcgatctcttggctaattctgggctgcagtttcagaaacacgaggaagagggaatcgatacctag

SEQ ID NO: 149479 - DNA, 810 bp, Artificial Sequence
  derived and/or modified sequence
atgcggaagatccgggagatcgtgctgagctacagctacatcgccatggacaccgagtttcctggcgtcgtggtacgacccatcggcgaattccggtccagcatagactaccaatatcagctcctgcggtgcaacgttgatcttctgaagatcattcagctgggtctcactttcaccaacgagaaaggagagtatccctcaggcatcaacacctggcaatttaatttcaaattcaacctcacagaagacatgtactcccaggactccatagacctcctggccaattccggattgcagttccagaagcatgaggaagaggggattgatacactgcactttgctgaacttctgatgacatctggggtcgtactgtgtgataacgttaagtggctgtctttccacagcggctacgacttcgggtacatggtcaagttgctaactgactctagactccccgaagaagagcatgagttcttccacatcctgaatttgttcttcccctcaatttatgatgtgaaatacctgatgaagagctgtaagaacttgaaggggggactgcaagaagtggcagatcagctggatctccagagaattggtaggcagcatcaggccgggtccgatagtcttctgactggcatggctttctttaggatgaaggagctcttcttcgaggattccatcgacgacgcgaagtactgcggacgactgtacggcctgggaactggagtggcacagaaacaaaatgaggacgtggacagcgcacaggagaaaatgagcatcctcgccataattaacaacatgcagcagtag

SEQ ID NO: 149480 - DNA, 879 bp, Artificial Sequence
  derived and/or modified sequence
atgccagctgctctcgtcgagaactcacaggtgatatgtgaagtgtgggcatccaatttggaggaggaaatgcgaaagatcagagaaatcgtcctttcctattcgtacatcgccatggacactgagtttccaggggtagtagttcggccaattggagagtttagatcatctatcgactaccagtatcagctcctccgctgcaacgttgatctcctgaaaataatccaactggggcttacatttaccaacgagaagggggaatacccttctggaataaatacctggcagttcaattttaagtttaatctaacagaagatatgtactctcaagacagcatcgatcttctcgccaactctggcctgcagtttcagaagcacgaagaggagggcatcgatactctgcatttcgcagaactgctgatgacctctggtgtggttctttgcgacaatgtgaaatggctgtcattccattctggctacgactttggctatatggttaaactgttaacagattccaggctccctgaggaggaacatgaattttttcacattctcaatctcttcttccccagcatctacgatgtaaaatatctcatgaaatcatgtaaaaacctgaaggggggtcttcaggaagtcgctgaccaactggacttacagaggatcggaaggcagcatcaggcaggatcagactccctactcactggaatggcctttttccgcatgaaagagctctttttcgaagattccattgacgacgccaaatattgtggccgactgtacggcctcggcacaggtgtggcacagaagcagaatgaggacgtcgattctgcccaggagaaaatgtctatcctcgcaatcatcaataacatgcagcagtag

SEQ ID NO: 149481 - DNA, 879 bp, Artificial Sequence
  derived and/or modified sequence
atgcccgctgcacttgtcgagaactcccaggtgatttgcgaggtgtgggcgtcaaacctggaggaggagatgagaaagatcagagagatagtcctatcatactcttatattgccatggataccgagttcccgggtgtggtcgtgaggcctatcggcgaatttcgttcatccatcgattaccagtatcaacttctcaggtgcaacgtggatcttctgaagatcatccagcttggccttacctttactaacgagaagggagagtaccccagcggcatcaatacttggcagttcaacttcaaattcaatctcaccgaggacatgtactctcaggacagcattgatctgctcgcaaattctggcctccaatttcaaaagcacgaagaggaaggcatcgatacattgcatttcgctgaactgctaatgacatctggggttgtgttgtgcgataacgtgaagtggctgagctttcactccggctatgattttggatatatggtaaagttgctgactgactcacggcttcctgaggaagaacatgaattcttccatatactgaatctgtttttcccttcaatctacgatgtgaagtatcttatgaaatcttgtaagaacctgaaaggtgggcttcaggaagtggccgaccagttagacctgcagagaattgggagacagcatcaggccggaagcgattctctgcttacaggaatggctttcttcaggatgaaagaacttttcttcgaagactcaattgatgacgccaagtattgcggaagattatacggtctcggcactggggtggcgcagaaacagaatgaggacgttgactctgcacaggaaaagatgagtatcttggctatcattaacaacatgcagcagtag

SEQ ID NO: 149482 - DNA, 357 bp, Artificial Sequence
  derived and/or modified sequence
atgcccgcagccttggtggaaaacagccaagtgatttgcgaggtttgggcaagcaacctggaagaggagatgagaaaaatccgggaaatagttttgtcctattcatacattgcgatggacaccgaattccccggagtggtggtcagacccattggcgaatttaggagctcaatcgactaccagtatcagctgctaagatgcaacgtagatctgctgaagatcatacaattgggactcaccttcacaaatgagaagggggagtacccttccggaataaatacatggcagtttaattttaagtttaacctcactgaggacatgtacagccaggacagtattgacctcttagccaattag

SEQ ID NO: 149483 - DNA, 879 bp, Artificial Sequence
  derived and/or modified sequence
atgcccgcagcgctcgtagagaactcccaggtgatttgtgaggtgtgggcaagtaatctagaggaggaaatgcgcaagataagagagattgtactctcatactcatatattgccatggacacagagtttccaggcgtggtagtcagacctattggagaatttcggagcagcatcgattatcagtaccagctgctccgatgtaacgtggacttgttgaagattatacaactgggattaactttcacaaatgaaaaaggtgaatacccttctggcatcaatacctggcagtttaattttaagtttaacctgaccgaagacatgtactcccaagactctatcgacctgctagccaactccgggttacagtttcagaagcacgaagaggaggggattgacaccctgcacttcgccgaactccttatgacatccggcgtggttttgtgtgataacgtgaagtggctgtcttttcactctggatacgattttggttacatggtgaagctgcttacagactcccgccttcccgaggaagagcatgagttttttcatattctgaaccttttttttcccagtatctacgacgtcaagtacctgatgaagagctgtaagaacctgaaaggagggctgcaagaagtggcagaccagctagatctccagaggattggtcggcaacatcaggcgggatccgactcattactgacgggtatggctttctttcgcatgaaagagcttttcttcgaggacagcatcgacgacgccaagtattgcggtcgactctatggactaggcacaggagtcgcgcagaagcaaaatgaggacgttgactcagcccaggagaagatgagcattctggccatcataaataacatgcagcagtag

SEQ ID NO: 149484 - DNA, 360 bp, Artificial Sequence
  derived and/or modified sequence
atgccagctgctctggtcgagaattctcaggtgatttgtgaggtgtgggcctccaatctcgaggaggagatgcgaaaaattagagagattgtgcttagctactcttacatagccatggatacagaattccctggcgtagtcgttagacccattggcgaatttcggtcaagtattgactaccagtaccagcttttacgctgcaatgtagatcttttaaagatcatacagctgggtttaaccttcacaaatgagaagggggaatacccctccgggattaatacatggcagtttaatttcaaatttaacttaaccgaggatatgtattctcaggacagcatcgatctcctcgccaattcttag

SEQ ID NO: 149485 - DNA, 402 bp, Artificial Sequence
  derived and/or modified sequence
atgccggctgccttggtagagaattctcaggtgatctgcgaagtgtgggcctctaatttggaggaagagatgcggaaaattcgggaaattgtgctgtcatactcatacatagccatggacacagagtttccaggagtcgtcgtccgccctatcggagaattcagaagctccatcgactaccagtatcagctgctgagatgcaacgttgacctattaaagatcatacagctgggcctgacctttaccaatgaaaaaggggagtatccctctggaattaacacttggcagtttaacttcaaattcaaccttactgaggatatgtattctcaggattccatcgatttactggcgaattccgggcttcagtttcagaagcatgaagaggaaggcatcgatacttag

SEQ ID NO: 149486 - DNA, 810 bp, Artificial Sequence
  derived and/or modified sequence
atgcgcaagatacgcgagatcgtgctaagctacagttacattgcaatggacacagagtttcctggcgtggttgtgcggccaattggcgaatttaggagtagtattgattatcaatatcagttattgcgatgcaatgtggatctcctgaagatcatccaactgggtttgacctttactaatgaaaagggtgaatatccgtctgggatcaatacatggcagttcaatttcaagttcaatttaaccgaggatatgtatagtcaagacagtatagacttgttagcaaattctgggctgcaatttcaaaaacacgaggaggaggggattgatacactgcacttcgccgagctgctgatgacttcaggcgtggtgctgtgtgacaatgtcaagtggctgtcatttcattccggttacgactttggctatatggttaaattgctgactgattctagactaccggaggaggagcacgaattttttcacattttgaatttgttttttcccagcatatacgacgtcaaataccttatgaaaagctgcaaaaacttgaaaggcggactacaggaggttgctgaccagctagatttgcaaaggatcggacgccaacatcaggccggaagcgactccctgttaaccggcatggctttttttagaatgaaggagctgttcttcgaggactctatcgatgacgccaagtactgtggcagactctacggtctggggactggggtagcacagaagcagaacgaggatgtggatagtgcgcaggagaagatgagcatcttggctatcatcaataatatgcaacagtag

SEQ ID NO: 149487 - DNA, 2528 bp, Artificial Sequence
  derived and/or modified sequence
gggtagagtggtgccgtccggttgtttggtgggaggcacgtaagaccgctctgggcacgggggcgctcacctcactggctcgttcggttctaggagcagatccggggtagagggaaaagagctccgggccaggggctgccgtcgccgccgtcggggagtcagcccgccagcccgccagctcgtcagcccgccagccagcgcttcgcgggccctgtcggtcccgatcagaccaaacattgtctggcttgcactgtaaaactagttagctgaagacgacttctcaggtttcttcaggatgcctgcagcacttgtggagaatagccaggttatctgtgaagtgtgggccagtaatctagaagaagagatgaggaagatccgagaaatcgtgctcagttacagttatattgccatggacacagaatttccaggtgttgtggtgcgaccaattggtgaatttcgtagttccatagattaccaatatcagcttctgcggtgcaatgttgaccttttaaaaattatccagctgggccttacattcacaaatgagaagggagagtatccttctggaatcaatacttggcagttcaatttcaaatttaaccttacagaggacatgtactcccaggattccatagatctccttgctaactcaggactacagtttcagaagcatgaagaggaagggattgacacactgcactttgcagagctgcttatgacatcaggagtggttctctgtgacaatgtcaaatggctttcatttcatagtggctatgattttggctatatggtaaagttgcttacagattctcgtttgccagaagaggaacatgaattctttcatattctgaaccttttcttcccatccatttatgatgtgaaatacctgatgaagagctgcaaaaatcttaagggaggtcttcaggaagttgctgatcagttggatttgcagaggattggaaggcagcaccaggcaggctcagactcactgctgacaggaatggctttctttaggatgaaagagttgttttttgaggacagcattgatgatgccaagtactgtgggcggctctatggcttaggcacaggagtggcccagaagcagaatgaggatgtggactctgcccaggagaagatgagcatcctggcgattatcaacaacatgcagcagtgatggcgccaggctctgcagggtgggcctgatcccagagtggtgcttactgtgctgactgtgtacttatcttccccaagagaaaatgcttcttttgagcacactgtacctaccatctgcattgagcagaaagacttttgttttactgaagacaaaagatgtttttattttagacccagaagagaggagtttgctctgaatttgtaaataagtcttccccattcctcatactcgagcctctcctctctggttgcctcctgccaccagcatccatggctcatttgacacctttttaaatatcaggacaagtctgaaacaaagtagtaaaatgtatataactcttacctgttgtcattctttttcttttaaatttgttgctaatctctgataatgaagattcttactctgattctcagctgagctgtgagggcttccagggaaaatggaacaaaatggtgttcttaggtaatgggttgtagatactgagtcttcctttccttttctgacccttctcgaggacatttgctttcctcacacttttgtagtctctctttacatattactatatggaaatgaattgctctgtgctgaaatttgaagaccagataatgaaactgaaaagcaaacaattttactgaatctgtctacccttcattcatgagaactccagaatgagtgttgaccactgaagcatcttttaagtctgtgttccattgtgccattcaggtttgctgtcacatatgcatcatctgaaatcatttgaaatttttgtacaataaaatatcctggatttgatcctgaaggaaactagtaagatcagatttttgggtcatgtctgttgtattttcagtaatgtgatttcagatggtcatctggattctcccacttctctactccattatttctctacttttccttccagcaaacctgaaacgtgagggagatggattaatgtgagtaacaggaatgtgtctttaaaaagctagagtggttacatttaatcaggcagtaagataatttgggttcttgagttgttttggagtaatatcccacaactggggtaggaagctcaggacttttttctttaaagctagtcatttcaaaagcatattgtatttttttgaatgactacagtatggacaatttcaaaaaccaaaacccactttggattggtggaagtaaaaactggtaactcactcaagtgaatgaatggtcttgcattttaaaagcttatgggaaactcaatttgaaatgattagaaaatgtcaagtattataagctggtatttaagatgcttgtaaatactatttatgtttttaattttgtaaaataaagatttctttttaaccactggcat

SEQ ID NO: 149488 - DNA, 2604 bp, Artificial Sequence
  derived and/or modified sequence
agagagcaggcgagtcgggcggatcgggtgggtagagtggtgccgtccggttgtttggtgggaggcacgtaagaccgctctgggcacgggggcgctcacctcactggctcgttcggttctaggagcagatccggggtagagggaaaagagctccgggccaggggctgccgtcgccgccgtcggggagtcagcccgccagcccgccagctcgtcagcccgccagccagcgcttcgcgggccctgtcggtcccggtaagcgggcctgcgcttaccggaaagaggagcgtaagatgaaagagtatcagaccaaacattgtctggcttgcactgtaaaactagttagctgaagacgacttctcaggtttcttcaggatgcctgcagcacttgtggagaatagccaggttatctgtgaagtgtgggccagtaatctagaagaagagatgaggaagatccgagaaatcgtgctcagttacagttatattgccatggacacagaatttccaggtgttgtggtgcgaccaattggtgaatttcgtagttccatagattaccaatatcagcttctgcggtgcaatgttgaccttttaaaaattatccagctgggccttacattcacaaatgagaagggagagtatccttctggaatcaatacttggcagttcaatttcaaatttaaccttacagaggacatgtactcccaggattccatagatctccttgctaactcaggactacagtttcagaagcatgaagaggaagggattgacacactgcactttgcagagctgcttatgacatcaggagtggttctctgtgacaatgtcaaatggctttcatttcatagtggctatgattttggctatatggtaaagttgcttacagattctcgtttgccagaagaggaacatgaattctttcatattctgaaccttttcttcccatccatttatgatgtgaaatacctgatgaagagctgcaaaaatcttaagggaggtcttcaggaagttgctgatcagttggatttgcagaggattggaaggcagcaccaggcaggctcagactcactgctgacaggaatggctttctttaggatgaaagagttgttttttgaggacagcattgatgatgccaagtactgtgggcggctctatggcttaggcacaggagtggcccagaagcagaatgaggatgtggactctgcccaggagaagatgagcatcctggcgattatcaacaacatgcagcagtgatggcgccaggctctgcagggtgggcctgatcccagagtggtgcttactgtgctgactgtgtacttatcttccccaagagaaaatgcttcttttgagcacactgtacctaccatctgcattgagcagaaagacttttgttttactgaagacaaaagatgtttttattttagacccagaagagaggagtttgctctgaatttgtaaataagtcttccccattcctcatactcgagcctctcctctctggttgcctcctgccaccagcatccatggctcatttgacacctttttaaatatcaggacaagtctgaaacaaagtagtaaaatgtatataactcttacctgttgtcattctttttcttttaaatttgttgctaatctctgataatgaagattcttactctgattctcagctgagctgtgagggcttccagggaaaatggaacaaaatggtgttcttaggtaatgggttgtagatactgagtcttcctttccttttctgacccttctcgaggacatttgctttcctcacacttttgtagtctctctttacatattactatatggaaatgaattgctctgtgctgaaatttgaagaccagataatgaaactgaaaagcaaacaattttactgaatctgtctacccttcattcatgagaactccagaatgagtgttgaccactgaagcatcttttaagtctgtgttccattgtgccattcaggtttgctgtcacatatgcatcatctgaaatcatttgaaatttttgtacaataaaatatcctggatttgatcctgaaggaaactagtaagatcagatttttgggtcatgtctgttgtattttcagtaatgtgatttcagatggtcatctggattctcccacttctctactccattatttctctacttttccttccagcaaacctgaaacgtgagggagatggattaatgtgagtaacaggaatgtgtctttaaaaagctagagtggttacatttaatcaggcagtaagataatttgggttcttgagttgttttggagtaatatcccacaactggggtaggaagctcaggacttttttctttaaagctagtcatttcaaaagcatattgtatttttttgaatgactacagtatggacaatttcaaaaaccaaaacccactttggattggtggaagtaaaaactggtaactcactcaagtgaatgaatggtcttgcattttaaaagcttatgggaaactcaatttgaaatgattagaaaatgtcaagtattataagctggtatttaagatgcttgtaaatactatttatgtttttaattttgtaaaataaagatttctttttaaccactggca

SEQ ID NO: 149489 - DNA, 692 bp, Artificial Sequence
  derived and/or modified sequence
ggatcgggtgggtagagtggtgccgtccggttgtttggtgggaggcacgtaagaccgctctgggcacgggggcgctcacctcactggctcgttcggttctaggagcagatccggggtagagggaaaagagctccgggccaggggctgccgtcgccgccgtcggggagtcagcccgccagcccgccagctcgtcagcccgccagccagcgcttcgcgggccctgtcggtcccggtaagcgggcctgcgcttaccggaaagaggagcatcagaccaaacattgtctggcttgcactgtaaaactagttagctgaagacgacttctcaggtttcttcaggatgcctgcagcacttgtggagaatagccaggttatctgtgaagtgtgggccagtaatctagaagaagagatgaggaagatccgagaaatcgtgctcagttacagttatattgccatggacacagaatttccaggtgttgtggtgcgaccaattggtgaatttcgtagttccatagattaccaatatcagcttctgcggtgcaatgttgaccttttaaaaattatccagctgggccttacattcacaaatgagaagggagagtatccttctggaatcaatacttggcagttcaatttcaaatttaaccttacagaggacatgtactcccaggattccatagatctccttgctaact

SEQ ID NO: 149490 - DNA, 2708 bp, Artificial Sequence
  derived and/or modified sequence
gaggaccaaaatggaggagtaagaatcatgattaaattgagcgagcgcaactaatcacgcgaagagggccgcaggcgggccgtcttccgcaagcgtgcttccaggcctccactccccacctattcggcggcaccctgttacttctgctcctgcgcgctgcttcccgcgacctcacaggcagagcgaacacgcacggagtcgcaggggcgcgcaaagggggaggagcgggcgtgaccaggcgcgcgcgcgcgtctggagtgactctagagagcaggagcagatccggggtagagggaaaagagctccgggccaggggctgccgtcgccgccgtcggggagtcagcccgccagcccgccagctcgtcagcccgccagccagcgcttcgcgggccctgtcggtcccgatcagaccaaacattgtctggcttgcactgtaaaactagttagctgaagacgacttctcaggtttcttcaggatgcctgcagcacttgtggagaatagccaggttatctgtgaagtgtgggccagtaatctagaagaagagatgaggaagatccgagaaatcgtgctcagttacagttatattgccatggacacagaatttccaggtgttgtggtgcgaccaattggtgaatttcgtagttccatagattaccaatatcagcttctgcggtgcaatgttgaccttttaaaaattatccagctgggccttacattcacaaatgagaagggagagtatccttctggaatcaatacttggcagttcaatttcaaatttaaccttacagaggacatgtactcccaggattccatagatctccttgctaactcaggactacagtttcagaagcatgaagaggaagggattgacacactgcactttgcagagctgcttatgacatcaggagtggttctctgtgacaatgtcaaatggctttcatttcatagtggctatgattttggctatatggtaaagttgcttacagattctcgtttgccagaagaggaacatgaattctttcatattctgaaccttttcttcccatccatttatgatgtgaaatacctgatgaagagctgcaaaaatcttaagggaggtcttcaggaagttgctgatcagttggatttgcagaggattggaaggcagcaccaggcaggctcagactcactgctgacaggaatggctttctttaggatgaaagagttgttttttgaggacagcattgatgatgccaagtactgtgggcggctctatggcttaggcacaggagtggcccagaagcagaatgaggatgtggactctgcccaggagaagatgagcatcctggcgattatcaacaacatgcagcagtgatggcgccaggctctgcagggtgggcctgatcccagagtggtgcttactgtgctgactgtgtacttatcttccccaagagaaaatgcttcttttgagcacactgtacctaccatctgcattgagcagaaagacttttgttttactgaagacaaaagatgtttttattttagacccagaagagaggagtttgctctgaatttgtaaataagtcttccccattcctcatactcgagcctctcctctctggttgcctcctgccaccagcatccatggctcatttgacacctttttaaatatcaggacaagtctgaaacaaagtagtaaaatgtatataactcttacctgttgtcattctttttcttttaaatttgttgctaatctctgataatgaagattcttactctgattctcagctgagctgtgagggcttccagggaaaatggaacaaaatggtgttcttaggtaatgggttgtagatactgagtcttcctttccttttctgacccttctcgaggacatttgctttcctcacacttttgtagtctctctttacatattactatatggaaatgaattgctctgtgctgaaatttgaagaccagataatgaaactgaaaagcaaacaattttactgaatctgtctacccttcattcatgagaactccagaatgagtgttgaccactgaagcatcttttaagtctgtgttccattgtgccattcaggtttgctgtcacatatgcatcatctgaaatcatttgaaatttttgtacaataaaatatcctggatttgatcctgaaggaaactagtaagatcagatttttgggtcatgtctgttgtattttcagtaatgtgatttcagatggtcatctggattctcccacttctctactccattatttctctacttttccttccagcaaacctgaaacgtgagggagatggattaatgtgagtaacaggaatgtgtctttaaaaagctagagtggttacatttaatcaggcagtaagataatttgggttcttgagttgttttggagtaatatcccacaactggggtaggaagctcaggacttttttctttaaagctagtcatttcaaaagcatattgtatttttttgaatgactacagtatggacaatttcaaaaaccaaaacccactttggattggtggaagtaaaaactggtaactcactcaagtgaatgaatggtcttgcattttaaaagcttatgggaaactcaatttgaaatgattagaaaatgtcaagtattataagctggtatttaagatgcttgtaaatactatttatgtttttaattttgtaaaataaagatttctttttaaccactggca

SEQ ID NO: 149491 - DNA, 620 bp, Artificial Sequence
  derived and/or modified sequence
gtgaccaggcgcgcgcgcgcgtctggagtgactctagagagcaggcgagtcgggcggatcgggagcagatccggggtagagggaaaagagctccgggccaggggctgccgtcgccgccgtcggggagtcagcccgccagcccgccagctcgtcagcccgccagccagcgcttcgcgggccctgtcggtcccgatcagaccaaacattgtctggcttgcactgtaaaactagttagctgaagacgacttctcaggtttcttcaggatgcctgcagcacttgtggagaatagccaggttatctgtgaagtgtgggccagtaatctagaagaagagatgaggaagatccgagaaatcgtgctcagttacagttatattgccatggacacagaatttccaggtgttgtggtgcgaccaattggtgaatttcgtagttccatagattaccaatatcagcttctgcggtgcaatgttgaccttttaaaaattatccagctgggccttacattcacaaatgagaagggagagtatccttctggaatcaatacttggcagttcaatttcaaatttaaccttacagaggacatgtactcccaggattccatagatctccttgctaactc

SEQ ID NO: 149492 - DNA, 648 bp, Artificial Sequence
  derived and/or modified sequence
agagagcaggcgagtcgggcggatcgggagcagatccggggtagagggaaaagagctccgggccaggggctgccgtcgccgccgtcggggagtcagcccgccagcccgccagctcgtcagcccgccagccagcgcttcgcgggccctgtcggtcccggtaagcgggcctgcgcttaccggaaagaggagcgacacagaatttccaggtgttgtggtgcgaccaattggtgaatttcgtagttccatagattaccaatatcagcttctgcggtgcaatgttgaccttttaaaaattatccagctgggccttacattcacaaatgagaagggagagtatccttctggaatcaatacttggcagttcaatttcaaatttaaccttacagaggacatgtactcccaggattccatagatctccttgctaactcaggactacagtttcagaagcatgaagaggaagggattgacacactgcactttgcagagctgcttatgacatcaggagtggttctctgtgacaatgtcaaatggctttcatttcatagtggctatgattttggctatatggtaaagttgcttacagattctcgtttgccagaagaggaacatgaattctttcatattctgaaccttttcttcccatccat

SEQ ID NO: 149493 - DNA, 912 bp, Artificial Sequence
  derived and/or modified sequence
atggaggagtaagaatcatgattaaattgagcgagcgcaactaatcacgcgaagagggccgcaggcgggccgtcttccgcaagcgtgcttccaggcctccactccccacctattcggcggcaccctgttacttctgctcctgcgcgctgcttcccgcgacctcacaggcagagcgaacacgcacggagtcgcaggggcgcgcaaagggggaggagcgggcgtgaccaggcgcgcgcgcgcgtctggagtgactctagagagcaggagcagatccggggtagagggaaaagagctccgggccaggggctgccgtcgccgccgtcggggagtcagcccgccagcccgccagctcgtcagcccgccagccagcgcttcgcgggccctgtcggtcccggtaagcgggcctgcgcttaccggaaagaggagcgtaagatgaaagagtatcagaccaaacattgtctggcttgcactgtaaaactagttagctgaagacgacttctcaggtttcttcaggatgcctgcagcacttgtggagaatagccaggttatctgtgaagtgtgggccagtaatctagaagaagagatgaggaagatccgagaaatcgtgctcagttacagttatattgccatggacacagaatttccaggtgttgtggtgcgaccaattggtgaatttcgtagttccatagattaccaatatcagcttctgcggtgcaatgttgaccttttaaaaattatccagctgggccttacattcacaaatgagaagggagagtatccttctggaatcaatacttggcagttcaatttcaaatttaaccttacagaggacatgtactcccaggattccatagatctccttgctaactcaggactacagtttcagaagcatgaagaggaagggattgacac

SEQ ID NO: 149494 - DNA, 923 bp, Artificial Sequence
  derived and/or modified sequence
gttcggttctaggagcagatccggggtagagggaaaagagctccgggccaggggctgccgtcgccgccgtcggggagtcagcccgccagcccgccagctcgtcagcccgccagccagcgcttcgcgggccctgtcggtcccggacacagaatttccaggtgttgtggtgcgaccaattggtgaatttcgtagttccatagattaccaatatcagcttctgcggtgcaatgttgaccttttaaaaattatccagctgggccttacattcacaaatgagaagggagagtatccttctggaatcaatacttggcagttcaatttcaaatttaaccttacagaggacatgtactcccaggattccatagatctccttgctaactcaggactacagtttcagaagcatgaagaggaagggattgacacactgcactttgcagagctgcttatgacatcaggagtggttctctgtgacaatgtcaaatggctttcatttcatagtggctatgattttggctatatggtaaagttgcttacagattctcgtttgccagaagaggaacatgaattctttcatattctgaaccttttcttcccatccatttatgatgtgaaatacctgatgaagagctgcaaaaatcttaagggaggtcttcaggaagttgctgatcagttggatttgcagaggattggaaggcagcaccaggcaggctcagactcactgctgacaggaatggctttctttaggatgaaagagttgttttttgaggacagcattgatgatgccaagtactgtgggcggctctatggcttaggcacaggagtggcccagaagcagaatgaggatgtggactctgcccaggagaagatgagcatcctggcgattatcaacaacatgcagcagtgatggcgccaggctctgcagg

SEQ ID NO: 149495 - DNA, 1158 bp, Artificial Sequence
  derived and/or modified sequence
agagagcaggcgagtcgggcggatcgggagcagatccggggtagagggaaaagagctccgggccaggggctgccgtcgccgccgtcggggagtcagcccgccagcccgccagctcgtcagcccgccagccagcgcttcgcgggccctgtcggtcccgagaggacatgtactcccaggattccatagatctccttgctaactcaggactacagtttcagaagcatgaagaggaagggattgacacactgcactttgcagagctgcttatgacatcaggagtggttctctgtgacaatgtcaaatggctttcatttcatagtggctatgattttggctatatggtaaagttgcttacagattctcgtttgccagaagaggaacatgaattctttcatattctgaaccttttcttcccatccatttatgatgtgaaatacctgatgaagagctgcaaaaatcttaagggaggtcttcaggaagttgctgatcagttggatttgcagaggattggaaggcagcaccaggcaggctcagactcactgctgacaggaatggctttctttaggatgaaagagttgttttttgaggacagcattgatgatgccaagtactgtgggcggctctatggcttaggcacaggagtggcccagaagcagaatgaggatgtggactctgcccaggagaagatgagcatcctggcgattatcaacaacatgcagcagtgatggcgccaggctctgcagggtgggcctgatcccagagtggtgcttactgtgctgactgtgtacttatcttccccaagagaaaatgcttcttttgagcacactgtacctaccatctgcattgagcagaaagacttttgttttactgaagacaaaagatgtttttattttagacccagaagagaggagtttgctctgaatttgtaaataagtcttccccattcctcatactcgagcctctcctctctggttgcctcctgccaccagcatccatggctcatttgacacctttttaaatatcaggacaagtctgaaacaaagtagtaaaatgtatataactcttacctgttgtcattctttttcttttaaatttgttgctaatctctgataatgaagattcttactctgattctcagctgagctgtgagggcttcca

SEQ ID NO: 149496 - DNA, 1151 bp, Artificial Sequence
  derived and/or modified sequence
gttcggttctaggagcagatccggggtagagggaaaagagctccgggccaggggctgccgtcgccgccgtcggggagtcagcccgccagcccgccagctcgtcagcccgccagccagcgcttcgcgggccctgtcggtcccggacacagaatttccaggtgttgtggtgcgaccaattggtgaatttcgtagttccatagattaccaatatcagcttctgcggtgcaatgttgaccttttaaaaattatccagctgggccttacattcacaaatgagaagggagagtatccttctggaatcaatacttggcagttcaatttcaaatttaaccttacatataagaaagaaaaagtcaacaataatacatgtgttgcttgagctaaaagacataggagaacagacaacacatacccattacatttctaggaaatacgagagaggacatgtactcccaggattccatagatctccttgctaactcaggactacagtttcagaagcatgaagaggaagggattgacacactgcactttgcagagctgcttatgacatcaggagtggttctctgtgacaatgtcaaatggctttcatttcatagtggctatgattttggctatatggtaaagttgcttacagattctcgtttgccagaagaggaacatgaattctttcatattctgaaccttttcttcccatccatttatgatgtgaaatacctgatgaagagctgcaaaaatcttaagggaggtcttcaggaagttgctgatcagttggatttgcagaggattggaaggcagcaccaggcaggctcagactcactgctgacaggaatggctttctttaggatgaaagagttgttttttgaggacagcattgatgatgccaagtactgtgggcggctctatggcttaggcacaggagtggcccagaagcagaatgaggatgtggactctgcccaggagaagatgagcatcctggcgattatcaacaacatgcagcagtgatggcgccaggctctgcagggtgggcctgatcccagagtggtgcttactgtgctgactgtgtacttatcttccccaagagaaaatgcttcttttgagcacactgtacctaccatctgcattgagcagaaagacttttgttttactga

SEQ ID NO: 149497 - DNA, 862 bp, Artificial Sequence
  derived and/or modified sequence
aaagaggaccaaaatggaggagtaagaatcatgattaaattgagcgagcgcaactaatcacgcgaagagggccgcaggcgggccgtcttccgcaagcgtgcttccaggcctccactccccacctattcggcggcaccctgttacttctgctcctgcgcgctgcttcccgcgacctcacaggcagagcgaacacgcacggagtcgcaggggcgcgcaaagggggaggagcgggcgtgaccaggcgcgcgcgcgcgtctggagtgactctagagagcagagaggacatgtactcccaggattccatagatctccttgctaactcaggactacagtttcagaagcatgaagaggaagggattgacacactgcactttgcagagctgcttatgacatcaggagtggttctctgtgacaatgtcaaatggctttcatttcatagtggctatgattttggctatatggtaaagttgcttacagattctcgtttgccagaagaggaacatgaattctttcatattctgaaccttttcttcccatccatttatgatgtgaaatacctgatgaagagctgcaaaaatcttaagggaggtcttcaggaagttgctgatcagttggatttgcagaggattggaaggcagcaccaggcaggctcagactcactgctgacaggaatggctttctttaggatgaaagagttgttttttgaggacagcattgatgatgccaagtactgtgggcggctctatggcttaggcacaggagtggcccagaagcagaatgaggatgtggactctgcccaggagaagatgagcatcctggcgattatcaacaacatgcagcagtgatggcgccaggctctgca

SEQ ID NO: 149498 - DNA, 1605 bp, Artificial Sequence
  derived and/or modified sequence
agagtggtgccgtccggttgtttggtgggaggcacgtaagaccgctctgggcacgggggcgctcacctcactggctcgttcggttctaggagcagatccggggtagagggaaaagagctccgggccaggggctgccgtcgccgccgtcggggagtcagcccgccagcccgccagctcgtcagcccgccagccagcgcttcgcgggccctgtcggtcccgatcagaccaaacattgtctggcttgcactgtaaaactagttagctgaagagatgaggaagatccgagaaatcgtgctcagttacagttatattgccatggacacagaatttccaggtgttgtggtgcgaccaattggtgaatttcgtagttccatagattaccaatatcagcttctgcggtgcaatgttgaccttttaaaaattatccagctgggccttacattcacaaatgagaagggagagtatccttctggaatcaatacttggcagttcaatttcaaatttaaccttacagaggacatgtactcccaggattccatagatctccttgctaactcaggactacagtttcagaagcatgaagaggaagggattgacacactgcactttgcagagctgcttatgacatcaggagtggttctctgtgacaatgtcaaatggctttcatttcatagtggctatgattttggctatatggtaaagttgcttacagattctcgtttgccagaagaggaacatgaattctttcatattctgaaccttttcttcccatccatttatgatgtgaaatacctgatgaagagctgcaaaaatcttaagggaggtcttcaggaagttgctgatcagttggatttgcagaggattggaaggcagcaccaggcaggctcagactcactgctgacaggaatggctttctttaggatgaaagagttgttttttgaggacagcattgatgatgccaagtactgtgggcggctctatggcttaggcacaggagtggcccagaagcagaatgaggatgtggactctgcccaggagaagatgagcatcctggcgattatcaacaacatgcagcagtgatggcgccaggctctgcagggtgggcctgatcccagagtggtgcttactgtgctgactgtgtacttatcttccccaagagaaaatgcttcttttgagcacactgtacctaccatctgcattgagcagaaagacttttgttttactgaagacaaaagatgtttttattttagacccagaagagaggagtttgctctgaatttgtaaataagtcttccccattcctcatactcgagcctctcctctctggttgcctcctgccaccagcatccatggctcatttgacacctttttaaatatcaggacaagtctgaaacaaagtagtaaaatgtatataactcttacctgttgtcattctttttcttttaaatttgttgctaatctctgataatgaagattcttactctgattctcagctgagctgtgagggcttccagggaaaatggaacaaaatggtgttcttaggtaatgggttgtagatactgagtcttcctttccttttctgacccttctcgaggacatttgctt

SEQ ID NO: 149499 - DNA, 879 bp, Artificial Sequence
  derived and/or modified sequence
atgcccgccgccctggtggagaacagccaggtgatctgcgaggtgtgggccagcaacctggaggaggagatgagaaagatcagagagatcgtgctgagctacagctacatcgccatggacaccgagttccccggcgtggtggtgagacccatcggcgagttcagaagcagcatcgactaccagtaccagctgctgagatgcaacgtggacctgctgaagatcatccagctgggcctgaccttcaccaacgagaagggcgagtaccccagcggcatcaacacctggcagttcaacttcaagttcaacctgaccgaggacatgtacagccaggacagcatcgacctgctggccaacagcggcctgcagttccagaagcacgaggaggagggcatcgacaccctgcacttcgccgagctgctgatgaccagcggcgtggtgctgtgcgacaacgtgaagtggctgagcttccacagcggctacgacttcggctacatggtgaagctgctgaccgacagcagactgcccgaggaggagcacgagttcttccacatcctgaacctgttcttccccagcatctacgacgtgaagtacctgatgaagagctgcaagaacctgaagggcggcctgcaggaggtggccgaccagctggacctgcagagaatcggcagacagcaccaggccggcagcgacagcctgctgaccggcatggccttcttcagaatgaaggagctgttcttcgaggacagcatcgacgacgccaagtactgcggcagactgtacggcctgggcaccggcgtggcccagaagcagaacgaggacgtggacagcgcccaggagaagatgagcatcctggccatcatcaacaacatgcagcagtag

SEQ ID NO: 149500 - DNA, 357 bp, Artificial Sequence
  derived and/or modified sequence
atgcccgccgccctggtggagaacagccaggtgatctgcgaggtgtgggccagcaacctggaggaggagatgagaaagatcagagagatcgtgctgagctacagctacatcgccatggacaccgagttccccggcgtggtggtgagacccatcggcgagttcagaagcagcatcgactaccagtaccagctgctgagatgcaacgtggacctgctgaagatcatccagctgggcctgaccttcaccaacgagaagggcgagtaccccagcggcatcaacacctggcagttcaacttcaagttcaacctgaccgaggacatgtacagccaggacagcatcgacctgctggccaactag

SEQ ID NO: 149501 - DNA, 360 bp, Artificial Sequence
  derived and/or modified sequence
atgcccgccgccctggtggagaacagccaggtgatctgcgaggtgtgggccagcaacctggaggaggagatgagaaagatcagagagatcgtgctgagctacagctacatcgccatggacaccgagttccccggcgtggtggtgagacccatcggcgagttcagaagcagcatcgactaccagtaccagctgctgagatgcaacgtggacctgctgaagatcatccagctgggcctgaccttcaccaacgagaagggcgagtaccccagcggcatcaacacctggcagttcaacttcaagttcaacctgaccgaggacatgtacagccaggacagcatcgacctgctggccaacagctag

SEQ ID NO: 149502 - DNA, 402 bp, Artificial Sequence
  derived and/or modified sequence
atgcccgccgccctggtggagaacagccaggtgatctgcgaggtgtgggccagcaacctggaggaggagatgagaaagatcagagagatcgtgctgagctacagctacatcgccatggacaccgagttccccggcgtggtggtgagacccatcggcgagttcagaagcagcatcgactaccagtaccagctgctgagatgcaacgtggacctgctgaagatcatccagctgggcctgaccttcaccaacgagaagggcgagtaccccagcggcatcaacacctggcagttcaacttcaagttcaacctgaccgaggacatgtacagccaggacagcatcgacctgctggccaacagcggcctgcagttccagaagcacgaggaggagggcatcgacacctag

SEQ ID NO: 149503 - DNA, 810 bp, Artificial Sequence
  derived and/or modified sequence
atgagaaagatcagagagatcgtgctgagctacagctacatcgccatggacaccgagttccccggcgtggtggtgagacccatcggcgagttcagaagcagcatcgactaccagtaccagctgctgagatgcaacgtggacctgctgaagatcatccagctgggcctgaccttcaccaacgagaagggcgagtaccccagcggcatcaacacctggcagttcaacttcaagttcaacctgaccgaggacatgtacagccaggacagcatcgacctgctggccaacagcggcctgcagttccagaagcacgaggaggagggcatcgacaccctgcacttcgccgagctgctgatgaccagcggcgtggtgctgtgcgacaacgtgaagtggctgagcttccacagcggctacgacttcggctacatggtgaagctgctgaccgacagcagactgcccgaggaggagcacgagttcttccacatcctgaacctgttcttccccagcatctacgacgtgaagtacctgatgaagagctgcaagaacctgaagggcggcctgcaggaggtggccgaccagctggacctgcagagaatcggcagacagcaccaggccggcagcgacagcctgctgaccggcatggccttcttcagaatgaaggagctgttcttcgaggacagcatcgacgacgccaagtactgcggcagactgtacggcctgggcaccggcgtggcccagaagcagaacgaggacgtggacagcgcccaggagaagatgagcatcctggccatcatcaacaacatgcagcagtag

SEQ ID NO: 149504 - protein, 258 aa, Artificial Sequence
  derived and/or modified sequence
MSAYPKSYNPFDDDGEDEGARPAPWRDARDLPDGPDAPADRQQYLRQEVLRRAEATAASTSRSLALMYESEKVGVASSEELARQRGVLERTEKMVDKMDQDLKISQKHINSIKSVFGGLVNYFKSKPVETPPEQNGTLTSQPNNRLKEAISTSKEQEAKYQASHPNLRKLDDTDPVPRGAGSAMSTDAYPKNPHLRAYHQKIDSNLDELSMGLGRLKDIALGMQTEIEEQDDILDRLTTKVDKLDVNIKSTERKVRQL

SEQ ID NO: 149505 - DNA, 777 bp, Artificial Sequence
  derived and/or modified sequence
atgagcgcgtacccaaagagctataacccttttgacgatgacggagaggacgagggagccaggccagccccctggagagacgcacgagatctaccagatggacctgatgcacccgctgatcggcaacagtacctaagacaggaggtgctgaggcgcgccgaggctacagcggcctctacgtctaggagcctggctttaatgtatgaatccgaaaaagtgggggtcgcctcctctgaggaactcgctagacagcggggcgtactcgaacggacagagaagatggtagacaaaatggaccaggacctgaagatttcacaaaaacacataaactcaattaagtccgtttttgggggattggtgaactacttcaagagcaaaccggtggaaactcctcctgaacagaacggtaccctcactagtcagcccaataatcgtctgaaagaggccatttccactagcaaggaacaggaagcaaagtatcaggctagccatcctaacctcagaaagcttgatgacacagaccctgttcctaggggcgctggctcagcaatgagcaccgacgcctaccctaagaacccgcacctgagagcgtatcatcaaaaaatcgacagtaatcttgatgagctgagcatgggcctgggtaggctgaaggatattgccttgggaatgcagaccgagatcgaggaacaggacgatatattggaccgccttactactaaggtcgacaaactcgacgttaatattaagtccactgagcgcaaggttaggcagttatag

SEQ ID NO: 149506 - DNA, 777 bp, Artificial Sequence
  derived and/or modified sequence
atgtctgcctaccccaagagctacaacccctttgatgatgatggagaagatgaaggagcccggcctgccccctggagagatgcccgggacctgcctgatggcccagatgccccagctgaccggcagcagtacctgcggcaggaggtgctgcggcgggcagaggccacagctgccagcaccagccgcagcctggccctgatgtatgagagcgagaaggtgggcgtggccagcagcgaggagctggcccggcagaggggcgtgctggagaggacagagaagatggtggacaagatggaccaggacctgaagatcagccagaagcacatcaacagcatcaagtctgtgtttggaggcctggtgaactacttcaagagcaagcctgtggagaccccacctgagcagaatggcaccctgaccagccagcccaacaaccggctgaaggaggccatcagcaccagcaaggagcaggaggccaagtaccaggccagccaccccaacctgaggaagctggatgacacagatcctgtgcccaggggggccggcagcgccatgagcacagatgcctaccccaagaacccccacctgcgggcctaccaccagaagattgacagcaacctggatgagctgtccatgggcctgggccgcctgaaggacatcgccctgggcatgcagacagaaattgaggagcaggatgacatcctggaccggctgaccaccaaggtggacaagctggatgtgaacatcaagagcacagagaggaaggtgcggcagctgtag

SEQ ID NO: 149507 - DNA, 777 bp, Artificial Sequence
  derived and/or modified sequence
atgagcgcctaccccaagagctacaaccccttcgacgacgacggcgaagacgagggggcccgcccagctccctggcgcgacgcccgcgatttaccagacggccccgacgctcctgcagataggcagcagtacttgagacaagaggtgcttcgccgagccgaggccaccgccgcctccacatcacggtctctggccctcatgtacgagtctgagaaggttggtgtggcctcatccgaggagctcgctcgccagaggggggttctcgaacgtaccgagaagatggtagacaagatggaccaggatctgaaaatttcgcagaagcatattaactcaatcaaaagcgtctttggtggcttggtgaactatttcaaatcaaaaccagtggagactcctccagagcagaatgggacattaacctcccagcctaacaaccgtctgaaggaagctataagcaccagcaaggagcaagaagcaaagtatcaggcctcccatcctaacctgcggaagttagatgacacggatccggtccccagaggagccggcagtgctatgtctaccgacgcatatccgaagaatccacacctccgcgcttaccatcagaaaattgatagcaatctggacgaattatccatgggactgggacggttaaaagacattgcccttggtatgcagactgaaatcgaggaacaggatgacattcttgaccggctcaccacaaaggtggataagctcgacgttaatattaaatcgacagagcggaaggtgcgtcagctgtag

SEQ ID NO: 149508 - DNA, 777 bp, Artificial Sequence
  derived and/or modified sequence
atgtctgcctacccgaaaagctataaccccttcgacgacgatggcgaggatgagggagccaggccagccccatggcgagacgcacgcgatctgcccgacgggcctgatgctcctgcagaccggcagcaatacctccgtcaggaagtcctgcggagagcagaagccactgcagccagcacatcacggtcattggctttgatgtatgagagcgagaaggtcggcgttgctagtagtgaggagctagccaggcagcgcggagttctcgagagaacagaaaagatggtcgataagatggatcaggacttgaagatcagccagaagcatattaattctattaaatccgtctttgggggactggtcaactacttcaaatctaaaccagtggagacgcctcccgaacagaacggaaccctgacaagccaacccaacaacagattaaaggaggccatctccacatctaaagagcaggaggccaaataccaggcaagccatcctaatcttcgaaagctggacgataccgacccagtgccgaggggagcaggctccgccatgtcaactgacgcttacccaaagaatccacatcttagggcgtatcatcaaaaaatcgacagcaatctggacgagctcagtatgggccttggacgccttaaggatatcgccctgggcatgcagactgagattgaggagcaggatgacatcttggatcggctgaccacaaaagtagacaagttggatgtgaacattaagtctacggaacggaaagtaagacagctgtag

SEQ ID NO: 149509 - DNA, 4283 bp, Artificial Sequence
  derived and/or modified sequence
acctgcgcgcgacgcgcggaaggagttcgcgcgacgaccgcggggtcggcgggcggggcgaggccctggacggcggcggcagtggggctcctccttctgtttcccagaccgagagccgcgccggcaccatgtcagcttaccctaaaagctacaatccgttcgacgacgacggggaggacgaaggcgcccggccggccccttggagggacgcccgagacctccccgacgggcccgacgcgcccgcggacaggcagcagtacttgcggcaggaggtcctccgcagggctgaggccacggccgccagcaccagcaggtccctggccctcatgtacgagtccgagaaggttggggtcgcctcttccgaggagctcgcccgtcagcgaggagtcctggagcgcacagagaagatggtggacaagatggaccaagatttgaagatcagccagaaacacatcaatagcattaagagcgtgtttggggggctggtcaattacttcaaatccaaaccagtagagaccccacctgaacagaatggcaccctcacctcccagcccaacaacagattgaaagaagctataagtacaagtaaagaacaggaagcaaagtaccaggccagccacccaaaccttagaaagctggatgatacagaccctgtccccagaggggctggttctgccatgagtactgatgcttacccaaagaacccacaccttcgagcctatcaccagaagatcgacagcaacctagatgagctgtccatgggactgggtcgtctgaaggacatagccctggggatgcagacagaaattgaggagcaagatgacattcttgaccggctgacaaccaaagtggacaagttagatgtcaacataaaaagcacagaaagaaaagttcgacaactctgaagacagacggatttccactctattgtgatgaaaagatttgaaagatctttttttgaacttccaagaaatttcatttactattttagtatgtaaattaatgtgtgtttgcaaatgttataatagagtaggtcttaagacatttttgctgttataaggaagtgtttgtcccacattttcctagggttaacacctcaccaagttcttccagcaaaatgcttattagagtttttgtctgagcacagtagcctggccctgcatatcttgggcgtttgattaccatgctggaataagaagagttgcatttctcattttaatgagcatatggaaagatgggaacagaatttcagtcttgcagccatgagcctctatttctcattcctaagccttaccatgagtcagagtgttaagggggcctgtgaaccagtcgtttggtggaggagggtccttcccacacctttgtttaggagtcatcattcacacacacacacacacacacacacacacacacacacacacacactctctgagcacattatctgtgattctttcatcctcccagaaaggatcagtgttagaatgggaaatagagtgtgccatcttgctcttttgttggcagatgtccccgcttccctccagccccccatccttggcatgtatattagtaggagggcttcacaccagcactgctcactgcgactcctggaaatgtgtggggaattgggtgagcccctcttccccacgtgctcccatctgtaactctccatctgtgatttgcaacaggtcttccactggctcgaggctgcgaggctgaccgacaggggcgcccaatagagtttgtgggaatggagtattgcacagatgcagctgcacaatggtcttcctccacccctctgggaatcaccattaggcaggcctcagtagggcaaaatgtttatttggtaccgggggtctcctgacctgtctagcattcccacccactcttctgcacttcttgcaaggtaacttgaatcatcacttatttctctgccacctggttttaggactggcactctataaatgacgctgactttgtatagaaggattttgctaagggggcaaaaagcccagataccattttaactggcccagttcattttctcctttcattttacaaaagaaatcatgcagaagcatcaattaaaactgatttatttatgttggtacatccaacaaaatagttggagccacaaggcccttgtctttttaaaaaaacaaaatattttgaagatggtgaaagtgactgattttaataatgagataggtcacttaaaataacagtgcctttgaccttaaaacatggcactggcccatgtgacctttgccatttcccagtacttccctttacagtctgcagcctataaacagtggtgtctcaaagcaaaggaaacctccacaagtgctgcaacagtgcattagtttttatgtagcaatttgtttataaaaattcccatcccataatgcatgaccttcctaaaaatatccacagcctccataggcaaggtgagctttctgtgctacccacttgttagattccagccacctcagggattctgatccatgtcattaacgaccatcccagggtgtgagggcctgattaaagcttatcgaactagacatttgtttattagatgagctcggcattattattttctcaataactggtagaagggaaattttaaacataacactcaacccaaacaaaactacttcgtgaggctttcagcaaaaaggctgcttaaaagcatgaacccgggatgcagagcagcttttgtgcacggttccacttactgtaattgtttctggttctttcctctaacaccttccatgtatgtcaactttttatcaccgtcaggcatagactcgtggagattagtcattatagctcagacctaagctaattatttaaaataaatacatgtaaaggccactgccacattctcagcagacttccacttgcctaatgagattagtgattcaactgacttgaagcacagtaacatcttattttatgcacattccctgtcttttgctggactgatgaagccagtcacccgcccttctctgttttttggttttttttttcttaaccccaggtatatggaaggggagttgccttcacttttctggaaatttgtcttcgtctgacatattagagggcctcgttttgtcctgttcttgttcagaccctctcgttctacgtcctgtgctgaggggactgtccgtaagctacaggacagcgagctggtcctttctgccacttcttccccactcccatgcccaggaaggcctggttgctgatgctactttataaatgagttgcttgcattttcacagagaatgaaggaagacgtaacatggctccagaaacttttcacatgatgattgggatcgacaaaaaaatgctaccctctagactagacacatttcatggagacaagcaaaatggtgccagggctgggctgactgtgggatgggatttggtactgcagacagattttgatttccacagttgagctggaaacaaactgtgccttcaaaaaatgacttttctaacttaaggttggttatatgttaagtgtgctactaacttaaaaaatagtggctgggcgcggtggctcatgcctgtaatcccagtgctttgggaggccaaggcggggggatcacgaggtcaggagatcgagaccatcctggctaacacggtgaaaccccatctctactaaaaacacacaaaaaattagctgggcgtggtggtgggcgcctgtagtcccagctactcaggaggctgaggcaggagaatggcatgaacctgggaggcagagcttgcagtgagccgagacagcgccattgcactccagcctgggcaacagagcaagactccgtctcaaaaaaaaaaaaaaaaaaaaaatagtgcactctctggctggtcacggtggctcacgcctgtaatctcagcactttggaaggccaaggcaggcggatcacgaggtcagaagatcgagaccatcctggctaacacagtgaaaccccgtctctactaaaaatataaaaaattagtcgggcatggtggcgggcgcctgtagtcccaactactcgggagactgaggcagaagaatggcgtgaactcaggaggcggagcttgcagtgagccaaggcgacagagcaagactctgtctcaaaaaataaaaaatagtgcactgtccttcgagaaagttttctaacatctagtaatttgtaacttagaagtggagttgccttgtggatgtcttttttgcattctgtaggaaatgaaacgtgaatttaactcgggttgcaagaaataaaaatgtcagtgcatttaaa

SEQ ID NO: 149510 - DNA, 777 bp, Artificial Sequence
  derived and/or modified sequence
atgagcgcctaccccaagagctacaaccccttcgacgacgacggcgaggacgagggcgccagacccgccccctggagagacgccagagacctgcccgacggccccgacgcccccgccgacagacagcagtacctgagacaggaggtgctgagaagagccgaggccaccgccgccagcaccagcagaagcctggccctgatgtacgagagcgagaaggtgggcgtggccagcagcgaggagctggccagacagagaggcgtgctggagagaaccgagaagatggtggacaagatggaccaggacctgaagatcagccagaagcacatcaacagcatcaagagcgtgttcggcggcctggtgaactacttcaagagcaagcccgtggagaccccccccgagcagaacggcaccctgaccagccagcccaacaacagactgaaggaggccatcagcaccagcaaggagcaggaggccaagtaccaggccagccaccccaacctgagaaagctggacgacaccgaccccgtgcccagaggcgccggcagcgccatgagcaccgacgcctaccccaagaacccccacctgagagcctaccaccagaagatcgacagcaacctggacgagctgagcatgggcctgggcagactgaaggacatcgccctgggcatgcagaccgagatcgaggagcaggacgacatcctggacagactgaccaccaaggtggacaagctggacgtgaacatcaagagcaccgagagaaaggtgagacagctgtag

SEQ ID NO: 149511 - protein, 1049 aa, Artificial Sequence
  derived and/or modified sequence
MPAGGRAGSLKDPDVAELFFKDDPEKLFSDLREIGHGSFGAVYFARDVRNSEVVAIKKMSYSGKQSNEKWQDIIKEVRFLQKLRHPNTIQYRGCYLREHTAWLVMEYCLGSASDLLEVHKKPLQEVEIAAVTHGALQGLAYLHSHNMIHRDVKAGNILLSEPGLVKLGDFGSASIMAPANSFVGTPYWMAPEVILAMDEGQYDGKVDVWSLGITCIELAERKPPLFNMNAMSALYHIAQNESPVLQSGHWSEYFRNFVDSCLQKIPQDRPTSEVLLKHRFVLRERPPTVIMDLIQRTKDAVRELDNLQYRKMKKILFQEAPNGPGAEAPEEEEEAEPYMHRAGTLTSLESSHSVPSMSISASSQSSSVNSLADASDNEEEEEEEEEEEEEEEGPEAREMAMMQEGEHTVTSHSSIIHRLPGSDNLYDDPYQPEITPSPLQPPAAPAPTSTTSSARRRAYCRNRDHFATIRTASLVSRQIQEHEQDSALREQLSGYKRMRRQHQKQLLALESRLRGEREEHSARLQRELEAQRAGFGAEAEKLARRHQAIGEKEARAAQAEERKFQQHILGQQKKELAALLEAQKRTYKLRKEQLKEELQENPSTPKREKAEWLLRQKEQLQQCQAEEEAGLLRRQRQYFELQCRQYKRKMLLARHSLDQDLLREDLNKKQTQKDLECALLLRQHEATRELELRQLQAVQRTRAELTRLQHQTELGNQLEYNKRREQELRQKHAAQVRQQPKSLKSKELQIKKQFQETCKIQTRQYKALRAHLLETTPKAQHKSLLKRLKEEQTRKLAILAEQYDQSISEMLSSQALRLDETQEAEFQALRQQLQQELELLNAYQSKIKIRTESQHERELRELEQRVALRRALLEQRVEEELLALQTGRSERIRSLLERQAREIEAFDAESMRLGFSSMALGGIPAEAAAQGYPAPPPAPAWPSRPVPRSGAHWSHGPPPPGMPPPAWRQPSLLAPPGPPNWLGPPTQSGTPRGGALLLLRNSPQPLRRAASGGSGSENVGPPAAAVPGPLSRSTSVASHILNGSSHFYS

SEQ ID NO: 149512 - DNA, 492 bp, Artificial Sequence
  derived and/or modified sequence
atgtgcaccgtgggcggcaacgtgagcgaggacgcctgctacggcgaacctctggaattccccgaaaataccaagaacagggctacactggggagtagctcccccaccgccggacacacccctcaaagaaaagagattagaatctctaagatgtacctccacattcctatccattgctcaactacatataatggcagagacctggagtctaccagcgttcccataaacaggcggactgataaaaagaatgtcgttcggcggcactctggttattgctccgctcgagaggaaaggaatccggttataagcgccgcatggatgtcactggaggagctgggaaaatctgcgagatgccggaaaacgaatactcctgggtcccacacaagcgtgggtgccaagaaagctgaactgaaagccgtggtgatggactgttggctgccggaatccggcgaaggtgtccgggtacgcgcaagacgagaaaataaactctag

SEQ ID NO: 149513 - DNA, 3150 bp, Artificial Sequence
  derived and/or modified sequence
atgcccgccggcggcagagccggcagcctgaaggaccccgacgtggccgagctgttcttcaaggacgaccccgagaagctgttcagcgacctgagagagatcggccacggcagcttcggcgccgtgtacttcgccagagacgtgagaaacagcgaggtggtggccatcaagaagatgagctacagcggcaagcagagcaacgagaagtggcaggacatcatcaaggaggtgagattcctgcagaagctgagacaccccaacaccatccagtacagaggctgctacctgagagagcacaccgcctggctggtgatggagtactgcctgggcagcgccagcgacctgctggaggtgcacaagaagcccctgcaggaggtggagatcgccgccgtgacccacggcgccctgcagggcctggcctacctgcacagccacaacatgatccacagagacgtgaaggccggcaacatcctgctgagcgagcccggcctggtgaagctgggcgacttcggcagcgccagcatcatggcccccgccaacagcttcgtgggcaccccctactggatggcccccgaggtgatcctggccatggacgagggccagtacgacggcaaggtggacgtgtggagcctgggcatcacctgcatcgagctggccgagagaaagccccccctgttcaacatgaacgccatgagcgccctgtaccacatcgcccagaacgagagccccgtgctgcagagcggccactggagcgagtacttcagaaacttcgtggacagctgcctgcagaagatcccccaggacagacccaccagcgaggtgctgctgaagcacagattcgtgctgagagagagaccccccaccgtgatcatggacctgatccagagaaccaaggacgccgtgagagagctggacaacctgcagtacagaaagatgaagaagatcctgttccaggaggcccccaacggccccggcgccgaggcccccgaggaggaggaggaggccgagccctacatgcacagagccggcaccctgaccagcctggagagcagccacagcgtgcccagcatgagcatcagcgccagcagccagagcagcagcgtgaacagcctggccgacgccagcgacaacgaggaggaggaggaggaggaggaggaggaggaggaggaggaggagggccccgaggccagagagatggccatgatgcaggagggcgagcacaccgtgaccagccacagcagcatcatccacagactgcccggcagcgacaacctgtacgacgacccctaccagcccgagatcacccccagccccctgcagccccccgccgcccccgcccccaccagcaccaccagcagcgccagaagaagagcctactgcagaaacagagaccacttcgccaccatcagaaccgccagcctggtgagcagacagatccaggagcacgagcaggacagcgccctgagagagcagctgagcggctacaagagaatgagaagacagcaccagaagcagctgctggccctggagagcagactgagaggcgagagagaggagcacagcgccagactgcagagagagctggaggcccagagagccggcttcggcgccgaggccgagaagctggccagaagacaccaggccatcggcgagaaggaggccagagccgcccaggccgaggagagaaagttccagcagcacatcctgggccagcagaagaaggagctggccgccctgctggaggcccagaagagaacctacaagctgagaaaggagcagctgaaggaggagctgcaggagaaccccagcacccccaagagagagaaggccgagtggctgctgagacagaaggagcagctgcagcagtgccaggccgaggaggaggccggcctgctgagaagacagagacagtacttcgagctgcagtgcagacagtacaagagaaagatgctgctggccagacacagcctggaccaggacctgctgagagaggacctgaacaagaagcagacccagaaggacctggagtgcgccctgctgctgagacagcacgaggccaccagagagctggagctgagacagctgcaggccgtgcagagaaccagagccgagctgaccagactgcagcaccagaccgagctgggcaaccagctggagtacaacaagagaagagagcaggagctgagacagaagcacgccgcccaggtgagacagcagcccaagagcctgaagagcaaggagctgcagatcaagaagcagttccaggagacctgcaagatccagaccagacagtacaaggccctgagagcccacctgctggagaccacccccaaggcccagcacaagagcctgctgaagagactgaaggaggagcagaccagaaagctggccatcctggccgagcagtacgaccagagcatcagcgagatgctgagcagccaggccctgagactggacgagacccaggaggccgagttccaggccctgagacagcagctgcagcaggagctggagctgctgaacgcctaccagagcaagatcaagatcagaaccgagagccagcacgagagagagctgagagagctggagcagagagtggccctgagaagagccctgctggagcagagagtggaggaggagctgctggccctgcagaccggcagaagcgagagaatcagaagcctgctggagagacaggccagagagatcgaggccttcgacgccgagagcatgagactgggcttcagcagcatggccctgggcggcatccccgccgaggccgccgcccagggctaccccgcccccccccccgcccccgcctggcccagcagacccgtgcccagaagcggcgcccactggagccacggcccccccccccccggcatgcccccccccgcctggagacagcccagcctgctggccccccccggcccccccaactggctgggcccccccacccagagcggcacccccagaggcggcgccctgctgctgctgagaaacagcccccagcccctgagaagagccgccagcggcggcagcggcagcgagaacgtgggcccccccgccgccgccgtgcccggccccctgagcagaagcaccagcgtggccagccacatcctgaacggcagcagccacttctacagctag

SEQ ID NO: 149514 - DNA, 3150 bp, Artificial Sequence
  derived and/or modified sequence
atgcctgctggaggcagggctggctccctcaaggacccagatgtggcggagcttttcttcaaagacgatccagaaaaactgttttcagatcttagggaaatcggtcatggctctttcggcgctgtttacttcgctagagacgtgagaaacagcgaggtagttgccatcaagaagatgtcatattccggcaaacagagcaacgaaaagtggcaggatattataaaagaggttcgctttctccagaagctgaggcatccgaacactatccaatacagaggatgttatttgagagaacataccgcatggctggtgatggaatactgcctgggaagcgcgagcgacctcttggaggtgcataagaaacctctccaggaggttgaaatcgccgccgtgacccatggggcactacaggggctggcgtatctgcactcacataatatgatccaccgggatgtgaaagccggcaatatcttgctgtccgaaccgggattggtgaagcttggagatttcggttccgccagcattatggcaccagctaactcattcgtggggacaccttattggatggccccagaagtgattctcgctatggacgagggacagtacgacggcaaggtagatgtgtggtctctcggcattacttgcatcgagctcgctgaacgcaaacctcctctgtttaacatgaacgctatgtcagcgttataccacattgcacagaacgagtccccggttctgcagtcaggacattggagcgagtactttcgcaactttgtggactcatgcttgcagaaaattccccaagacagacccacttcggaagtgctactcaagcatcgatttgtccttagagaaaggcctccaacggtcatcatggatctcatccagaggaccaaggacgcagtcagagaactggacaatctgcagtatcgcaaaatgaaaaagatactgtttcaggaggcccctaacggccctggggccgaggccccagaagaagaagaggaggccgagccttacatgcatagggccgggactttaacctctctcgagagctcgcactcggtgccctcgatgagtatatctgcttcctcgcagagcagctcggtgaacagcctcgccgacgctagcgacaatgaggaagaagaggaagaggaagaggaggaggaggaggaggaggaaggtccagaagctcgcgagatggctatgatgcaagaaggtgaacataccgtcaccagtcactcgtccatcatccacaggttgccagggtcggacaacctttatgacgatccataccagcccgagatcaccccaagcccattgcagccacccgcagccccagcacccacaagcacgactagttccgccaggcgacgagcttactgcagaaacagggaccatttcgcaacaataaggactgcttccctcgtgagccgacagatccaagaacatgaacaggatagcgccctgagagaacaactaagcggatataagcgcatgagaaggcaacaccagaagcagctgctcgcactcgagagcagactgagaggagaacgggaggagcactctgccaggctccagagggagctggaagctcagagggctggatttggtgcagaagccgagaaattggcccgccgacatcaagcaattggtgaaaaagaagcccgggccgcacaggccgaagaaaggaagttccagcagcacattctcggtcaacagaaaaaagagctggctgccttacttgaggctcagaaaagaacttacaagctgagaaaggaacagttaaaagaggaattacaggagaatccaagcacccctaaaagggaaaaggcagagtggctcctccgtcagaaagagcagctccaacaatgtcaagctgaggaagaagcaggcctactgcgtcggcagcggcaatacttcgaactgcagtgcaggcagtataaacggaaaatgcttctcgcccggcactctctcgatcaagacctgctcagggaggatttgaacaaaaagcagacccagaaggatctggaatgcgccctgcttctccggcaacatgaagccactcgtgagctggaactgaggcagctgcaagcagtccagagaactagagctgagctgactcggttgcagcaccagaccgagctcggcaatcagctggaatacaacaagagacgcgaacaagagcttagacagaagcatgcagctcaggttaggcagcagccaaagtccttgaagtccaaagagctccagatcaaaaagcagtttcaggaaacgtgcaaaatccagaccagacagtacaaggccctgagggctcatttactggagaccacacccaaggcccaacataagagcctattaaaacggttgaaagaagagcagacccgaaagctggcaatcctcgccgagcaatacgaccagagtatttctgaaatgctgtcgtcccaggcgttgcggctcgatgaaactcaagaggctgagtttcaggccttacgccaacagttgcagcaggagctcgagctgctcaacgcctaccagagtaagattaaaattaggacagagtctcaacacgagcgtgagctgagggaattagaacagagagtcgctctgcggcgagcactgctggagcaacgcgtcgaagaggaactgctggccctgcaaacaggtcgctcggaaagaatcaggagcctcctggagagacaggcacgggagattgaagccttcgatgctgagtcaatgaggctcggcttcagctccatggctttaggcggaatcccagccgaagccgctgctcaagggtatcccgcccctccacctgcccctgcctggccctcccgtcccgtacctcggtctggcgcgcattggagtcatgggcctccccccccagggatgccccctccggcctggcgtcagccctctctgctggccccccctggtccgccaaattggctcggtccaccgactcagtccggtactccccggggtggagctttactcctgctgagaaatagccctcaaccgctgcggcgcgcagcttccgggggaagcggcagtgagaatgttggtcctccagcagccgcagttcccgggcccctctctcgatccacgagtgtagcttctcatattctgaacgggtcatctcatttctactcttag

SEQ ID NO: 149515 - DNA, 3150 bp, Artificial Sequence
  derived and/or modified sequence
atgcctgctgggggccgggccggcagcctgaaggaccctgatgtggccgagctgttcttcaaggatgatcctgagaagctgttcagtgacctgcgggagatcggccacggcagctttggagctgtgtactttgccagagatgtgagaaattctgaggtggtggccatcaagaagatgagctacagcggcaagcagagcaatgagaagtggcaggacatcatcaaggaggtgcgcttcctgcagaagctgcggcaccccaacaccatccagtaccggggctgctacctgcgggagcacacagcctggctggtgatggagtactgcctgggcagcgccagtgacctgctggaggtgcacaagaagcccctgcaggaggtggagattgctgctgtgacccatggagccctgcagggcctggcctacctgcacagccacaacatgatccacagagatgtgaaggccggcaacatcctgctgtctgagcccggcctggtgaagctgggggactttggcagcgccagcatcatggccccagccaacagctttgtgggcaccccctactggatggcccctgaggtgatcctggccatggatgagggccagtatgatggcaaggtggatgtgtggagcctgggcatcacctgcatcgagctggccgagaggaagcccccactcttcaacatgaatgccatgtctgccctgtaccacatcgcccagaatgaaagccctgtgctgcagagcggccactggagcgagtacttcaggaactttgtggacagctgcctgcagaagatcccccaggaccggcccaccagcgaggtgctgctgaagcacagatttgtgctgcgggagcggccccccaccgtcatcatggacctgatccagaggaccaaggatgctgtgcgggagctggacaacctgcagtacaggaagatgaagaagatcctcttccaggaggcccccaacggccctggagctgaggcccctgaggaggaggaggaggccgagccctacatgcaccgggccggcaccctgaccagcctggagagcagccacagcgtgcccagcatgagcatcagcgccagcagccagagcagctctgtgaacagcctggctgatgccagtgacaatgaggaggaggaggaggaggaggaggaggaggaggaggaggaggagggccctgaggcccgggagatggccatgatgcaggagggggagcacacagtgaccagccacagcagcatcatccaccggctgcccggcagtgacaacctgtatgatgacccctaccagcctgagatcacccccagccccctgcagcccccagctgccccagcccccaccagcaccaccagcagcgcccggcggcgggcctactgcaggaacagagaccactttgccaccatcagaacagccagcctggtgtcccggcagatccaggagcacgagcaggacagcgccctgcgggagcagctgagcggctacaagaggatgaggcggcagcaccagaagcagctgctggccctggagagccggctgcggggggagcgggaggagcacagcgcccggctgcagcgggagctggaggcccagagagctggctttggagctgaggccgagaagctggcccggcggcaccaggccatcggggagaaggaggcccgggccgcccaggccgaggagaggaagttccagcagcacatcctgggccagcagaagaaggagctggccgccctgctggaggcccagaagaggacctacaagctgaggaaggagcagctgaaggaggagctgcaggagaaccccagcacccccaagcgggagaaggccgagtggctgctgcggcagaaggagcagctgcagcagtgccaggccgaggaggaggccggcctgctgcggcggcagaggcagtactttgagctgcagtgccggcagtacaagaggaagatgctgctggcccggcacagcctggaccaggacctgctgcgggaggacctgaacaagaagcagacccagaaggacctggagtgtgccctgctgctgcggcagcacgaggccacccgggagctggagctgcggcagctgcaggccgtgcagaggaccagggctgagctgacccggctgcagcaccagacagagctgggcaaccagctggagtacaacaagagaagagagcaggagctgcggcagaagcatgctgcccaggtgcggcagcagcccaagagcctgaagagcaaggagctgcagatcaagaagcagttccaggagacctgcaagatccagacccggcagtacaaggccctgcgggcccacctgctggagaccacccccaaggcccagcacaagagcctgctgaagaggctgaaggaggagcagaccaggaagctggccatcctggccgagcagtatgaccagagcatcagcgagatgctgagcagccaggccctgcggctggatgagacccaggaggccgagttccaggccctgcggcagcagctgcagcaggagctggagctgctgaatgcctaccagagcaagatcaagatcagaacagagagccagcacgagcgggagctgcgggagctggagcagagggtggccctgcggcgggccctgctggagcagagggtggaggaggagctgctggccctgcagacaggccgctctgagcgcatccgcagcctgctggagcggcaggcccgggagattgaggcctttgatgctgagagcatgaggctgggcttcagctccatggccctgggcggcatcccagctgaggccgccgcccagggctacccagcccctcctccagccccagcctggcccagcaggcctgtgcccaggtctggggcccactggagccacggccccccacctcctggcatgcctcctccagcctggaggcagcccagcctgctggcccctcctggcccccccaactggctgggcccccccacccagagcggcaccccccggggcggggccctgctgctgctgaggaacagcccccagcccctgcggcgggccgccagcggcggcagcggctctgaaaatgtgggccccccagctgctgctgtgcccggccccctgagccgcagcacctctgtggccagccacatcctgaatggcagcagccacttctacagctag

SEQ ID NO: 149516 - DNA, 3150 bp, Artificial Sequence
  derived and/or modified sequence
atgcccgccggcggccgggccggcagcctgaaggaccccgacgtggccgagctgttctttaaagacgaccctgagaagctcttcagtgacctgagagagatcggccacgggtcctttggcgcagtgtatttcgccagggacgttagaaattctgaagtggtggctatcaagaaaatgagttattctgggaaacagtccaacgaaaagtggcaggatattatcaaggaagtcagatttttgcagaaactgaggcatcctaatacaattcagtaccgaggatgctacctgcgggagcacacagcttggctcgtcatggagtactgcctggggtctgcatccgacttgttagaggtccataaaaaacccttacaggaagtcgaaatcgcagccgttactcacggggctctgcaaggattggcctaccttcacagtcataacatgattcaccgggatgtgaaggccggaaacatactgttaagcgagcccggcctggtgaaattaggtgacttcggcagcgcttccatcatggcgccagccaactcatttgtcggcacgccatactggatggccccagaagttattctcgccatggacgaagggcagtacgatggcaaggtggatgtctggtccttggggataacctgtatcgagcttgccgagcgcaagcctcccttatttaacatgaatgctatgtcagccctctaccacatagctcagaacgaaagccctgtgcttcaatccggccattggtctgaatattttcgcaatttcgtcgactcttgcctgcagaaaattcctcaagatcgtcccacaagcgaggttctgctgaagcatcggtttgtgctcagggaacgtccccccaccgtaattatggatctaattcaacggaccaaggatgctgtccgagagctggacaatttacaataccgtaaaatgaaaaagattctcttccaggaagcccctaatggacctggggccgaggcccccgaggaggaagaggaggcggaaccctacatgcaccgtgccggcaccctcacgtcgctggagtcttctcacagtgtacctagcatgtcaatcagcgccagcagccagagcagctcagtcaattcgttagcagacgcatccgataacgaagaggaggaagaagaagaggaggaggaggaagaggaagaggagggaccagaggcacgggaaatggctatgatgcaggagggcgagcacacagttaccagccacagctcgatcatacatcggctcccaggctctgataatctttacgatgacccataccagcctgaaataacaccgagcccattgcaaccaccggccgcccctgcgcccacctctaccacctcctcggctcggagacgcgcttactgccgcaatagagaccattttgcgactattcgcacagcatctctggtctcacgccagatccaagaacacgaacaggacagcgcgctgagagaacaattatcgggatataagagaatgcggcgccagcaccagaaacaactgctggccctcgagtcccgattgagaggtgagcgcgaagagcacagcgcacgcttgcagcgcgaattggaagctcagagggctgggtttggcgctgaagcagagaaactggctcggcgtcaccaggctatcggggagaaagaagcgcgggctgcccaggctgaagagagaaaatttcagcagcacattctgggccagcagaaaaaggagctcgccgccctcctggaagctcagaaaagaacctacaaactgcgcaaggaacagctgaaagaggaacttcaggaaaatccctctactccaaagcgagagaaagcagagtggctgctcaggcagaaagagcaactgcaacagtgtcaggccgaagaggaggctgggttacttcgaagacaacgacagtattttgagctgcaatgcaggcaatacaaaagaaaaatgctcctggccaggcactcacttgaccaggacctgttaagggaggatttgaacaagaaacagacccagaaggatttagaatgcgccctgctgctcagacagcatgaagctactagagagttggaacttagacagctgcaggccgtacaaagaactcgagccgaactgaccagactccagcaccagaccgagctgggcaaccagctcgagtataataagagacgcgagcaggagttgcggcagaaacatgcggctcaggttaggcagcaacccaagtccctgaaatctaaggaactacagattaagaaacaatttcaggaaacctgtaagatccagactagacagtataaagcattacgggcccatttgcttgagactactcccaaggctcagcataagtcactattgaaacgcttgaaggaggaacaaactcgaaaattggccatcctcgctgaacaatatgaccaaagtatcagcgagatgttatcgtcacaggccctccgcctggatgaaacacaggaagctgaatttcaagctctcaggcaacagctacaacaggaactggaactgctcaatgcttatcagagtaagattaagatacgaaccgagtcacagcacgaaagggaactgagggagttggagcagagggtagcactgcgccgggcgctgctggaacagcgggtcgaagaggaactgctagctctgcaaacggggcgcagcgaaagaattcgcagtctgcttgagaggcaggctcgcgagattgaagctttcgacgccgagagcatgcggctgggattctccagcatggctcttggcggtatccccgcggaggccgccgcacaaggttatccagcccccccccctgcaccagcctggccctcccgaccagtgccacgatctggtgcacactggagccacgggcccccgccacccggtatgccaccacctgcgtggaggcagccatctctgctggcgccaccggggccaccaaactggcttggaccccccacccaaagtggtacccctcgggggggcgccttgctgttactgcgcaactctcctcaacctcttaggcgggctgcctcgggcggtagtggatcagaaaacgtggggcccccagcagccgccgtaccaggccctctgagcagaagcactagcgtagcgtctcacatcttgaacggatcatctcacttctatagttag

SEQ ID NO: 149517 - DNA, 3150 bp, Artificial Sequence
  derived and/or modified sequence
atgcccgcaggaggcagagcaggctccttgaaagatcctgacgtcgcagagctctttttcaaagacgacccagagaagctattctccgatctgcgcgagatcgggcatggaagtttcggagctgtgtattttgctagggacgtgcgcaatagtgaagtagttgcaatcaagaaaatgagctacagcggaaagcaatctaatgaaaagtggcaagacattataaaagaggtcagatttctgcagaaactccggcatccaaataccatccagtatcggggatgctacttacgcgagcacacagcatggttggttatggaatactgtctggggagcgcgtcggacctgttagaagttcacaagaaaccacttcaggaggtcgagatcgccgctgttactcatggtgccctgcagggcctggcctacctgcactcacataacatgatccatagggatgtgaaagcagggaatatcctgctgtccgagcccggtctggtgaagctcggggacttcggcagcgcctcaatcatggcacccgcaaatagctttgtgggcacaccctattggatggcaccggaagtgatcctggcgatggatgaaggccagtatgacgggaaagtcgacgtctggagtcttgggatcacctgtattgaactggcagagcgcaaacctcccctcttcaacatgaatgctatgagcgctctgtatcatattgcccagaatgagagtcctgtacttcagtcaggccactggtctgaatatttcaggaactttgtggatagttgtctccagaaaatccctcaggatagacctacttccgaggttctattgaagcaccgctttgttttgcgagagagaccgcctaccgtaatcatggacttgattcagcggacaaaagacgctgtacgtgaactggacaatctacagtacagaaagatgaagaagatactcttccaggaagcacctaacggacccggtgcagaggcaccagaggaagaggaggaagccgagccatatatgcacagggccggaactctaacttcacttgagtctagccactccgtgccttctatgagcatcagtgccagtagccagtcaagctctgtgaactctttagccgacgctagtgataacgaagaggaggaagaggaagaggaagaggaggaagaagaagaagaaggccctgaggcacgagagatggctatgatgcaggagggcgagcacacagtcacctcacattcttccattattcacagacttcccggaagtgataacctctatgacgatccctaccagccggagatcaccccaagcccactgcagccacctgccgctcccgctcctactagcactacatcttcagcgaggcgtagagcttactgccgcaacagggatcattttgccaccatccgtacagccagccttgtatccaggcagattcaggagcacgagcaggactccgccctgcgagagcagttgtcaggctataagcgaatgagacgacagcatcagaagcagctccttgctctcgagtcacggctccgcggtgagagggaggagcactccgccaggctgcagagggagttagaagctcaacgcgctggctttggcgctgaagctgaaaaattggcacgacggcatcaggcaataggtgagaaggaagctcgcgcagctcaggctgaagaaaggaaattccagcagcatattctgggacagcagaagaaggagctcgcagcactccttgaagcacagaaaaggacatacaaattgcggaaagagcagctgaaagaagaactgcaggagaacccctcaacacccaagcgtgaaaaggccgagtggctgctgcgacaaaaagagcagttgcaacaatgtcaagccgaggaggaggccggtctgctgaggaggcagagacagtacttcgaactgcaatgcaggcagtacaaacggaagatgctgttagcaagacacagcctcgaccaagatcttcttcgcgaagacctgaataaaaaacagacccagaaggatcttgagtgcgccttgctgctgagacaacacgaggccacaagagaactcgagctgaggcagctccaggccgtacagcgaaccagggcagagcttacccggctacaacaccagactgagctgggcaatcagttggagtacaacaagcgtcgcgagcaggaactaagacaaaagcatgcggcacaagtacgacagcagcccaagagtctcaaaagcaaggagttgcaaatcaaaaaacagtttcaggaaacctgcaaaattcaaacacgtcagtataaagccctgagagcacacctgctcgagaccacgcccaaggcacagcacaagagcctgttaaaaaggcttaaagaagagcagacgcggaagcttgcaatcctggctgagcaatacgatcagtccatatcagaaatgctatcttcccaggccctccgtctggacgagactcaagaggctgaatttcaggccctaaggcaacaactgcagcaggagttagagttgctgaatgcttatcaaagcaagataaaaatccggaccgagtctcagcacgaaagagagctccgtgagctggagcagcgtgtggcactgaggagagctctcctggaacagcgcgtggaagaagagctgttagctttgcaaacaggtcgatccgagcggatcaggtccctgctggaaaggcaggcaagggaaattgaggcctttgacgcggagagcatgcgtttgggtttcagctctatggccctaggaggaattcccgcagaagctgcggcacaggggtatcccgctccacctcctgcacctgcctggcccagtcggccagtccccagaagcggagctcactggtcgcatggccctcctccacctggaatgcctcctcccgcatggagacagccatctttgcttgcaccgcctggtccaccgaactggctgggcccacctacacaaagcggcaccccacgaggaggcgctctcctgctgctccgtaactcacctcagccactgagaagggcagcatctggcggatcaggatctgaaaatgttggacccccagccgcagccgttccagggccactgtctaggagcacttcagtggcttcacacatattgaacggctcgtctcatttttactcctag

SEQ ID NO: 149518 - DNA, 4246 bp, Artificial Sequence
  derived and/or modified sequence
agaatttcaaatatcaggttcaggcccctgcgtgcaccagtatccggggttcattccccgggcgttcaaatatcggattcagtctccatcccgttcagatattcggggttcagaccccacaatcagaaatccggaattcggcagctgtcgccctcgacgagggggaggactggaccgcgaggtcagattaggttgtcaccccctcccctccaggggaggcttcccgggcccgcccctcaggaagggcgaaagccgaggaagaggtggcaaggggaaaggtctccttgcccctctccctgcttggcagagccgctggaggaccccaggcggaagcggaggcgctggggcaccatagtgacccctaccaggccaggccccactctcagggcccccaggggccaccatgccagctgggggccgggccgggagcctgaaggacccagatgtggctgagctcttcttcaaggatgacccagaaaagctcttctctgacctccgggaaattggccatggcagctttggagccgtatactttgcccgggatgtccggaatagtgaggtggtggccatcaagaagatgtcctacagtgggaagcagtccaatgagaaatggcaagacatcatcaaggaggtgcggttcttacagaagctccggcatcccaacaccattcagtaccggggctgttacctgagggagcacacggcttggctggtaatggagtattgcctgggctcagcttctgaccttctagaagtgcacaagaaaccccttcaggaggtagagatcgcagctgtgacccacggggcgcttcagggcctggcatatctgcactcccacaacatgatccatagggatgtgaaggctggaaacatcctgctgtcagagccagggttagtgaagctaggggactttggttctgcgtccatcatggcacctgccaactccttcgtgggcaccccatactggatggcacccgaggtgatcctggccatggatgaggggcagtacgatggcaaagtggacgtctggtccttggggataacctgcatcgagctggctgaacggaaaccaccgctctttaacatgaatgcgatgagtgccttataccacattgcacagaacgaatcccccgtgctccagtcaggacactggtctgagtacttccggaattttgtcgactcctgtcttcagaaaatccctcaagacagaccaacctcagaggttctcctgaagcaccgctttgtgctccgggagcggccacccacagtcatcatggacctgatccagaggaccaaggatgccgtgcgggagctggacaacctgcagtaccgcaagatgaagaagatcctgttccaagaggcacccaacggccctggtgccgaggccccagaggaggaagaggaggccgagccctacatgcaccgggccgggactctgaccagcctcgagagtagccactcagtgcccagcatgtccatcagcgcctccagccagagcagctccgtcaacagcctagcagatgcctcagacaacgaggaagaggaggaggaggaggaggaagaggaggaggaggaagaaggccctgaagcccgggagatggccatgatgcaggagggggagcacacagtcacctctcacagctccattatccaccggctgccgggctctgacaacctatatgatgacccctaccagccagagataacccccagccctctccagccgcctgcagccccagctcccacttccaccacctcttccgcccgccgccgggcctactgccgtaaccgagaccactttgccaccatccgaaccgcctccctggtcagccgtcagatccaggagcatgagcaggactctgcgctgcgggagcagctgagcggctataagcggatgcgacgacagcaccagaagcagctgctggccctggagtcacggctgaggggtgaacgggaggagcacagtgcacggctgcagcgggagcttgaggcgcagcgggctggctttggggcagaggcagaaaagctggcccggcggcaccaggccataggtgagaaggaggcacgagctgcccaggccgaggagcggaagttccagcagcacatccttgggcagcagaagaaggagctggctgccctgctggaggcacagaagcggacctacaaacttcgcaaggaacagctgaaggaggagctccaggagaaccccagcactcccaagcgggagaaggccgagtggctgctgcggcagaaggagcagctccagcagtgccaggcggaggaggaagcagggctgctgcggcggcagcgccagtactttgagctgcagtgtcgccagtacaagcgcaagatgttgctggctcggcacagcctggaccaggacctgctgcgggaggacctgaacaagaagcagacccagaaggacttggagtgtgcactgctgcttcggcagcacgaggccacgcgggagctggagctgcggcagctccaggccgtgcagcgcacgcgggctgagctcacccgcctgcagcaccagacggagctgggcaaccagctggagtacaacaagcggcgtgagcaagagttgcggcagaagcatgcggcccaggttcgccagcagcccaagagcctcaaatctaaggagctgcagatcaagaagcagttccaggagacgtgtaagatccagactcggcagtacaaggctctgcgagcacacttgctggagaccacgcccaaagctcagcacaagagcctccttaagcggctcaaggaagagcagacccgcaagctggcgatcttggcggagcagtatgaccagtccatctcagagatgctcagctcacaggcgctgcggcttgatgagacccaggaggcagagttccaggcccttcggcagcagcttcaacaggagctggagctgctcaacgcttaccagagcaagatcaagatccgcacagagagccagcacgagagggagctgcgggagctggagcagagggtcgcgctgcggcgggcactgctggagcagcgggtggaagaggagctgctggccctgcagacaggacgctccgagcgaatccgcagtctgcttgagcggcaggcccgtgagatcgaggccttcgatgcggaaagcatgaggctgggcttctccagcatggctctggggggcatcccggctgaagctgctgcccagggctatcctgctccaccccctgccccagcctggccctcccgtcccgttccccgttctggggcacactggagccatggccctcctccaccaggcatgccccctccagcctggcgtcagccgtctctgctggctcccccaggccccccaaactggctggggccccccacacaaagtgggacaccccgtggcggagccctgctgctgctaagaaacagcccccagcccctgcggcgggcagcctcggggggcagtggcagtgagaatgtgggcccccctgctgccgcggtgcccgggcccctgagccgcagcaccagtgtcgcttcccacatcctcaatggttcttcccacttctattcctgaggtgcagcggggaggagcagatgagctgggcagggcaggggtgggtggagcctgaccctggagggcactgagctggaggcccctgcaagggtaggggacaagatgtaggctccagctcccctcagacctcctcatctcatgagcttcttggggctggccagtggcccagggccagcttggcgataggtgcctcaaggctgcctgggagccccgcctccctaccatggtgccaggggtctccctccgccacctaggaaaggagggagatgtgcgtgtcaaatattcatctagtcccctgggggaggggaagggtgggtctagacatactatattcagagaactatactaccctcacagtgaggccctcagacctgccacagggcagagcaggtctggggcctgaggcagggagaatgagaggccaccttactggcaggaaggatcaggatggggtcttggggtcaggatgcctgggtctcttcccgtaactgtctgacgtcctgtgccgtcttgtcctttatctttttttttttttttttaattgggatcagggctggggcggggaaacaagggaaggaccttggaaggggctgctcccaggcctggggggcagtcgtgggagcccctctcagctgtggggctggcacagagccccaggcaagcttttaataaactgttggttattctaacaga

SEQ ID NO: 149519 - protein, 873 aa, Artificial Sequence
  derived and/or modified sequence
MSFIMKLHRHFQRTVILLATFCMVSIIISAYYLYSGYKQENELSETASEVDCGDLQHLPYQLMEVKAMKLFDASRTDPTVLVFVESQYSSLGQDIIMILESSRFQYHIEIAPGKGDLPVLIDKMKGKYILIIYENILKYINMDSWNRSLLDKYCVEYGVGVIGFHKTSEKSVQSFQLKGFPFSIYGNLAVKDCCINPHSPLIRVTKSSKLEKGSLPGTDWTVFQINHSAYQPVIFAKVKTPENLSPSISKGAFYATIIHDLGLHDGIQRVLFGNNLNFWLHKLIFIDAISFLSGKRLTLSLDRYILVDIDDIFVGKEGTRMNTNDVKALLDTQNLLRAQITNFTFNLGFSGKFYHTGTEEEDEGDDCLLGSVDEFWWFPHMWSHMQPHLFHNESSLVEQMILNKKFALEHGIPTDMGYAVAPHHSGVYPVHVQLYEAWKKVWNIKITSTEEYPHLKPARYRRGFIHKNIMVLPRQTCGLFTHTIFYKEYPGGPKELDKSIQGGELFFTVVLNPISIFMTHLSNYGNDRLGLYTFVNLANFVKSWTNLRLQTLPPVQLAHKYFELFPDQKDPLWQNPCDDKRHRDIWSKEKTCDRLPKFLVIGPQKTGTTALYLFLVMHPSILSNSPSPKTFEEVQFFNRNNYHRGIDWYMDFFPVPSNVTTDFLFEKSANYFHSEEAPKRAASLVPKAKIITILIDPSDRAYSWYQHQRSHEDPAALKFSFYEVISAGPRAPSELRALQKRCLVPGWYASHIERWLVYFPPFQLLIIDGQQLRTDPATVMDEVQKFLGVLPHYNYSEALTFDSHKGFWCQLLEEGKTKCLGKSKGRKYPPMDSDSRTFLSSYYRDHNVELSKLLHKLGQPLPSWLRQELQKVR

SEQ ID NO: 149520 - DNA, 2622 bp, Artificial Sequence
  derived and/or modified sequence
atgagcttcatcatgaagctgcacagacacttccagagaaccgtgatcctgctggccaccttctgcatggtgagcatcatcatcagcgcctactacctgtacagcggctacaagcaggagaacgagctgagcgagaccgccagcgaggtggactgcggcgacctgcagcacctgccctaccagctgatggaggtgaaggccatgaagctgttcgacgccagcagaaccgaccccaccgtgctggtgttcgtggagagccagtacagcagcctgggccaggacatcatcatgatcctggagagcagcagattccagtaccacatcgagatcgcccccggcaagggcgacctgcccgtgctgatcgacaagatgaagggcaagtacatcctgatcatctacgagaacatcctgaagtacatcaacatggacagctggaacagaagcctgctggacaagtactgcgtggagtacggcgtgggcgtgatcggcttccacaagaccagcgagaagagcgtgcagagcttccagctgaagggcttccccttcagcatctacggcaacctggccgtgaaggactgctgcatcaacccccacagccccctgatcagagtgaccaagagcagcaagctggagaagggcagcctgcccggcaccgactggaccgtgttccagatcaaccacagcgcctaccagcccgtgatcttcgccaaggtgaagacccccgagaacctgagccccagcatcagcaagggcgccttctacgccaccatcatccacgacctgggcctgcacgacggcatccagagagtgctgttcggcaacaacctgaacttctggctgcacaagctgatcttcatcgacgccatcagcttcctgagcggcaagagactgaccctgagcctggacagatacatcctggtggacatcgacgacatcttcgtgggcaaggagggcaccagaatgaacaccaacgacgtgaaggccctgctggacacccagaacctgctgagagcccagatcaccaacttcaccttcaacctgggcttcagcggcaagttctaccacaccggcaccgaggaggaggacgagggcgacgactgcctgctgggcagcgtggacgagttctggtggttcccccacatgtggagccacatgcagccccacctgttccacaacgagagcagcctggtggagcagatgatcctgaacaagaagttcgccctggagcacggcatccccaccgacatgggctacgccgtggccccccaccacagcggcgtgtaccccgtgcacgtgcagctgtacgaggcctggaagaaggtgtggaacatcaagatcaccagcaccgaggagtacccccacctgaagcccgccagatacagaagaggcttcatccacaagaacatcatggtgctgcccagacagacctgcggcctgttcacccacaccatcttctacaaggagtaccccggcggccccaaggagctggacaagagcatccagggcggcgagctgttcttcaccgtggtgctgaaccccatcagcatcttcatgacccacctgagcaactacggcaacgacagactgggcctgtacaccttcgtgaacctggccaacttcgtgaagagctggaccaacctgagactgcagaccctgccccccgtgcagctggcccacaagtacttcgagctgttccccgaccagaaggaccccctgtggcagaacccctgcgacgacaagagacacagagacatctggagcaaggagaagacctgcgacagactgcccaagttcctggtgatcggcccccagaagaccggcaccaccgccctgtacctgttcctggtgatgcaccccagcatcctgagcaacagccccagccccaagaccttcgaggaggtgcagttcttcaacagaaacaactaccacagaggcatcgactggtacatggacttcttccccgtgcccagcaacgtgaccaccgacttcctgttcgagaagagcgccaactacttccacagcgaggaggcccccaagagagccgccagcctggtgcccaaggccaagatcatcaccatcctgatcgaccccagcgacagagcctacagctggtaccagcaccagagaagccacgaggaccccgccgccctgaagttcagcttctacgaggtgatcagcgccggccccagagcccccagcgagctgagagccctgcagaagagatgcctggtgcccggctggtacgccagccacatcgagagatggctggtgtacttcccccccttccagctgctgatcatcgacggccagcagctgagaaccgaccccgccaccgtgatggacgaggtgcagaagttcctgggcgtgctgccccactacaactacagcgaggccctgaccttcgacagccacaagggcttctggtgccagctgctggaggagggcaagaccaagtgcctgggcaagagcaagggcagaaagtacccccccatggacagcgacagcagaaccttcctgagcagctactacagagaccacaacgtggagctgagcaagctgctgcacaagctgggccagcccctgcccagctggctgagacaggagctgcagaaggtgagatag

SEQ ID NO: 149521 - DNA, 2622 bp, Artificial Sequence
  derived and/or modified sequence
atgagcttcataatgaagttgcaccgccactttcagaggacggtcattctcctggccaccttttgtatggtctccattattatttcagcctactatctttactctggttataagcaggagaacgaactgtccgaaaccgcctctgaggtggactgcggagacctccagcatcttccttaccagctgatggaagtgaaggctatgaaattgttcgacgctagccgcacggaccccaccgtcctggtctttgttgagagtcagtactcgagcctcggccaagatatcattatgatcctggagtcttcgcgcttccagtaccacatagagattgctccggggaagggggacctgcctgtcctgatcgataagatgaagggcaaatatattctgataatttatgaaaatattctgaagtatattaacatggatagttggaaccggtccctgctcgacaagtactgtgtggaatatggtgtgggcgtgatcggctttcataagaccagcgaaaaatcagtgcagagctttcagttgaaggggtttcctttttctatctacggaaacctggcggttaaggattgttgcatcaacccgcactcgcccctgataagggtcaccaagtcctcgaagcttgagaagggttcattgccgggcacagactggaccgtttttcaaatcaaccattccgcctatcaacctgttattttcgccaaggtcaaaactccggaaaatctgtctcctagcataagcaagggcgccttttacgccactatcattcacgacctagggcttcatgacggcatccagcgggtccttttcggtaacaatctcaacttttggctgcacaaactaatttttattgatgcaataagctttttgtctgggaagcgcctgaccttgagcctggacaggtatatacttgtcgacatcgacgacatttttgtgggcaaggagggaacccggatgaatactaacgatgtgaaggcgttgctggacactcaaaatctcctcagggcgcaaatcaccaatttcacattcaacctggggttcagtggcaagttttatcataccgggaccgaggaggaagatgagggtgacgactgcttgctgggcagcgtggacgaattctggtggttcccccacatgtggagccatatgcagccgcacctttttcacaatgaatctagcttggtcgaacagatgattctgaacaagaagttcgcactggaacatggcattcctacagacatggggtatgccgtagccccccatcattcaggggtgtacccggtgcacgtgcagctgtatgaggcctggaagaaagtctggaacattaagatcaccagtactgaggagtatccacacctgaagccagctcggtatcgacgaggctttatccataaaaacatcatggtgcttccccgacagacatgtgggctctttacccataccatcttttataaagaatatccaggtgggccaaaggagctggataagtccattcaaggaggagaattatttttcactgtggtgctaaatcctatctccatttttatgacacacctgagcaattacggcaatgatcgtctaggtctgtacacattcgtgaacctggccaatttcgtcaagagctggacaaacctgcgcctgcagacactgccgccagtgcaacttgcgcacaagtattttgagttgttccccgaccagaaagaccctctgtggcagaatccctgtgatgacaagcggcatagagacatctggagcaaggagaaaacttgtgataggttacctaagtttttggtaataggaccgcaaaagaccggaacgactgccctgtatctctttctcgtcatgcacccgtctattttaagtaattcgccatctccaaagaccttcgaggaggtgcagtttttcaatcgcaataactaccaccgaggaatagattggtacatggattttttccccgtaccgtctaatgtgacgacagactttctgttcgagaagagcgcaaactattttcatagcgaggaagcaccaaagagagccgcctcactagtgccaaaggcaaagataattacaattttaatcgaccctagcgaccgagcctactcttggtatcagcaccaaaggagtcacgaggatcctgccgcattgaaattctctttttacgaggtcatcagcgctggcccccgcgctccttcagagctgagggcgctgcagaagaggtgcctggtcccaggatggtatgcgtcccacatagaaagatggctggtctactttccaccttttcagctcctgatcatcgatggtcagcagctgcggactgatcctgccactgttatggatgaagttcagaagtttttaggcgtgctgccacactacaattatagcgaagccctcacattcgactcccataagggtttttggtgtcagctgctagaagaagggaagacaaagtgcctaggaaaatcaaaagggagaaagtatccccctatggatagcgacagccggacatttctatcttcatattatcgtgatcacaacgtggaactctctaaactgttgcacaagttggggcaacctctcccctcgtggctgaggcaagaactgcagaaagtccggtag

SEQ ID NO: 149522 - DNA, 2622 bp, Artificial Sequence
  derived and/or modified sequence
atgtccttcatcatgaagctgcaccgccacttccagaggacagtcatcctgctggccaccttctgcatggtgtccatcatcatcagcgcctactacctgtacagcggctacaagcaggagaatgagctgtctgaaacagccagcgaggtggactgtggggacctgcagcacctgccctaccagctgatggaggtgaaggccatgaagctgtttgatgccagcaggacagaccccaccgtgctggtgtttgtggagagccagtacagcagcctgggccaggacatcatcatgatcctggagagcagccgcttccagtaccacatcgagatcgcccctgggaagggggacctgcctgtgctgattgacaagatgaagggcaagtacatcctgatcatctatgagaacatcctgaagtacatcaacatggacagctggaacagaagcctgctggacaagtactgtgtggagtatggagtgggcgtcatcggcttccacaagaccagcgagaagtctgtgcagagcttccagctgaagggcttccccttcagcatctacggcaacctggccgtgaaggactgctgcatcaacccccacagccccctcatccgggtgaccaagagcagcaagctggagaagggcagcctgcccggcacagactggacagtgttccagatcaaccacagcgcctaccagcccgtcatctttgccaaggtgaagaccccagagaacctgagccccagcatcagcaagggggccttctacgccaccatcatccatgacctgggcctgcatgatggcatccagagggtgctgtttggaaacaacctgaacttctggctgcacaagctgatcttcattgatgccatctccttcctgagcggcaagaggctgaccctgagcctggaccgctacatcctggtggacattgatgacatctttgtgggcaaggagggcaccaggatgaacaccaatgatgtgaaggccctgctggacacccagaacctgctgcgggcccagatcaccaacttcaccttcaacctgggcttcagcggcaagttctaccacactggaacagaggaggaggatgaaggagatgactgcctgctgggctctgtggatgagttctggtggttcccccacatgtggagccacatgcagccccacctgttccacaatgaaagcagcctggtggagcagatgatcctgaacaagaagtttgccctggagcacggcatccccacagacatgggctatgctgtggccccccaccacagcggcgtgtaccctgtgcacgtgcagctgtatgaggcctggaagaaggtgtggaacatcaagatcaccagcacagaggagtacccccacctgaagccagcccgctacagaagaggcttcatccacaagaacatcatggtgctgccccggcagacctgtggcctcttcacccacaccatcttctacaaggagtacccaggcggccccaaggagctggacaagagcatccagggcggggagctgttcttcaccgtggtgctgaaccccatcagcatcttcatgacccacctgagcaactatggaaatgaccggctgggcctgtacacctttgtgaacctggccaactttgtgaagtcctggaccaacctgcggctgcagaccctgccccctgtgcagctggcccacaagtactttgagctgttcccagaccagaaggaccccctgtggcagaacccctgtgatgacaagaggcaccgggacatctggagcaaggagaagacctgtgaccggctgcccaagttcctggtgattggcccccagaagacaggcaccacagccctgtacctgttcctggtgatgcaccccagcatcctgagcaacagccccagccccaagacctttgaggaggtgcagttcttcaacagaaacaactaccaccggggcatcgactggtacatggacttcttccctgtgcccagcaatgtgaccacagacttcctgtttgagaagagcgccaactacttccacagcgaggaggcccccaagagagctgccagcctggtgcccaaggccaagatcatcaccatcctgattgaccccagcgaccgggcctacagctggtaccagcaccagaggagccatgaggaccctgctgccctgaagttctccttctatgaggtgatctctgctggcccccgggcccccagcgagctgcgggccctgcagaagcgctgcctggtgcccggctggtacgccagccacatcgagcgctggctggtgtacttcccccccttccagctgctgatcattgatggccagcagctgaggacagatcctgccaccgtgatggatgaggtgcagaagttcctgggcgtgctgccccactacaactacagcgaggccctgacctttgacagccacaagggcttctggtgccagctgctggaggagggcaagaccaagtgcctgggcaagagcaagggcaggaagtacccacccatggacagcgacagcaggaccttcctgagcagctactacagagaccacaacgtggagctgagcaagctgctgcacaagctgggccagcccctgcccagctggctgcggcaggagctgcagaaggtgaggtag

SEQ ID NO: 149523 - DNA, 5961 bp, Artificial Sequence
  derived and/or modified sequence
ccggtcccttggcgacgggtcttgcatgtgacactcttgccctctagtgcctcaccagcttggtagcagtttgatggctaatattaataagatgttacataacatgagagtactgggccaggactggtgttgctaccacttgtaaagtcaaaaagcctgagccgatggtaacgagtggtactgtttccgtttcttttccatctattgcaactttctcaagcattttcagctctgaactttaattccagactgtattttctgtgagtcctgatcaagtgatacaaatgagctgcaatggtgacataaactcttgacagagattggaaaagtagctggaacaccatcttttcttttaactttttatggtgcttctgttggcatagttggggaaagcacctacaacatgagttttatcatgaagcttcacagacactttcaaagaacagtcattctgcttgccactttttgtatggtgagcattatcatttctgcttactacctgtacagtggctacaaacaggaaaatgaactctctgagacggcttcagaagttgactgtggcgacctccaacacctaccatatcaactaatggaagtgaaagcaatgaagctttttgatgcctcaaggacagaccccacagtcctagtatttgtagagagccagtactcatctcttggtcaagacatcattatgattctagaatcaagtagattccagtatcacattgaaattgcccctggaaagggagatctcccagtgcttatagacaaaatgaaaggcaaatacattctcattatttatgagaatattttaaagtatataaatatggattcctggaatcgaagccttctagataaatactgtgtagaatatggtgtgggtgtcattggattccacaaaactagtgagaagagtgtacagagctttcagttaaaaggtttccctttttccatatatggaaatcttgcagtaaaagattgttgtattaatcctcattctccattgattcgtgtgaccaaatcttccaagcttgaaaaaggttctttacctggaactgactggacagtttttcagattaatcattcagcctatcaaccagtaatatttgccaaagtaaagaccccagaaaacctttctccttccatctctaaaggtgctttttatgccactattatacatgacctggggcttcatgatggaattcaaagggttctttttggcaacaacttgaacttttggctgcacaagctcatcttcatagatgccatctccttcttatcagggaagaggctgacattgtccttggacaggtacattcttgtggatattgatgatatatttgtgggaaaagagggaacaagaatgaacaccaatgatgtaaaggccctgcttgatactcagaatcttttgcgtgcacaaatcacaaattttacattcaacctgggattttcagggaaattttaccatacaggaactgaagaggaagatgaaggagatgactgtctgttggggtctgtggatgagttctggtggtttcctcacatgtggagccatatgcagccccacctcttccacaatgagtcatctttggtggagcagatgattctcaacaaaaaatttgccttagagcacggcattccaacggacatgggctacgctgtggcccctcaccattcgggcgtctaccctgtacatgttcagctttatgaggcctggaagaaggtctggaatattaaaatcaccagcactgaagaatatccacatctgaagccagctagataccggaggggttttatccacaaaaacatcatggttctcccaagacaaacctgtgggcttttcactcacaccattttctacaaagaatatccagggggtcctaaagagctggataagagtatccaaggaggagaacttttcttcactgtcgtcctcaaccctatcagcattttcatgacccatttgtccaactatgggaatgaccgactgggattatatacatttgttaatctggccaactttgtgaagagctggaccaacctgcgacttcagactctgcctccagtacaactggcccacaagtattttgagctgtttcctgatcagaaagaccctctctggcagaatccttgcgatgacaaacgccacagagacatttggtctaaagaaaaaacttgtgatcgcttaccaaaattcttggtaataggaccccagaaaactggtaccactgctttgtatttgttcctggttatgcatccttccatccttagtaactcccccagcccaaaaacctttgaggaggtacagttctttaatagaaataactaccacagggggattgattggtatatggatttcttcccagtcccatctaatgtcactaccgactttttgtttgagaagagtgccaattacttccactcagaggaagcccctaaaagagctgcttctctggttcccaaagccaagattatcaccattctcattgacccttcagaccgagcatactcctggtaccagcatcagcgatcacatgaagaccctgcagctctgaagtttagcttctacgaagtgatctcagcagggccccgtgcaccctcggagctcagagccttgcagaagagatgtttggtcccggggtggtatgccagccacatcgagagatggcttgtttatttccccccatttcagttgctaattattgatgggcaacaactaagaactgatcctgctacagtgatggatgaagtacagaagtttctaggagtcttgcctcattataattactcagaagctttaacgtttgattctcataaaggtttctggtgtcagttactggaagaaggtaaaacaaaatgccttggaaagagcaaaggaagaaaataccctccaatggattctgatagcaggacatttctgtcaagctactatcgagatcacaacgtggaactctcaaagctgctgcacaaactgggtcagcctctgccatcctggctgagacaggagctgcagaaagtaagatagcactgagagaaaacttgagacttcatcgtccatgtagaacacaccttttccaaagcttccagaagctaccaaaaggcagttgaaaaatatacctcttcaaatgagaaaaaagaacagtttcttccatgtgctggcacgtggatgattagaaaaaaagaaaaagtatgtgttacaagccttgaggcctgtggcctttctcttaacccatatctgagcctgtgggattattgtagactactgtgcactcatgtggaagtcaattgcaaccaacataaatatcaaacacaaatgcagaactgttccatttcatagtaatatttacacttttatatatcaactaagattgtgtctctgtaggtttttagaccactgtttgcctgtacgatgttttcttattattttattctataaagtgtcctatgaaacaagaagcaaaataaacatcacaatgtagcataaaatgtcaaaagcataacacccatgaaaaatgcttgccaaaatttaaatccacttaagtatttagaaataattgtaaattataatttgtgctagatcagagtggaaaagttatatatgagtgttatctgcaccaaaaaaaaataagtgctatagcaaaagtgattttttcatatacatagtctagtgaatatatgtaaaaattactaactcttccatcacaacgtaattgttatactgaaatatatactgtaaagctgttggatggtaaatagaaacacatcaagtacaccaaaacagtaaataacaatgtaaagtgtactgactgaatcctctaaaagggagaaattgtaggggtctaaaaacatatcatcgagaattctatgtccacttgctgtaagctgtgaatctatcccagtagtcctcactagttctacagaaatgcatgcctagagtctgaggtatgtgtcatctccagaaacaggttgacttttaaatgtgaatagctatttttaatgctccccaaaacaaaacctattaaactaaaactaaaaacagtttccctagatgatgtggttaggctatttacatttaggttattaaaaaattgcattttcccagatagttcaaaataaaattatgtaatgtagtagagatttataacaaaaaacaaattaatatattatttgtaatctaatgtttgcaatgatacttttgatataaggcaaagaaacataagcagagcagaggcccatttttgaaaatatttcacccatcactctggtggaagtaacagatcataggtacaattaaggattagctactaaattaaatgcaggaagtacaaagatgagcaagtcatgctcttgaaatatatttacatttcaattgtaaataatatatatggttaataaagtttccaaaaaagaaaagaatacatcatacttattttcctgttaatatttacttaatttttttttttgagagggggacagagtctcactatgtcacccaggctggagtgcaatggtgtgatctcagctcactgcaacctccgcctcctgggttcaagtgattctcctgcctcagcctcctgaggagctgggattacagccatgcaccaccacgcccgggtaatttttgtatttttagtagtgacagggtttcaccatgttgactaggctgatcttgaactcctgacctcatgatccacccaccttggcctctcaaagtgctgagattacaagcgtgagccaccatgccctgactacttaatttttaaatgtactgtacatatacataaaatttaagtagtaaattaattccctgctatgattataagcctttataaaatattatcaaaggtatgattagaaacaaatgggaggaaaacccatagtaaaaatattttcattgtcattttaatgggtaaaactatcaattactaattagaaaatgaattgtgagatccacttactataaatttttaactgtacattataattacttttttaaagtttcatgtacctaaagcatatgctaatttttaaatatactattagcagaaaaaattggaaaaatcaccaatttttaagactcttgactctaaaagcaaaatcaaagtgatttggacaaatatgggaaacacagtcttcatgcttactgctgtctcttttatagcagcagatgccagacatgctaggaaaattactatagtcttccatctccaccaacttaagaaaactggcttaggaaggttaaacatgagaataggcctcagcagttatatacagtgtcatgttttcatttggcaacaacatttattctaataaaaaaagaaaagaaaaactgatacatttatgctttaatggtaagatgtacatttgaactgctaagcaaagctgctaatggcctattttgtttaggtaaatcgagttgactgaacacttcatccttttaaatagatgtcaaaaacatactccgtgtttgtataaagacaggagaaaaaggaagagatcttaccaaaatttattcattcacaagtacatgtattacgctagctagagcagcaaacctgtgaaaggatttttgaccactcaatgtgtcttgaagacagcatcaaattctagaggacatgcatactttccacattatatactccaactggttaatatgctaatctgaaagtaacataaatacatatgagagaataatgagagataatctgatttaaaactagctttgtatagaattccctttttcattgtttaaaatatgaaacttcctcaggaagaaatgaaatggttatttcaatgtttatagctgtaatattcttgtcattcacattgaatgaaaattactggaaacatttttttctctgagttttttaaaataaaaaacctagatataattctgatagtagcatggtacctcatatgtacaacaataaactgataggaaaatgaagagtttggacctgg

SEQ ID NO: 149524 - DNA, 2622 bp, Artificial Sequence
  derived and/or modified sequence
atgagcttcatcatgaagctgcaccggcacttccagcggaccgtgatactcctggccaccttttgcatggtgagtatcattatcagcgcgtactacttgtacagcggatacaaacaggagaacgaactgtccgagaccgcttcagaagtcgattgcggcgacctccaacacttgccatatcaattgatggaagtgaaggctatgaagttgttcgatgcaagccggactgatcccaccgtgttagttttcgtggaatctcagtacagctccctgggtcaagacataattatgattctggagtccagccggttccaatatcacatagagattgcaccggggaaaggcgaccttccagtgttgattgataaaatgaagggcaaatacattctcatcatttacgaaaatatcctgaaatacatcaatatggacagttggaaccgatctctgctggataaatactgcgttgagtacggagtcggggtcatcggctttcacaaaacaagtgagaagtcagtccagagcttccagctaaagggattcccgttttcgatctatggcaatcttgccgtcaaagactgttgcataaatccgcactccccactgatcagggtgacaaaaagcagtaagctcgagaagggctctctgcccggtactgattggacggtgttccaaataaatcacagcgcctaccagcctgtgattttcgctaaggtaaagacgccagagaacctgtctccctctatctccaagggcgcgttttatgccacaatcatacacgaccttggattacacgatggcatccaacgggtgctattcggaaacaacctgaatttctggcttcataagctcatcttcatcgacgccatcagtttcctatccgggaaacggctgactctgagtctggataggtatattcttgttgacatcgatgacatcttcgtgggtaaggaggggactcgtatgaacacaaatgacgtgaaggcattgttggatacacaaaatctgctcagagcccagatcacgaactttacattcaacctcgggttcagcggtaagttttatcacaccggcaccgaggaagaagatgagggggacgactgccttttgggctccgtggatgagttctggtggttcccgcacatgtggtcacatatgcagcctcatctgtttcacaatgagtcatccctagtagaacagatgatactgaataaaaagttcgcgctggaacatgggatccctaccgacatgggttacgccgtcgccccccatcacagtggtgtgtatcccgtacatgtgcagttgtatgaagcatggaaaaaggtgtggaatatcaagatcaccagcacagaagagtacccgcacctcaaaccagcacgttacagacgggggttcattcacaagaatatcatggtactgccgaggcaaacctgcgggctctttacacacacaattttctacaaggagtacccagggggaccaaaggaactggataaaagtattcaaggaggtgagctgtttttcacagtggtactcaacccgataagtatttttatgactcatctgtccaactatggcaacgaccggctcggactctataccttcgttaacctcgccaatttcgtaaagagctggaccaatctgcgtctacagacactgccccccgtgcagctcgcacacaaatactttgagctattccctgaccagaaagaccccctgtggcagaacccatgcgacgacaagaggcaccgcgacatctggagtaaggagaagacctgcgataggttgccaaaatttctggtcatcggccctcaaaagactgggacgacagcgttgtatctttttcttgtgatgcatcccagcatcctgtccaacagccccagcccaaaaacatttgaagaggtacaatttttcaacagaaacaattatcacagaggaatcgactggtacatggattttttccctgtcccctccaacgtcacgacagacttcctgtttgaaaaaagcgccaattatttccactcagaggaagcgccaaagagggctgctagcctggtgcctaaggcaaagatcataaccatcctgatcgatccgagcgatcgggcatacagctggtaccaacatcagaggagccatgaggacccagccgccttaaaatttagtttctatgaagtcatctctgccgggcctagggccccctcggaattaagggccctccaaaagcggtgcttggttccagggtggtacgcgtctcacatcgagagatggctcgtatatttccctccattccagttgttgataattgacggacaacagctgcggaccgaccctgctacggtaatggacgaggtacagaagtttcttggagtgctccctcactataattatagcgaggcactcacatttgatagtcacaagggattctggtgccaacttcttgaggaggggaaaactaaatgtcttggtaaatcgaaggggagaaagtatcctccaatggactctgattccaggacatttctgtcgtcgtactatcgcgaccataatgtcgaactgtctaaactgcttcacaaactaggccagccgctgccctcctggttgcgacaggagctgcaaaaggtcaggtag

SEQ ID NO: 149525 - DNA, 2622 bp, Artificial Sequence
  derived and/or modified sequence
atgtcttttatcatgaagttacaccggcactttcagcgtaccgtcattctactcgctactttttgcatggtttcaatcatcatttccgcctactatctttactctgggtataagcaggagaacgaactgagtgagaccgcgtctgaagttgattgtggcgatctgcagcacctcccatatcagttgatggaggtgaaggccatgaagctttttgacgccagtcgaaccgaccccacagtgctggtatttgtggaatctcagtacagttctcttgggcaggacatcatcatgatactcgagtcttccagatttcagtatcacattgagattgcacccggtaagggcgacctgcccgtgctcatagacaagatgaagggcaagtacatactgataatctatgagaacatcctgaaatacattaacatggacagctggaataggtctctccttgacaagtactgtgtcgagtacggagtgggagtgatcggatttcataaaacttcggagaagagcgtgcagtcattccagttgaagggcttccctttcagtatttacggcaatctggccgtcaaagactgttgtataaacccccacagccccctcatccgggtgacaaagagttccaagctcgaaaagggatcattgcccggaaccgactggactgtcttccagattaaccacagcgcttatcagccggtgatttttgctaaagtcaaaactcctgagaacctgtcaccatccattagtaaaggggctttttacgccacaattattcatgacctaggcctgcatgatggaatccaacgggtgctcttcggcaacaacctgaatttctggctgcacaagctcatttttattgatgcaatatctttcctgtccggcaaacggcttacattgtcacttgatcgctacatactggtcgatattgatgacatcttcgtcgggaaagaaggaacacgcatgaatactaacgatgttaaggcgctgctagatacccagaatttgctgagagcacaaataacaaacttcaccttcaacttaggcttcagtgggaagttttaccacaccggcaccgaagaagaggacgaaggcgatgattgcttgctgggtagtgtggatgaattctggtggttcccacatatgtggtcccacatgcaaccgcatctgttccacaacgaatcttctcttgttgagcaaatgattctgaataaaaaattcgccttggagcatgggatcccgaccgatatgggctatgccgttgctccccaccactccggagtctatccagttcatgttcagctctacgaggcatggaagaaggtttggaacatcaagataacgtccacagaggaatacccacatctgaagccagctcgctacaggcggggttttatacacaaaaacatcatggtacttcccagacagacatgcgggctgttcacacacactattttttacaaggaataccccggaggtcccaaagagctggacaagtccattcaaggcggtgaactcttttttacagttgtgttgaaccccatcagcatcttcatgacacacctttcgaactatggtaacgatcgccttggcctgtacacattcgtaaacctcgccaacttcgtgaagtcttggaccaacctaagattgcaaacactgccgcctgtgcagcttgcccacaaatatttcgagctctttccggaccagaaggatccactgtggcagaatccttgtgacgacaaacgccatcgggacatttggtctaaagaaaagacttgcgaccgactgccaaagtttctggtgatcggaccccagaagacggggactaccgcgctgtacctgtttctggtcatgcacccttccatcttgagcaacagtccatctccaaagaccttcgaggaggtgcagtttttcaacaggaacaattaccatcggggaattgactggtacatggatttttttcctgtgccgtctaacgtgaccactgacttcctgtttgagaaaagcgctaactacttccattcggaggaggcaccgaaaagagccgcaagcctcgtaccgaaagccaaaattattacgatcctgatagacccttcagatcgggcatattcatggtatcaacaccagcgatctcatgaggatcccgctgctctgaaattctctttctacgaggtgatctccgccggtcccagggctcctagtgaactgcgcgctctgcaaaagaggtgcctagtgccaggttggtacgccagccatatcgagcggtggttggtctattttcctccgtttcaattactcattattgatggtcagcagctcagaactgacccagccactgttatggacgaggttcagaagtttcttggcgttctgccccattataactacagcgaggccctcacatttgattcccataaaggcttctggtgtcagctcttggaggaaggcaagacaaagtgcttgggtaagagcaaaggaagaaaatacccacctatggacagcgacagcaggacatttttaagctcttattaccgggaccataatgtcgaactgagtaaactgttacacaagttagggcagcccctgccatcgtggttgcgccaagagctgcaaaaagtacgatag

SEQ ID NO: 149526 - protein, 326 aa, Artificial Sequence
  derived and/or modified sequence
MAAPEPLRPRLCRLVRGEQGYGFHLHGEKGRRGQFIRRVEPGSPAEAAALRAGDRLVEVNGVNVEGETHHQVVQRIKAVEGQTRLLVVDQETDEELRRRQLTCTEEMAQRGLPPAHDPWEPKPDWAHTGSHSSEAGKKDVSGPLRELRPRLCHLRKGPQGYGFNLHSDKSRPGQYIRSVDPGSPAARSGLRAQDRLIEVNGQNVEGLRHAEVVASIKAREDEARLLVVDPETDEHFKRLRVTPTEEHVEGPLPSPVTNGTSPAQLNGGSACSSRSDLPGSDKDTEESGLHLSPTAAEAKEKARAMRVNKRAPQMDWNRKREIFSNF

SEQ ID NO: 149527 - DNA, 981 bp, Artificial Sequence
  derived and/or modified sequence
atggccgcccccgagcccctgagacccagactgtgcagactggtgagaggcgagcagggctacggcttccacctgcacggcgagaagggcagaagaggccagttcatcagaagagtggagcccggcagccccgccgaggccgccgccctgagagccggcgacagactggtggaggtgaacggcgtgaacgtggagggcgagacccaccaccaggtggtgcagagaatcaaggccgtggagggccagaccagactgctggtggtggaccaggagaccgacgaggagctgagaagaagacagctgacctgcaccgaggagatggcccagagaggcctgccccccgcccacgacccctgggagcccaagcccgactgggcccacaccggcagccacagcagcgaggccggcaagaaggacgtgagcggccccctgagagagctgagacccagactgtgccacctgagaaagggcccccagggctacggcttcaacctgcacagcgacaagagcagacccggccagtacatcagaagcgtggaccccggcagccccgccgccagaagcggcctgagagcccaggacagactgatcgaggtgaacggccagaacgtggagggcctgagacacgccgaggtggtggccagcatcaaggccagagaggacgaggccagactgctggtggtggaccccgagaccgacgagcacttcaagagactgagagtgacccccaccgaggagcacgtggagggccccctgcccagccccgtgaccaacggcaccagccccgcccagctgaacggcggcagcgcctgcagcagcagaagcgacctgcccggcagcgacaaggacaccgaggagagcggcctgcacctgagccccaccgccgccgaggccaaggagaaggccagagccatgagagtgaacaagagagccccccagatggactggaacagaaagagagagatcttcagcaacttctag

SEQ ID NO: 149528 - DNA, 981 bp, Artificial Sequence
  derived and/or modified sequence
atggctgcccccgagcccctccgacccagactttgccgtctggtgagaggggagcagggttacggtttccacctacacggagaaaaagggcgcagaggtcagttcatcagaagggtggagcccggatcacccgcagaggcagcggccctgcgcgcaggcgatcgtcttgtggaggtgaacggcgtaaacgttgagggggagacccatcatcaggtcgtgcagcggatcaaggccgtggagggtcaaacacggctgctggtggtcgatcaggaaactgacgaggagctgcggaggcgccagctaacttgcacagaagaaatggcccagaggggtttaccccctgcacacgacccctgggagcccaagccagattgggctcatactgggtctcactcctccgaggcagggaagaaagatgtctctggcccactgcgcgaactccggccccgtttatgtcacctccgcaaaggaccgcagggctacgggtttaatctgcattccgataagagccgacccggccagtatatcaggtccgtcgatcctggcagccctgcagcgcgatcaggactgcgggcccaggataggctaatcgaggtcaacggccagaatgtggaaggactccgtcacgcagaagtcgtggctagcatcaaggctcgggaagacgaagctaggctcctggtcgttgacccagaaactgatgagcattttaagcgactccgtgtcacacccacagaggagcacgtcgagggccctctcccgtcacccgtaacgaacggcacatcacctgcccaacttaatggcggatccgcttgctcgtcaaggtctgatttgcctgggagcgacaaggacactgaagagtcaggcctccacctgagccctacagcggccgaggcaaaggaaaaagcacgggcaatgagggtcaataaacgagcaccccagatggattggaatagaaaacgcgagatattcagcaacttctag

SEQ ID NO: 149529 - DNA, 981 bp, Artificial Sequence
  derived and/or modified sequence
atggccgcccctgagcccctgcggccccggctgtgccgcctggtgcggggggagcagggctacggcttccacctgcacggggagaagggcagaagaggccagttcatcagaagagtggagcccggcagccctgctgaggccgccgccctgcgggccggggaccggctggtggaggtgaatggagtgaatgtggagggggagacccaccaccaggtggtgcagaggatcaaggctgtggagggccagacccggctgctggtggtggaccaggagacagatgaggagctgcggcggcggcagctgacctgcacagaggagatggcccagaggggcctgcccccagcccatgacccctgggagcccaagccagactgggcccacacaggcagccacagcagcgaggccggcaagaaggatgtgtctggccccctgcgggagctgcggccccggctgtgccacctgaggaagggcccccagggctacggcttcaacctgcacagcgacaagagccggcccggccagtacatccgctctgtggaccccggcagccctgctgcccggagcggcctgcgggcccaggaccggctgattgaggtgaatggccagaatgtggagggcctgcggcatgctgaggtggtggccagcatcaaggcccgggaggatgaggcccggctgctggtggtggaccctgagacagatgagcacttcaagaggctgcgggtgacccccacagaggagcacgtggagggccccctgcccagccctgtgaccaacggcaccagccctgcccagctgaatggaggcagcgcctgcagcagcagaagtgacctgcccggcagtgacaaggacacagaggagagcggcctgcacctgagccccacagctgctgaggccaaggagaaggcccgggccatgagggtgaacaagagggccccccagatggactggaacaggaagcgggagatcttcagcaacttctag

SEQ ID NO: 149530 - DNA, 981 bp, Artificial Sequence
  derived and/or modified sequence
atggccgcccccgagcccctgcggccccggctgtgccggctggtgaggggagagcaggggtacgggtttcacctgcacggcgaaaaggggcggcggggtcagttcatcaggagagtcgaaccaggttcccctgccgaagccgcagctctgagggcaggagatagactcgtggaagttaacggcgtgaacgtggaaggcgagactcaccaccaggtcgtgcagcgcatcaaagccgtggaagggcagacacggttgctggtggttgatcaggagactgacgaagagctccggagacgtcagctcacctgcactgaggagatggcacagcgcgggctcccacctgctcacgacccttgggagccgaagccagattgggcccataccggatctcatagttccgaggccggaaagaaggacgtgtctggcccactccgcgaattgagacctcggctttgccatctgcggaagggcccacagggctacggatttaacttgcacagcgataaaagtcggccagggcagtacatacgcagtgtggatcccgggagtcccgcagcgaggtctgggttgcgagctcaggatcgcttgattgaggtgaatgggcaaaacgtggaggggctgcggcatgccgaggtggtcgccagcatcaaggcgagggaagatgaagcccgattgcttgtggtcgaccctgaaacagatgagcattttaagagacttagagtaactccaacagaagaacatgtcgaggggccactcccctccccagtaacgaatggtacgtcgcctgctcaactgaacgggggctcagcgtgttcttctcggagcgaccttccagggagtgacaaagacactgaggaatcaggactacacctctctccaacagctgctgaagccaaagaaaaggctagggctatgcgtgtgaacaaaagagccccccagatggactggaatcggaaacgcgagatcttttcaaacttctag

SEQ ID NO: 149531 - DNA, 981 bp, Artificial Sequence
  derived and/or modified sequence
atggctgcgccagagccactgagaccacggttatgtcgccttgtgcgcggagagcaagggtacggatttcatttacatggggagaagggaagaaggggccagtttatcagacgtgtggagccaggaagcccagctgaggcagccgctctccgggcaggggacaggctggtcgaggtgaacggggttaatgtggagggcgagactcatcaccaggtcgtgcagaggatcaaggccgtcgagggacagacaagacttttagtcgtggaccaagaaacggatgaggaactccggaggcgccagttaacttgcacagaagaaatggcgcagagagggttaccacctgcccacgatccttgggagccaaagcctgattgggcacacactggctcacactcatcggaagccggtaaaaaggacgtctcaggccctctgcgtgagctgagacctaggctgtgtcacctgagaaaaggacctcaggggtacgggttcaatctgcacagcgacaagtctcgacccggacagtacatcagatctgtggatccaggaagtccagccgcacgttccggattgagagcccaggacagactgattgaagtcaacggtcaaaacgttgaaggtctccgacatgctgaagtcgtggccagtattaaggcgagagaagatgaggcacgcctcttggtcgtcgatcccgaaactgatgagcacttcaaaagactgcgagtgacccctaccgaagaacatgtggagggaccgctgccaagcccagtaaccaatggaacgtcccccgcacagctgaatgggggatcagcatgttcaagccggtccgatttgcctgggagtgataaggacaccgaagagtccggattgcacctgagtcccaccgccgcagaggccaaagagaaagccagggccatgcgcgtcaacaagagggctccccagatggactggaaccgcaagcgggaaatcttttctaatttctag

SEQ ID NO: 149532 - DNA, 2141 bp, Artificial Sequence
  derived and/or modified sequence
gaggcgacgggagccgaacaggagccgccgctgaagccaccgccgggtgcccagcgccgccgccgcccccgagctcccccgcgcccctgcccgcgggcggccggtgggcagcgggcgccatggccgcgccggagccgctgcggccgcgcctgtgccgcttggtgcgcggagagcagggctacggcttccacctgcacggcgagaagggccgccgcgggcagttcatccggcgcgtggaacccggttcccccgccgaggccgccgcgctgcgcgctggggaccgcctggtcgaggtcaacggcgtcaacgtggagggcgagacgcaccaccaggtggtgcaaaggatcaaggctgtggaggggcagactcggctgctggtggtggaccaggagacagatgaggagctccgccggcggcagctgacctgtaccgaggagatggcccagcgagggctcccacccgcccacgacccctgggagccgaagccagactgggcacacaccggcagccacagctccgaagctggcaagaaggatgtcagtgggcccctgagggagctgcgccctcggctctgccacctgcgaaagggacctcagggctatgggttcaacctgcatagtgacaagtcccggcccggccagtacatccgctctgtggacccgggctcacctgccgcccgctctggcctccgcgcccaggaccggctcattgaggtgaacgggcagaatgtggagggactgcgccatgctgaggtggtggccagcatcaaggcacgggaggacgaggcccggctgctggtcgtggaccccgagacagatgaacacttcaagcggcttcgggtcacacccaccgaggagcacgtggaaggtcctctgccgtcacccgtcaccaatggaaccagccctgcccagctcaatggtggctctgcgtgctcgtcccgaagtgacctgcctggttccgacaaggacactgaggagagcggcctccacctgagccccacggcggccgaggccaaggagaaggctcgagccatgcgagtcaacaagcgcgcgccacagatggactggaacaggaagcgtgaaatcttcagcaacttctgagccccttcctgcctgtctcgggaccctgggacccctcccgcacggaccttgggcctcagcctgccccgagctcccccagcctcagtggactggagggtggtcctgccattgcccagaaatcagccccagccccggtgagcccccatcctgcccctgcccaccaggtactgggggcctgtggcagcaagatagggggagagagacccagagatgtgagagagagtcagagacagagacagagagagagagagagagacacagagagagacagagagagagcgagcgagcgcgcggcagccgcggggcgagggcctttgctgctctgccggggcctgctgactgaaaggaatttgtgtttttgctttttttccaaaaagatctccagctccacacatgtttccacttaataccagagacccccccccttcccctcccccttcccctcccccttgggacgcgctctaaataattgcaataaaacaaacctttctctgcaaaccatttcctccccgccccctcccctcagcagcggccgtcctgagtgggagtccctgggacttcccagtggccaagttggggcgcccagcctcttcgtggggaccttgggtaaggccagggaggcctgatgtggccgtaggagctgcccctgcccacctgccctggtgtgggggtccctaggccacaccctgctccccacccagctaccctgtgcgcctgtgccctgctgggggcctgggctctccgaggggcctgaggatggaggccccacgtccccgaggagggcggcctctggacaggcccctcattccgcgcggcagctcccaggcctggggaacgtaggtgtgtgagagcggcacccgggaaggacgcctggcctctggctcagccctgcttggcgggctcccccgtggacaccctgttgactttgcacttccctcccgggccccgcacccccgaaccgaccaccgatcgaccggcaccgctgttgcctcgtaagccatagcgcatgcgcgctctcaggataaacaggccctgcctggg

SEQ ID NO: 149533 - protein, 289 aa, Artificial Sequence
  derived and/or modified sequence
MVGVKPVGSDPDFQPELSGAGSRLAVVKFTMRGCGPCLRIAPAFSSMSNKYPQAVFLEVDVHQCQGTAATNNISATPTFLFFRNKVRIDQYQGADAVGLEEKIKQHLENDPGSNEDTDIPKGYMDLMPFINKAGCECLNESDEHGFDNCLRKDTTFLESDCDEQLLITVAFNQPVKLYSMKFQGPDNGQGPKYVKIFINLPRSMDFEEAERSEPTQALELTEDDIKEDGIVPLRYVKFQNVNSVTIFVQSNQGEEETTRISYFTFIGTPVQATNMNDFKRVVGKKGESH

SEQ ID NO: 149534 - protein, 166 aa, Artificial Sequence
  derived and/or modified sequence
MDLMPFINKAGCECLNESDEHGFDNCLRKDTTFLESDCDEQLLITVAFNQPVKLYSMKFQGPDNGQGPKYVKIFINLPRSMDFEEAERSEPTQALELTEDDIKEDGIVPLRYVKFQNVNSVTIFVQSNQGEEETTRISYFTFIGTPVQATNMNDFKRVVGKKGESH

SEQ ID NO: 149535 - DNA, 501 bp, Artificial Sequence
  derived and/or modified sequence
atggacctgatgcccttcatcaacaaggccggctgcgagtgcctgaacgagagcgacgagcacggcttcgacaactgcctgagaaaggacaccaccttcctggagagcgactgcgacgagcagctgctgatcaccgtggccttcaaccagcccgtgaagctgtacagcatgaagttccagggccccgacaacggccagggccccaagtacgtgaagatcttcatcaacctgcccagaagcatggacttcgaggaggccgagagaagcgagcccacccaggccctggagctgaccgaggacgacatcaaggaggacggcatcgtgcccctgagatacgtgaagttccagaacgtgaacagcgtgaccatcttcgtgcagagcaaccagggcgaggaggagaccaccagaatcagctacttcaccttcatcggcacccccgtgcaggccaccaacatgaacgacttcaagagagtggtgggcaagaagggcgagagccactag

SEQ ID NO: 149536 - DNA, 870 bp, Artificial Sequence
  derived and/or modified sequence
atggtgggggtcaaacctgtcggctctgatcccgactttcaacctgagttgagcggagccgggagccggctagccgtcgtcaagttcacaatgcgaggatgtggaccgtgcttgagaattgcccccgctttctcctcaatgtccaataaatacccacaggccgtttttctggaagtcgatgtccatcagtgccagggaacagctgccaccaacaacatttcagctactcccacgttcttgttcttccgcaacaaggtcaggattgatcagtaccagggagcagacgccgtgggcctagaggaaaaaatcaaacagcacctggaaaacgaccccgggagcaacgaagataccgatatacctaagggttacatggacctcatgccttttatcaataaagctggctgtgagtgccttaatgaatcagacgagcacggattcgacaattgccttcgaaaggatacaaccttccttgagagtgactgcgatgagcagctcctaatcacagtggcttttaaccagccagtcaagctctattcgatgaagtttcagggccctgataacggtcaggggcctaaatacgtgaaaatttttatcaatcttccacggtcaatggattttgaggaggctgagcggagtgagccaacacaagccctggaacttaccgaagacgacattaaggaagatggcattgtgcccctgcgatatgtgaagttccagaacgtgaatagcgttacaatttttgtgcagtctaatcagggtgaagaggagactacacgcatctcgtactttaccttcatcggaacacccgtgcaggcaactaatatgaatgattttaaacgggtcgtcggcaagaaaggcgagtcccactag

SEQ ID NO: 149537 - DNA, 501 bp, Artificial Sequence
  derived and/or modified sequence
atggatctgatgccattcattaacaaagcaggctgcgaatgcctcaatgaaagcgatgaacacggatttgacaattgcctgagaaaggataccacatttctggaaagtgattgtgatgaacagctgctcatcactgtggcgtttaaccagcctgtaaagctgtattctatgaagtttcaaggtcccgacaatgggcaaggcccgaaatacgtgaagatctttataaatcttcccagaagcatggatttcgaggaggctgaacggtcggagcctacccaagctctggagctgactgaggatgacataaaagaggatggaattgtgccactgaggtatgtgaaattccagaatgtaaatagcgtgacaattttcgtgcaatcaaatcagggcgaagaagaaaccaccagaatttcctacttcacctttatcggtacacccgtccaggctaccaacatgaacgatttcaaacgtgtggtcgggaagaaaggcgagtctcattag

SEQ ID NO: 149538 - DNA, 870 bp, Artificial Sequence
  derived and/or modified sequence
atggtgggcgtgaagcctgtgggcagtgaccctgacttccagcctgagctgagcggggccggcagccggctggccgtggtgaagttcaccatgaggggctgcggcccctgcctgcgcatcgccccagccttcagctccatgagcaacaagtacccccaggccgtgttcctggaggtggatgtgcaccagtgccagggcacagctgccaccaacaacatcagcgccacccccaccttcctgttcttcaggaacaaggtgagaattgaccagtaccagggcgcagatgctgtgggcctggaggagaagatcaagcagcacctggagaatgaccccggcagcaatgaagacacagacatccccaagggctacatggacctgatgcccttcatcaacaaggccggctgtgagtgcctgaatgaaagtgatgagcacggctttgacaactgcctgaggaaggacaccaccttcctggagagtgactgtgatgagcagctgctgatcaccgtggccttcaaccagcctgtgaagctgtacagcatgaagttccagggccctgacaatggccagggccccaagtatgtgaagatcttcatcaacctgcccaggtccatggactttgaggaggccgagaggtctgagcccacccaggccctggagctgacagaagatgacatcaaggaggatggcatcgtgcccctgcgctacgtgaagttccagaatgtgaacagcgtgaccatctttgtgcagagcaaccagggcgaggaggagaccacccgcatctcctacttcaccttcatcggcacccctgtgcaggccaccaacatgaatgacttcaagagggtggtgggcaagaagggggagagccactag

SEQ ID NO: 149539 - DNA, 6938 bp, Artificial Sequence
  derived and/or modified sequence
tggctgctgggtgccgcacgccttcccatcctcctcctctcccctcccccatccctccccgccccctcggccgctccgctccctggcgtgactcggcactgagagtcccgggagaagactcggcggtcgccacctcttctgtccaggcctcggccttcctgagcatctctccttcctctcccagatcgtcttctccttcagtttcaaagccagtggcgtcgcggccaccctgccgggctctctgtgaggatggtgggggtgaagcccgtcgggagcgacccggatttccagccagagctgagcggcgcgggctccagactcgccgtggtcaagttcaccatgagagggtgtgggccatgtttgaggattgccccagcattcagttctatgagtaataaatatccacaggctgttttcttggaagtcgatgtacatcagtgtcagggaacagctgccaccaacaatatatcagcaacacctacatttttgttttttcgaaacaaagtgagaattgatcaatatcaaggagcagatgctgtgggattagaagaaaaaatcaagcagcacttagaaaatgaccctggaagcaatgaggacacagatattccaaaaggctatatggatttaatgccttttattaacaaagctggttgtgaatgtcttaatgaaagtgatgagcatggatttgacaactgtttacgaaaagacacaaccttcttggaatctgactgtgatgaacagctgcttattactgtggcattcaatcaacctgttaagctttattccatgaaatttcaagggccagataatggtcagggccctaaatatgtaaaaatttttatcaacctaccccgatctatggattttgaagaggcagaaagaagtgaaccaactcaagctctggaactgacagaggatgatattaaagaagatggcattgttccacttcgttatgttaagtttcagaatgttaacagtgtaactatatttgttcagtcgaatcaaggtgaagaggaaacaacaagaatttcatattttacttttattggtactccagtccaggcaacaaatatgaatgacttcaaacgagtagttggcaaaaaaggagaaagccactaaggtacaaaagacactggacaaccatattgcaatcagatctacagctcctggataattgcttgattctcgccagagactgtcaatgtttcattcattgccattaccaataaatcattgcttttgttcagatggtatcactagtgtttccattgtaatcttgacacatgcaattgtaaataaaagtcaccacttttgccaagcttaatttttgtctttctaaatcagtattttctctttccatgtatttgaaaactggttaacttctgattttagtagagacttaagtgtctggtagtatattgattgaaagccagtttctttagaaaaggagaaactgttctagggaattaagaagtacatgtgtacacattcatggcaagttattttgataagtgaacctggaacagctaaccatgttaaattattactgcatttttattaaaggacatttgtatatctgagctatggaaattactcaaattataaattagaagaaataaacaggtttaatgagatttagctactcttacctaaaacttagctaatgggtccacagattctttcttggtatatatcaagattttaatctcttctggtaaactttaaaatttgagtcagcctttttttttttttttttttttttaactaatagaagaatgtggaaatcagacagttggggaaaaaatacagcatagtgaattcagaaaacaggaattggccaggtgtggtggctaatgtctgtaatcccagtactttgggaggccaaggcgggcgaatcaccagaggtcaggagttcgagtccagcttggccaacatggtgaaacctcgtctctactaaaaatacaaaaattagccaggcatggtggcgggtgtctgtaatcccagctacttgggaggctgagacagaagaatcggctgaacccgggaggcagaggttgcagtgagctgagattgcgccattgcgccccagcctgagcgacaagagcaaaactccgtctccaaaaaaaaaagggaattattacccttaatcaagtatttattacctgaactaccaaaacgtgcagtgtaaatatacagagaacatgatttaaggttgaaaatgaggtgctcaaatagaaatgtttaaaaggtctttcacaaaaggctggtaaaatacctattcgttaccttttttatcttaaaattgtaatctaaaaagtattggtagttttaattttaaaatttctgagtattttgaaaactatttttaaagagtacataagactgtaaaattgtgattcagttaaacatttgagggcattcttgtctaggaatatggtagagataccatttgcctttgtgagagcagtgtgtttatacttgtttatgaaaaaattctacagaagttttagtgttgaaagagtccctttctgaaacccaagtgtcattagatagtttagttcatttgtatatgggcacattaactggtctgtgatgatcttaacactccttaaatagaccatctcagattaatcacatctgaaattaaggataagattaatatgcagggttttggtttacagttttgtacacttaacctttctgagtaattgttaaagtgcctcatcctaagtattgctgaccttttcctatttatacttgatagtttgaaaacccagtgaaacaaatttcgtatttgtaaaggattggacatcagatttatattgtctatgtgactcttctataacaattagttgcagtatgcaagtattacataattcaaattgtaaatagtgaaaaatgaacgtttataggtaactataacgtttcacttaatgggaaatcttactattataaatgtgcataattggcatttaaaatatcaaactgaaatgctgttttctcctaaaacagtatatatatatacacacatatgtatatgtaacatttatatataacactgaattttccagatgaataagagcatttgaaaaaatgtaactctagttattttaactgaagttatttattagtgcatctagaaaactggtattcagtttcttgttcattttgtcggacatagcaaaaaagaatttcatgatctctgtattttgatacattgacatcaggtgcttttgatgagaaacaacagtgaaatatcgtgttcataatagaaacgaaagtcaggtattgcagtaggaagtctttgtcagcttaatgctgaagccaagagtagcacaaggtaccacattcttgtgcccacgacaggcttttataatccttctgagttctctttgacatcaagccccacgttgttccccagtctcaatattctgttggaggcagccacgtaacaattagagttgaaacctgccccacgttgttccccagtctcaatatactgttggaggcagccacgtaacaattagagttgaaacctgccccacgttgttccccagtctcaatatactgttggaggcagccacataacaattagagttgaaacctgccccacgttgttccccagtctcaatattctgttggaggcagccacgtaacaattagagttgaaacctgccccacattgttccccagtctcaatattctgttggaggcagccacgtaacaattagagttgaaacctgccccactttgttccccagtctcaatattctgttggaggcagccacgtaacaattagagttgaaacctgccccacattgttccccagtctcaatattctgttggaggcagccacttaacaattagagttgaaacctgtctgccatcctttgtctcaatgtttgaggatgtatgcagtgtttttggcagcgattataggaatgcagttgtttatttggcctcagcagtttatttatggctgcaattaatatccctgatcatgggcttttaaacctaaaatagttcagatcctcccttgttcctcttaatgtctaaaagctttgattctgtaataagaataaagtgttggagttgaataaattagttacaccctttgtaagctttaaaaacatgaaatttaaggcttactcatgttgcttgtattgatactcatatagttcaatttagtaggttaatttttgtgttaggtatatctcttctggaactgataatttgtaatcttagactattttttttttaagataagtaacttagagtaagaaatccagctgggaacagtggctcatgcctgtaatcccagcattttgggaggccgaggcggctggatcacttgaggtcaggagtttgagaccagcctggctaacatggagaaaccctgtctctactaaaaatacaaaaaattagccaggcatggtggcaggtgccacacccagctacttgggaggctgaggcagtagaatcgcttgaacccgggaggcggaggttgcagtgagccaagatcgcatgactgcacactagcccgggcaacagagtgagactgtctcaaaagaaaaaaaaaaaaaatccattcacagaactgctaaagaaaaactagaggaatattttgctcatttagctttaaaactcattattagaggtgtgtattttacagttttgtaaatatagattatgctttataatacacataaagcaagtatatataacatgcatatagtaaataaattttaaaatattgactattccccagttaagcctatacttcttaaggaagactactgatgtcattttaagcatgtttcaaaattcaagttttatttttgatcaataaggtttttttttttttttaacatgctcagcactataggaataagaggacagtggagatttgtaggctaataagatcgcttttaaactttgtggtccatgtaaaattattagttggagaatgtgtaattagagaactataagataaagagataacctttagaatttgaatgtactaaaattgtacacagcttggaatattaaaatcttaaggatatgcaatgttaaaactgctagagtatttttccttcgtgcttgctatgcttctctatgggaagaggaattttattttggaattatttctaagttgaacagaccagaattaattgtgaaaacatgatctgttggtttataattggacacgcatttggagatactggctcatcatactacctaggagcaaaatctctgaagtttgaatccctgctcttccacttgttagctgtgtcatcttgagcaagtaacatccttcagagctcaaatttcttcttgtgtaaaaataggaacatctatctcttagacttgttctgaagatgcgccttactttgtatctggaacaaggataagtatcttctgtatcctgctctcagctgtcactgctttttaggccatcattacttgcttggcatactgcagtgcctcctaattgtctctttgtttctgctctggcctctctcatgtatcccccacatggccgctggttctcttttctttatggggtctttgtaatgtaatctctcctcctctagcctccccatgcccctcatttctccagtgtgctgtgctgtattaccaggtagcagaacgtaccctaatatcgcatgccttcctctgacctaacttttccatctgaccaattcctacttatctacaaggctcagtccaaggaaaactgataccgggaataatcataacaattgtgcacgcctcctcagctgctatgacaccttgccattatttcatccggatacttatcaagctacttgtaatgatctgtagtcttatttggactactagattgtgagctgtaatacaagtattttgtctctagtattaagccagtttatttggtttctatcattaaatacaatgttgaaaaaattctcagggtccaaggggagatgcttgggttgagtcagagataaagtaggaatatgcagttgaggaaggtaaggaagataatttagctgaagtaaaggaaaagtgcatagtgtgttcatagagtgggagttaagtgtaagagacattctagggaagtgaaggagaagctgaaagagcaagtagagacggtaaggtgaagctcctcttgccatgtgaaagagatcaaactttctccttaatttatgggaggagcgagcatagagaagtctgtgatgtctcacaaggttctcacttttacaattgaatatagaagtagctcttaggagaagcagaacgttcagaggggaagatgaatatggttttgggtacattgccttaaattgcatttttggtatttgggtggcgatgtctagtaagtaaaaagccaggaatgtgattttagagcttagagctagaagcaaggaactaggagttgtttagatgatgaaaactgaaatatgtatatgaatgggaatttttagaatataaagggagagaatgaaactaaggagcaaatgttagggaatcctaagaaatattaaagaattgggaaaagaggaacctggaaggtagagtagtaaacaggaaagggaggaaaaacaggaggtggtaataaagtagtgttaatgaatccaagagggagcagtcaccatcttcaaatgtgatattgaaattagctgggatgtccagttgtttaatccattaaattgtggaaacagtctttctagtgcttaattataggaatcattgatcatattaataaactttcagttgaagcatcagcagataattattccaaaaccctctggcaaagaaatgtagatgcttttatagtctaccattgaacacagttttacatgacacttggcaaaacttggagatggatggcactattttgtaagagaatatgaaacactgctttgaagttgtcattaaaggatcttatcaggtgc

SEQ ID NO: 149540 - DNA, 501 bp, Artificial Sequence
  derived and/or modified sequence
atggacctgatgcccttcatcaacaaggccggctgtgaatgtctgaatgaaagtgatgaacatggctttgacaactgcctgaggaaggacaccaccttcctggagagtgactgtgatgagcagctgctgatcaccgtggccttcaaccagcctgtgaagctgtacagcatgaagttccagggccctgacaatggccagggccccaagtatgtgaagatcttcatcaacctgcccaggtccatggactttgaggaggccgagaggtctgagcccacccaggccctggagctgacagaagatgacatcaaggaggatggcatcgtgcccctgcgctacgtgaagttccagaatgtgaacagcgtgaccatctttgtgcagagcaaccagggcgaggaggagaccacccgcatctcctacttcaccttcatcggcacccctgtgcaggccaccaacatgaatgacttcaagagggtggtgggcaagaagggggagagccactag

SEQ ID NO: 149541 - DNA, 870 bp, Artificial Sequence
  derived and/or modified sequence
atggtgggcgtgaagcccgtgggcagcgaccccgacttccagcccgaactgtcaggagccgggtcgcggctcgcagttgtgaagtttacaatgagaggatgcgggccttgcttgaggatcgctcctgcgtttagcagtatgtcaaacaaatatccacaggctgtgtttctggaagtggatgtgcatcagtgtcagggtacagcagccactaacaatatcagcgcgacacctaccttcctcttcttccgaaacaaagtgcgcatcgaccagtaccagggcgcagatgccgtcggcctggaagaaaagattaagcaacatttggagaacgacccagggtccaacgaggataccgacattcccaaggggtacatggatttgatgccattcattaacaaggccggttgcgaatgcctaaacgagtctgacgaacatgggttcgataattgtttacggaaagacacgacattccttgagtcagattgtgacgagcaactgctgatcacagtggcttttaatcagcccgtcaaactttacagcatgaagttccaggggcctgacaacggtcagggtcccaaatacgtgaagattttcattaacctcccacgttccatggactttgaagaggcagagaggtcagagcctacccaggctctagaattaaccgaggacgacataaaggaggacgggatcgtcccgctcagatatgtgaagttccagaacgtgaatagtgttactatttttgttcaatccaatcaaggggaagaagagactacacgcatctcttattttactttcattggtacccccgtccaggcaaccaatatgaatgatttcaagagagttgtggggaagaagggcgagtcacactag

SEQ ID NO: 149542 - DNA, 501 bp, Artificial Sequence
  derived and/or modified sequence
atggacctgatgcccttcatcaacaaggccggctgcgagtgcctgaacgagtctgacgagcatggatttgacaattgtcttaggaaagatactacattcctggaaagcgactgcgacgagcagttgctgattacagttgccttcaatcagcctgttaaattgtattccatgaaattccaaggcccggataacgggcaggggcctaaatacgtcaaaatctttattaatcttccgaggagtatggactttgaggaagccgagaggtcagagccaacccaggccctggagctgacagaggatgacattaaagaagacgggatcgtgcccctccgatatgtgaaattccagaacgtgaattcagtgacaattttcgtgcaatccaaccagggcgaggaggaaaccaccagaatttcttacttcacttttatcgggaccccagtccaggctaccaacatgaacgacttcaagcgtgttgtgggtaagaaaggggagtcacattag

SEQ ID NO: 149543 - DNA, 870 bp, Artificial Sequence
  derived and/or modified sequence
atggttggcgtgaagccagtgggatccgacccggatttccaacccgagcttagcggggctggttcacggctggcagtcgtgaagttcaccatgaggggctgtggcccatgtcttcgaatagccccagcgttttcatcaatgtccaacaagtacccacaggcagtgttcttagaagtcgatgttcatcaatgtcaaggcacagcggctacaaataacatttccgcaacacccactttcttgtttttccgaaataaggttagaatcgaccagtatcaaggcgctgatgcagtggggttagaggaaaagatcaagcaacatctggagaacgatccgggaagcaacgaggacactgacatacctaagggatatatggacctgatgcccttcattaataaagccggatgcgagtgtctaaatgagagtgatgaacacggattcgacaactgtctcaggaaagacaccacttttctcgagagtgattgtgatgaacagctgctgatcactgtggcttttaatcagccagtgaagctctacagtatgaagttccaagggcctgataacggacaagggcctaaatacgtgaaaatatttatcaatctgcccagatctatggactttgaggaggctgaaaggtctgaaccaacgcaggctctggagctgaccgaagacgacatcaaggaagacggaatcgttccactgcgttacgtgaagttccagaatgttaactcggtgactatcttcgtgcagagtaaccagggagaggaagagactacccggatctcctacttcactttcataggtacaccggtccaggctaccaatatgaatgattttaagcgggtggtcggcaaaaaaggggagagtcactag

SEQ ID NO: 149544 - DNA, 501 bp, Artificial Sequence
  derived and/or modified sequence
atggatctgatgccttttatcaacaaagcaggatgcgagtgcctcaatgagtcagacgaacacggattcgacaattgtctgcgaaaggatactacatttctggagagtgactgtgatgaacagctcctgatcactgttgctttcaaccaaccagtcaagctctacagcatgaagtttcagggccctgataacggccaggggcctaagtatgtcaagatcttcatcaatctgcccaggagtatggatttcgaagaagcggagcggtctgagcccacgcaggctctggaactcacagaagacgacatcaaggaggatgggatagtgccgctccggtatgtcaagttccagaacgttaacagcgtgacaattttcgttcagtctaatcagggcgaggaggaaacgacacgcatttcctattttacctttattggcactccagtgcaggcaaccaacatgaatgattttaagagggtggtaggcaagaagggcgagagccattag

SEQ ID NO: 149545 - DNA, 2035 bp, Artificial Sequence
  derived and/or modified sequence
aaggcctaagccggcgccgagagagccagccgcgttacgatggagaccgaaagtggagaaaaggccagctgtgggcaaggagtgcacggccgccatcttggttgtgggaagtctcgtctaggctgtcctctctccagttgggaggaccaagatggagcgaaggatgaagtagcaagtgcacgtctttcttgggagcaggatgttgcgcaagtttacacttctgaccccatcacactgcttcccactgagatgcaagagacctgccccgaatacagtacaggagcatcttcaaagtacttccagtgggtgccctggacagcagctaagaaccccggggtaaaacgagtttcctctctactgttacaaatcagaaacctcctccgtaaaagcctcagatctgggaaacgcggatgcatatgccaacttttgagtctcagtctgcgcctgcgcacgtgacctctacacgtctcctctgcgcctgcgccgctcaagttagcgcgaggctactcagtcgagggtgggactacgcttcgcgttttgggattgggcgctgaaggccaaaccggacgacgcggaaatgacgtcacgccgggggccctgccgcgcggtggctgctgggtgccgcacgccttcccatcctcctcctctcccctcccccatccctccccgccccctcggccgctccgctccctggcgtgactcggcactgagagtcccgggagaagactcggcggtcgccacctcttctgtccaggcctcggccttcctgagcatctctccttcctctcccagatcgtcttctccttcagtttcaaagccagtggcgtcgcggccaccctgccgggctctctgtgaggatggtgggggtgaagcccgtcgggagcgacccggatttccagccagagctgagcggcgcgggctccagactcgccgtggtcaagttcaccatgagagggtgtgggccatgtttgaggattgccccagcattcagttctatgagtaataaatatccacaggctgttttcttggaagtcgatgtacatcagtgtcagtacttattcctttgaagataggaagatgttatgttgatgtcattattacagatgtcattatggctgcattagttaagaagagtagcacattattaattgcttcagggaacagctgccaccaacaatatatcagcaacacctacatttttgttttttcgaaacaaagtgagaattgatcaatatcaaggagcagatgctgtgggattagaagaaaaaatcaagcagcacttagaaaatgaccctggaagcaatgaggacacagatattccaaaaggctatatggatttaatgccttttattaacaaagctggttgtgaatgtcttaatgaaagtgatgagcatggatttgacaactgtttacgaaaagacacaaccttcttggaatctgactgtgatgaacagctgcttattactgtggcattcaatcaacctgttaagctttattccatgaaatttcaagggccagataatggtcagggccctaaatatgtaaaaatttttatcaacctaccccgatctatggattttgaagaggcagaaagaagtgaaccaactcaagctctggaactgacagaggatgatattaaagaagatggcattgttccacttcgttatgttaagtttcagaatgttaacagtgtaactatatttgttcagtcgaatcaaggtgaagaggaaacaacaagaatttcatattttacttttattggtactccagtccaggcaacaaatatgaatgacttcaaacgagtagttggcaaaaaaggagaaagccactaaggtacaaaagacactggacaaccatattgcaatcagatctacagctcctggataattgcttgattctcgccagagactgtcaatgtttcattcattgccattaccaataaatcattgcttttgttcagatggtatcactagtgtttccattgtaatcttgacacatgcaattgtaaataaaagtcaccacttttgccaagctt

SEQ ID NO: 149546 - DNA, 870 bp, Artificial Sequence
  derived and/or modified sequence
atggtgggcgtgaagcccgtgggcagcgaccccgacttccagcccgagctgagcggcgccggcagcagactggccgtggtgaagttcaccatgagaggctgcggcccctgcctgagaatcgcccccgccttcagcagcatgagcaacaagtacccccaggccgtgttcctggaggtggacgtgcaccagtgccagggcaccgccgccaccaacaacatcagcgccacccccaccttcctgttcttcagaaacaaggtgagaatcgaccagtaccagggcgccgacgccgtgggcctggaggagaagatcaagcagcacctggagaacgaccccggcagcaacgaggacaccgacatccccaagggctacatggacctgatgcccttcatcaacaaggccggctgcgagtgcctgaacgagagcgacgagcacggcttcgacaactgcctgagaaaggacaccaccttcctggagagcgactgcgacgagcagctgctgatcaccgtggccttcaaccagcccgtgaagctgtacagcatgaagttccagggccccgacaacggccagggccccaagtacgtgaagatcttcatcaacctgcccagaagcatggacttcgaggaggccgagagaagcgagcccacccaggccctggagctgaccgaggacgacatcaaggaggacggcatcgtgcccctgagatacgtgaagttccagaacgtgaacagcgtgaccatcttcgtgcagagcaaccagggcgaggaggagaccaccagaatcagctacttcaccttcatcggcacccccgtgcaggccaccaacatgaacgacttcaagagagtggtgggcaagaagggcgagagccactag

SEQ ID NO: 149547 - protein, 1529 aa, Artificial Sequence
  derived and/or modified sequence
MRGVGWQMLSLSLGLVLAILNKVAPQACPAQCSCSGSTVDCHGLALRSVPRNIPRNTERLDLNGNNITRITKTDFAGLRHLRVLQLMENKISTIERGAFQDLKELERLRLNRNHLQLFPELLFLGTAKLYRLDLSENQIQAIPRKAFRGAVDIKNLQLDYNQISCIEDGAFRALRDLEVLTLNNNNITRLSVASFNHMPKLRTFRLHSNNLYCDCHLAWLSDWLRQRPRVGLYTQCMGPSHLRGHNVAEVQKREFVCSGHQSFMAPSCSVLHCPAACTCSNNIVDCRGKGLTEIPTNLPETITEIRLEQNTIKVIPPGAFSPYKKLRRIDLSNNQISELAPDAFQGLRSLNSLVLYGNKITELPKSLFEGLFSLQLLLLNANKINCLRVDAFQDLHNLNLLSLYDNKLQTIAKGTFSPLRAIQTMHLAQNPFICDCHLKWLADYLHTNPIETSGARCTSPRRLANKRIGQIKSKKFRCSAKEQYFIPGTEDYRSKLSGDCFADLACPEKCRCEGTTVDCSNQKLNKIPEHIPQYTAELRLNNNEFTVLEATGIFKKLPQLRKINFSNNKITDIEEGAFEGASGVNEILLTSNRLENVQHKMFKGLESLKTLMLRSNRITCVGNDSFIGLSSVRLLSLYDNQITTVAPGAFDTLHSLSTLNLLANPFNCNCYLAWLGEWLRKKRIVTGNPRCQKPYFLKEIPIQDVAIQDFTCDDGNDDNSCSPLSRCPTECTCLDTVVRCSNKGLKVLPKGIPRDVTELYLDGNQFTLVPKELSNYKHLTLIDLSNNRISTLSNQSFSNMTQLLTLILSYNRLRCIPPRTFDGLKSLRLLSLHGNDISVVPEGAFNDLSALSHLAIGANPLYCDCNMQWLSDWVKSEYKEPGIARCAGPGEMADKLLLTTPSKKFTCQGPVDVNILAKCNPCLSNPCKNDGTCNSDPVDFYRCTCPYGFKGQDCDVPIHACISNPCKHGGTCHLKEGEEDGFWCICADGFEGENCEVNVDDCEDNDCENNSTCVDGINNYTCLCPPEYTGELCEEKLDFCAQDLNPCQHDSKCILTPKGFKCDCTPGYVGEHCDIDFDDCQDNKCKNGAHCTDAVNGYTCICPEGYSGLFCEFSPPMVLPRTSPCDNFDCQNGAQCIVRINEPICQCLPGYQGEKCEKLVSVNFINKESYLQIPSAKVRPQTNITLQIATDEDSGILLYKGDKDHIAVELYRGRVRASYDTGSHPASAIYSVETINDGNFHIVELLALDQSLSLSVDGGNPKIITNLSKQSTLNFDSPLYVGGMPGKSNVASLRQAPGQNGTSFHGCIRNLYINSELQDFQKVPMQTGILPGCEPCHKKVCAHGTCQPSSQAGFTCECQEGWMGPLCDQRTNDPCLGNKCVHGTCLPINAFSYSCKCLEGHGGVLCDEEEDLFNPCQAIKCKHGKCRLSGLGQPYCECSSGYTGDSCDREISCRGERIRDYYQKQQGYAACQTTKKVSRLECRGGCAGGQCCGPLRSKRRKYSFECTDGSSFVDEVEKVVKCGCTRCVS

SEQ ID NO: 149548 - DNA, 4590 bp, Artificial Sequence
  derived and/or modified sequence
atgcgcggagtcggatggcaaatgctgtccttaagcctggggttagtcctggctatcctcaataaagtggcaccccaggcctgtcctgctcagtgtagttgctctgggtcaacagtggattgtcatgggctcgcgctgcgttccgtgccacggaatattccgaggaacacagaacggttagatttgaacggcaataatatcacgcgcatcactaaaaccgactttgcgggattacggcacctccgcgttcttcagcttatggagaataaaatcagcacaatagagagaggcgctttccaggatcttaaagagttggaaagactgcgactgaacaggaatcatctccaattgtttccggaactcctctttctggggactgccaaactgtatagactggatttgagtgaaaaccaaatacaggccatccctaggaaggcctttcggggagccgtggacatcaagaacctccaattggattacaaccaaattagctgcattgaggatggggcattccgtgcattgcgagatcttgaagttttgaccctgaacaacaataatataacacggctatctgtggcgagtttcaaccatatgcccaagctacggacctttcggctgcattccaataacctgtactgcgattgtcacttggcctggctgagtgattggctccgacagcgacctcgcgttggcctgtacacgcagtgcatggggccaagccacctgcgaggccacaatgttgctgaggtccagaaaagggagttcgtctgttctgggcatcagagtttcatggcaccctcctgctccgtgttgcactgcccagcagcatgtacttgttccaacaacatagttgactgcagaggcaaaggacttacagagattccaacaaacctcccagaaactattactgagattcgtctggagcagaacacaattaaagtgatcccaccaggcgcgttctccccatataagaagttgaggcgcatcgatctctctaataatcaaatatccgagctggcccccgatgccttccagggccttcgctcgctcaactctctcgtgctgtatggaaacaagatcacggagctgcccaagtctctctttgagggtctttttagtcttcaacttctattgctaaatgccaataaaatcaactgtctgagagtggacgctttccaggatctgcacaatctgaacctcttatctttgtatgataacaaattgcagaccatagctaagggaacttttagccccttgcgggctatccagacaatgcatttggctcaaaatccctttatttgcgattgtcacctgaagtggctggcggattatctgcacacaaacccaattgaaacttctggggcccggtgcacaagtccccggaggctcgcaaacaaacgcattggacagatcaaaagcaaaaaatttagatgctccgccaaagagcagtattttattcctggcacagaagattaccgaagcaagctttctggagactgctttgcggatctcgcctgtcctgaaaagtgtagatgcgaaggtaccacggtggattgctcaaatcagaagctcaataagattcccgaacatatcccccagtataccgccgagctcagactgaataacaacgagtttaccgtgctcgaggcaaccggtatctttaagaaattgcctcagctgcgcaaaattaacttttccaataacaaaatcaccgacatcgaagagggggcctttgaaggcgccagtggcgtcaatgagatcctcctcacctcgaaccggctcgaaaatgtccagcataagatgttcaaagggctggaatccttgaagactctgatgctgcgaagcaaccgcattacatgcgtgggaaacgactctttcatcggactaagcagcgtacgtctgctcagtctgtatgataatcagattaccaccgttgcaccaggtgctttcgatacattgcattccttatctactctcaacttgctggcaaatcccttcaattgcaactgctatctcgcctggctgggagaatggctaagaaagaagcggatagttacggggaacccccggtgtcaaaaaccctatttcctgaaggaaattccaatccaggatgtggccatccaggacttcacctgtgatgatggcaatgacgacaatagctgttctccactcagccgctgccctactgagtgcacctgtctcgacaccgtcgtgcgttgtagcaataaaggactaaaagtgctcccaaaaggcataccacgcgatgttacggagctgtacctcgatggcaaccagtttaccctggtccccaaagagctgtcaaattataagcaccttaccctgatagatttaagcaataatagaatctctaccctgagtaaccagtcattttcaaatatgacccagctcctgacattgatcctaagctacaaccggttgcgctgcattccccccagaaccttcgacgggctcaagtcgctccgactgttaagtctccacggaaacgatattagcgtggtccccgaaggcgcatttaatgacctctctgcactttcacatctggcaatcggggctaatccactgtactgcgattgcaacatgcaatggttgtctgactgggttaagagcgagtataaagagccaggaatagcccggtgtgccgggccaggtgaaatggccgataagctcttattaacaacaccgagcaagaaattcacatgccaaggtcctgttgatgtgaatatccttgccaagtgcaacccctgtctctccaacccttgcaagaatgatgggacctgcaattctgaccccgtggatttctatcggtgcacatgtccttacggtttcaaaggtcaagactgcgatgtgcccatacacgcctgcatctccaatccctgcaaacatggtggtacctgtcacttgaaggagggggaggaggacggattttggtgcatttgcgccgacggtttcgagggtgagaattgcgaggtgaatgtggatgactgtgaagacaatgattgcgagaataattccacttgcgttgacggaatcaataattatacctgtctgtgtccccccgaatacaccggtgagttgtgtgaggagaagttagatttctgcgcccaagacctgaatccttgccaacatgacagtaaatgtatcctgactccaaaaggcttcaagtgcgattgtacgcctggctacgtcggagagcactgtgatatcgacttcgatgattgtcaggacaacaaatgcaaaaacggcgctcattgcactgacgccgtaaacggttacacttgcatatgccccgaaggctacagtgggttgttttgcgaattctccccaccaatggtcctcccacgtaccagcccctgtgataacttcgactgccagaatggagcacaatgcattgtgcgcatcaacgagcccatctgtcaatgcctgccaggttaccagggggagaagtgtgaaaagctcgtgagcgttaatttcatcaataaggagtcctaccttcagatcccttccgcaaaggtgcgccctcaaaccaatatcaccctgcagatcgcgacggacgaggactcaggcatcctgttgtacaaaggggacaaagatcacatcgccgtggaattatacagagggagagtcagagcctcttacgacacaggatctcatcctgcatccgcaatttatagtgtggagacaataaacgatgggaacttccacatcgtagagttgttggccctcgatcagtccctgtccctctccgttgacggtggaaacccgaagattattaccaacctgagcaagcagtccactctgaatttcgattcaccactatatgtgggcggcatgccagggaaaagcaacgtggctagcttaaggcaagctccaggtcagaatggaacgtcattccatggctgcatccggaacctgtatatcaatagtgaactgcaagattttcaaaaagtcccaatgcagaccggtatcctgcccggctgcgagccttgccataaaaaagtctgcgctcacggaacgtgtcagccttcaagtcaagcaggttttacttgtgagtgccaggagggctggatgggtcccctttgtgaccagcgtacaaatgacccctgcttgggaaacaaatgtgtgcacggcacctgcctgccaataaatgcctttagctattcctgtaaatgtctggaaggacacggtggagtgctgtgtgatgaagaggaggatcttttcaatccatgccaggcaattaaatgtaaacacggcaagtgtagactttcgggtctcggccagccatattgtgaatgcagctctggatatacaggcgattcatgtgaccgcgagatatcatgccggggcgaaaggatcagggactactaccagaagcaacagggatatgctgcttgtcaaaccactaaaaaagtcagtcgtctcgagtgcagagggggatgcgccggggggcagtgctgcggtccgctccggagcaagagaaggaagtattccttcgaatgcactgacggcagcagcttcgtcgacgaggttgagaaagtcgtgaaatgtggatgtactaggtgcgtgtcctag

SEQ ID NO: 149549 - DNA, 4590 bp, Artificial Sequence
  derived and/or modified sequence
atgagaggagtgggctggcagatgctgagcctgagcctgggcctggtgctggccatcctgaacaaggtggccccccaggcctgcccagcccagtgcagctgcagcggcagcacagtggactgccacggcctggccctgcggtctgtgcccaggaacatccccaggaacacagagcggctggacctgaatggaaacaacatcacccgcatcaccaagacagactttgctggcctgcggcacctgcgggtgctgcagctgatggagaacaagatcagcaccatcgagcggggggccttccaggacctgaaggagctggagcggctgcggctgaacagaaaccacctgcagctgtttcctgagctgctcttcctgggcacagccaagctgtaccgcctggacctgtctgagaaccagatccaggccatccccaggaaggccttcagaggagctgtggacatcaagaacctgcagctggactacaaccagatcagctgcattgaagatggagccttccgggccctgcgggacctggaggtgctgaccctgaacaacaacaacatcacccggctgtctgtggccagcttcaaccacatgcccaagctgcggaccttccggctgcacagcaacaacctgtactgtgactgccacctggcctggctgagtgactggctgcggcagaggccccgggtgggcctgtacacccagtgcatgggccccagccacctgcggggccacaacgtggccgaggtgcagaagcgggagtttgtgtgcagcggccaccagagcttcatggcccccagctgcagcgtgctgcactgcccagctgcctgcacctgcagcaacaacatcgtggactgccggggcaagggcctgacagagatccccaccaacctgcctgagaccatcacagagatccggctggagcagaacaccatcaaggtgatccccccaggggccttcagcccctacaagaagctgcggagaattgacctgagcaacaaccagatcagcgagctggccccagatgccttccagggcctgcggagcctgaacagcctggtgctgtatggcaacaagatcacagagctgcccaagagcctgtttgagggcctcttcagcctgcagctgctgctgctgaatgccaacaagatcaactgcctgcgggtggatgccttccaggacctgcacaacctgaacctgctgagcctgtatgacaacaagctgcagaccatcgccaagggcaccttcagccccctgcgggccatccagaccatgcacctggcccagaaccccttcatctgtgactgccacctgaagtggctggccgactacctgcacaccaaccccatcgagaccagcggggcccgctgcaccagcccccggcggctggccaacaagagaattggccagatcaagagcaagaagttccgctgcagcgccaaggagcagtacttcatccctggaacagaggactaccgcagcaagctgagcggggactgctttgctgacctggcctgcccagagaagtgccgctgtgagggcaccaccgtggactgcagcaaccagaagctgaacaagatccctgagcacatcccccagtacacagctgagctgcggctgaacaacaatgagttcaccgtgctggaggccaccggcatcttcaagaagctgccccagctgaggaagatcaacttcagcaacaacaagatcacagacatcgaggagggcgcctttgagggcgccagcggcgtgaatgagatcctgctgaccagcaaccggctggagaatgtgcagcacaagatgttcaagggcctggagagcctgaagaccctgatgctgcggagcaaccgcatcacctgtgtgggcaatgacagcttcatcggcctgagctctgtgcggctgctgagcctgtatgacaaccagatcaccaccgtggcccctggggcctttgacaccctgcacagcctgagcaccctgaacctgctggccaaccccttcaactgcaactgctacctggcctggctgggggagtggctgaggaagaagagaattgtgacaggcaacccccgctgccagaagccctacttcctgaaggagatccccatccaggatgtggccatccaggacttcacctgtgatgatggaaatgatgacaacagctgcagccccctgagccgctgccccacagagtgcacctgcctggacacagtggtgcgctgcagcaacaagggcctgaaggtgctgcccaagggcatccccagagatgtgacagagctgtacctggatggcaaccagttcaccctggtgcccaaggagctgagcaactacaagcacctgaccctgattgacctgagcaacaaccgcatcagcaccctgagcaaccagagcttcagcaacatgacccagctgctgaccctcatcctgagctacaaccggctgcgctgcatcccccccaggacctttgatggcctgaagagcctgcggctgctgagcctgcatggaaatgacatctctgtggtgcctgagggcgccttcaatgacctgagcgccctgagccacctggccatcggggccaaccccctgtactgtgactgcaacatgcagtggctgagtgactgggtgaagtctgagtacaaggagcccggcatcgcccgctgtgccggccctggagagatggctgacaagctgctgctgaccacccccagcaagaagttcacctgccagggccctgtggatgtgaacatcctggccaagtgcaacccctgcctgagcaacccctgcaagaatgatggcacctgcaacagcgaccctgtggacttctaccgctgcacctgcccctacggcttcaagggccaggactgtgatgtgcccatccacgcctgcatcagcaacccctgcaagcacggcggcacctgccacctgaaggagggggaggaggatggcttctggtgcatctgtgctgatggctttgaaggagagaactgtgaggtgaatgtggatgactgtgaagataatgactgtgagaacaacagcacctgtgtggatggcatcaacaactacacctgcctgtgccccccagagtacacaggagagctgtgtgaggagaagctggacttctgtgcccaggacctgaacccctgccagcacgacagcaagtgcatcctgacccccaagggcttcaagtgtgactgcaccccaggctacgtgggggagcactgtgacatcgactttgatgactgccaggacaacaagtgcaagaatggagcccactgcacagatgctgtgaatggctacacctgcatctgcccagagggctacagcggcctcttctgtgagttcagcccccccatggtgctgcccaggaccagcccctgtgacaactttgactgccagaatggagcccagtgcatcgtgcgcatcaatgagcccatctgccagtgcctgcccggctaccagggcgagaagtgtgagaagctggtgtctgtgaacttcatcaacaaggagagctacctgcagatccccagcgccaaggtgcggccccagaccaacatcaccctgcagatcgccacagatgaggacagcggcatcctgctgtacaagggggacaaggaccacatcgctgtggagctgtaccggggccgggtgcgggccagctatgacaccggcagccacccagccagcgccatctacagcgtggagaccatcaatgatggcaacttccacatcgtggagctgctggccctggaccagagcctgagcctgtctgtggatggcggcaaccccaagatcatcaccaacctgagcaagcagagcaccctgaactttgacagccccctgtatgtgggcggcatgcctgggaagagcaatgtggccagcctgcggcaggcccctggccagaatggcaccagcttccacggctgcatccggaacctgtacatcaacagcgagctgcaggacttccagaaggtgcccatgcagacaggcatcctgcccggctgtgagccctgccacaagaaggtgtgtgcccacggcacctgccagcccagcagccaggccggcttcacctgtgagtgccaggagggctggatgggccccctgtgtgaccagaggaccaatgacccctgcctgggcaacaagtgtgtgcacggcacctgcctgcccatcaatgccttctcctacagctgcaagtgcctggagggccatggaggagtgctgtgtgatgaggaggaggacctcttcaacccctgccaggccatcaagtgcaagcatggaaaatgtcggctgagcggcctgggccagccctactgtgaatgtagcagcggctacacaggagacagctgtgaccgggagatcagctgccgcggggagcgcatccgggactactaccagaagcagcagggctatgctgcctgccagaccaccaagaaggtgtcccggctggagtgccggggcggctgtgccggcggccagtgctgcggccccctgcggagcaagaggaggaagtacagctttgaatgtacagatggcagcagctttgtggatgaggtggagaaggtggtgaagtgtggctgcacccgctgtgtgtcctag

SEQ ID NO: 149550 - DNA, 4590 bp, Artificial Sequence
  derived and/or modified sequence
atgcggggcgtgggctggcagatgctgagcctgagcctgggcctggtgctggccattcttaacaaagtggctccccaggcttgtcctgcgcaatgctcctgctccgggagcacggtggattgccatggcttagcccttcgctcagttccccggaatataccccggaataccgagcggctggatctgaacggaaacaacatcacccgcatcacgaaaacagatttcgctgggttacggcatctgcgggtgttgcaactgatggagaataagatctcgacgatcgaaaggggtgcatttcaggatctgaaggagctagagcgtttgagactgaatagaaatcatctacagttgttcccagagctcctcttcctcggtacagccaaactctacagactggacctgtctgagaatcagattcaggcaattccccggaaagctttcaggggtgccgttgatattaagaacctccaactggattataatcagatttcctgtatcgaagacggagcatttcgtgccctgagggacttagaagttctgacgttgaacaacaacaacataactaggttgagcgtggctagcttcaaccacatgcccaaactccggaccttccggctgcattccaacaacctgtattgcgactgtcacctagcttggctatccgattggctgagacagaggcccagagtcgggttatacacccaatgcatggggcctagccatttacgtgggcacaacgtagccgaggtgcagaaacgggagttcgtatgcagcgggcatcagagcttcatggccccgtcttgttctgtgttgcactgtcccgctgcttgtacatgtagcaacaatattgtggactgtcggggcaagggcctcaccgagattccgaccaatttgcccgaaactataaccgagattcgcttggaacaaaatactatcaaagttattccaccaggtgcatttagcccatacaagaagttgcggcgaatcgacctcagcaataatcagatttctgagctggctcctgacgccttccagggcctgagatctttaaattcactggtgttatatggcaacaagattaccgagctgcctaagagcctttttgaggggctcttttcgctgcaactgttactgctaaatgccaacaagatcaactgcttaagagtggatgcatttcaagatcttcacaatctcaatcttctgtccctctatgacaataaactccagacaattgctaagggcaccttcagcccgctacgggccatccagacaatgcacctggcccagaatcctttcatttgcgactgccatctcaagtggttggcagattacttgcatacaaatcccatcgagactagcggcgcccggtgcacgagtcctcgtcgcctggcaaacaagagaattgggcagatcaagtccaagaagtttcgatgctcagccaaggaacagtattttattccgggcaccgaggattaccgaagcaaactgagtggcgactgtttcgctgacttggcctgtccagagaaatgccgctgcgaggggaccacagtggactgcagcaatcaaaagttgaacaagatcccagagcatatcccccagtacaccgccgagttgcgattgaataataacgagtttacagtcttagaggcgactggtatcttcaaaaaattaccacaactccggaaaattaacttttctaacaataagattaccgatattgaagaaggtgcattcgaaggagcgtcaggggtgaacgaaatcctgttgactagcaacagattggaaaatgtccagcacaagatgtttaagggcctggagtctcttaagacgctgatgctccgttctaatcggatcacttgtgttggaaacgattcattcattggtttgagttcagtgcgattgctttctttgtacgacaatcagatcaccaccgtggcccccggtgccttcgacacacttcattcacttagcactctcaacctgctggccaacccgttcaactgtaattgctacctcgcctggctgggcgaatggctgcgaaagaagagaatcgtgacggggaaccctcgatgccaaaagccgtatttcctgaaagaaatccctattcaggatgtcgccatacaggactttacatgtgatgacgggaatgacgataattcctgtagccccctgtcacgttgcccgacggagtgtacctgcctcgatacagtggtgaggtgttccaacaaagggcttaaagtcctgccaaagggtattccacgcgatgtcacagaactttatttagacggtaaccagtttaccttagtgccaaaggagctctcgaattacaaacatctcaccttgatcgatttgtccaataacagaatcagcacacttagtaatcaaagcttttcaaatatgactcagctattaacactcatcctgtcatataatagattgagatgtattccccctcgcaccttcgatggcctcaagtccttgaggctgctgtccctgcatggcaatgatatatcagtcgtgcccgagggggcatttaacgatctgagcgcacttagccatttggctattggcgcgaaccctctctactgtgactgcaacatgcagtggctctctgactgggtcaaaagcgaatacaaggaaccgggcatcgcgcggtgcgccggaccaggggagatggccgataaactgttactgacaactccaagcaagaagtttacctgtcagggcccagtggacgttaatattctcgcaaaatgcaatccttgtctttcaaacccatgtaagaacgacggcacatgcaacagcgatcctgtggatttttatagatgcacatgtccctacggcttcaaggggcaggactgcgacgtgccgatccatgcctgtataagcaacccatgtaaacacggaggcacatgccacttgaaagagggagaagaggacggtttttggtgtatctgtgcagatggctttgagggagagaactgtgaagtcaatgtggacgactgcgaggacaacgattgcgaaaacaactctacatgtgtcgacgggattaacaattatacctgcctctgccctcctgagtacaccggtgagctgtgcgaagaaaagctcgacttttgtgctcaggacctgaatccttgtcaacatgacagcaagtgcatcctgacccccaaaggtttcaaatgcgactgtacaccaggatacgtgggcgaacactgtgatatcgacttcgatgattgccaggataataagtgtaagaacggggcgcactgcacagatgccgtgaacggttacacctgtatttgccctgaagggtacagtggcctgttttgtgagtttagcccccctatggtgcttccacggaccagcccctgtgacaacttcgactgtcagaatggcgctcagtgcatagtgcgcattaatgaacctatatgccagtgtctccccggatatcaaggggagaagtgcgagaaattagtgagcgtgaatttcataaataaagagtcttacttgcagatcccaagtgctaaggttaggccacagacaaatattactcttcagattgctacagatgaagattcaggcattctgctctacaaaggggacaaagaccatatagcagtggaactctaccggggacgcgtgcgtgcgagttatgacacgggaagccatcccgcctctgctatctacagtgtggaaacaatcaacgacggcaacttccacattgtcgaactgctggccttagaccaaagcttgagtctaagtgtggacgggggaaatcctaagattataaccaacctgtcgaagcaaagcacattgaatttcgacagccccttgtacgtgggcggaatgcctggcaagtctaatgtggctagtctcaggcaggctccaggccagaatggaacttctttccatggatgcattaggaatttatatatcaacagcgaacttcaggactttcagaaagtccctatgcagacagggattttacctggctgcgagccttgccacaaaaaggtgtgtgctcatgggacttgccaaccgtcctctcaggccggcttcacgtgtgaatgtcaggaaggttggatgggtccactttgcgaccaaaggacgaacgacccgtgcttaggtaacaagtgcgtacacgggacctgcctgccaatcaatgctttttcctacagctgtaagtgcctggagggacatgggggggtgttatgcgacgaggaagaagacctgttcaatccgtgccaagcaattaagtgcaagcatggcaaatgtcgactgtccggactggggcagccctattgcgagtgttcaagcggatacactggtgattcttgtgacagggagatctcttgcagaggcgaaagaataagagactactatcaaaaacagcaggggtatgccgcatgccagactactaaaaaggtgtcacgtctggagtgccgcggtggttgtgcggggggccaatgttgtgggcctctcaggtccaagcgacgaaaatacagcttcgagtgcactgatgggtccagcttcgtggacgaagtggaaaaagtcgttaaatgtggatgcactcgctgcgtcagctag

SEQ ID NO: 149551 - DNA, 4590 bp, Artificial Sequence
  derived and/or modified sequence
atgaggggtgtggggtggcaaatgctctctcttagtttgggtctggtcttggccattctgaacaaggttgcccctcaagcttgccccgctcagtgctcatgctctggcagcacagtggactgccatggccttgcactgagatccgtcccaagaaatattcctcgtaacactgaacgtttggatcttaatggaaataatattacccgcattacaaagactgactttgctggcctgaggcaccttagagtgctgcagctcatggagaacaagatctcaaccatagaaagaggggctttccaggatctgaaagaactggagcggctgaggcttaaccgtaatcacctacagctgtttccggagctgttattcctggggacggctaaactctatcgtcttgacctgtcggaaaatcagatccaggcaattcctcgaaaagccttccgcggtgccgtggacattaagaatctgcagcttgactacaatcagataagttgcatcgaagacggtgcctttagggccctgcgggatttagaagttctcacactcaacaacaataatatcacccgcttgtcagtcgcgagcttcaaccacatgcccaagcttagaacattcagactacacagcaataatctctattgtgactgccatctggcttggctctcggattggctgagacaacggccacgcgttggactctatacacagtgtatgggaccgagccatttgcgtgggcacaatgtggcagaggttcaaaagagagagttcgtgtgctccggccaccaatctttcatggccccatcttgttctgtcctgcactgcccagccgcatgcacatgctcaaacaatatcgttgattgcagagggaaaggcctgactgaaatcccaaccaatctgcccgaaaccataacggagatacgcctggagcagaacaccattaaagtgattccaccaggcgctttcagcccgtataagaaattacgacgcatcgacttatcaaacaatcagatttccgaactcgctcccgacgcctttcaggggctacggtccctgaacagcttggtgttgtacggaaataaaatcacggagttgccaaagtctctcttcgaaggattgttcagccttcagctcctgctgctaaacgcgaacaagatcaattgcctccgagttgatgcctttcaggatcttcacaatttgaacttgctgagcctctacgacaataagctgcagactatcgcaaaggggacgttttcccctttacgcgcaatccagacgatgcatctcgcgcagaacccattcatttgcgactgccacttaaaatggctcgctgactatcttcacaccaatcccatcgaaacttctggggctagatgcactagccctcgcaggcttgcaaacaagcgcattggccagatcaagtccaagaagttccgctgctccgctaaggagcagtatttcattccgggtacagaagattatcgtagcaagctgagcggcgattgctttgccgacctggcctgtcccgaaaagtgtcgatgtgagggaaccactgtggattgctctaatcagaaacttaataagattcctgaacatatccctcagtataccgcagaacttagactgaacaacaatgaattcacagtgctagaagcaaccggtatcttcaaaaagttgcctcaactgcgcaaaatcaatttctctaacaacaaaattactgacatcgaagagggggctttcgagggggcaagcggcgttaatgaaatactcttgacaagcaataggttggagaatgttcagcacaaaatgttcaaaggcttggagtcccttaagacactgatgctgcggagtaataggattacttgtgtgggtaacgattcatttatcgggctgtcttccgttcgccttctaagtctttacgacaaccagatcactacggtagctcctggggctttcgatactctccatagtctatcgactcttaatttactcgcaaatcctttcaactgcaattgttacttagcctggctgggcgaatggcttaggaaaaagaggattgttacgggcaacccgaggtgccagaagccctacttcctgaaagagattcctattcaggatgtcgccattcaggactttacttgcgatgacgggaacgatgacaactcgtgttctccactgagtcgctgcccaactgagtgtacctgtctggacacggtagttcggtgcagcaacaagggcctaaaggtcctgcccaaaggaattccgagagacgtgacggagctgtaccttgacggcaatcagtttactctagtgccgaaggaactgtcaaactataaacacctgaccctgattgatttgtccaataatcggatctctacgttgtccaatcagagcttcagcaacatgactcagttactgacacttatactctcatataacagacttcgatgcataccaccacgcacttttgacggcctcaaatcccttagactgctgagcctccacgggaacgacatctccgtggtccctgagggcgcttttaatgacctgtctgcactatcacacttggcgatcggggctaaccctctctattgtgactgcaatatgcagtggctctcggactgggtcaaatcagagtacaaggagccgggtatcgccagatgcgccggacccggagaaatggcagacaaacttctactgacaaccccatctaagaagtttacttgtcagggcccagtggatgtgaacatattagcaaaatgtaatccttgtctgtctaatccatgcaaaaacgacgggacttgtaattctgaccctgtggacttctacaggtgcacttgcccttatgggttcaaaggacaagattgcgatgttcccattcatgcttgtatatcaaacccatgtaaacatgggggtacttgtcacctgaaagaaggagaggaggatggcttctggtgtatatgtgccgacggtttcgagggagagaactgtgaggtgaacgtggatgactgtgaagataacgattgcgagaacaactctacgtgtgtcgatggaatcaacaactatacttgcttgtgcccgccagaatataccggcgaactctgcgaggagaaacttgacttctgcgcgcaagatctcaacccctgccagcatgactctaagtgtatcctcaccccgaagggcttcaagtgcgactgcactcccggatatgttggcgaacactgtgacatcgactttgacgactgtcaggacaacaaatgcaagaacggggcacactgtactgacgccgtgaatggttatacatgtatatgccctgaaggctatagtggcctgttttgtgagtttagtccgcctatggtgctgcctagaacctcgccatgcgacaattttgattgccagaacggggctcagtgtattgtgcggattaatgaaccaatatgtcagtgcttgcctgggtaccagggcgagaaatgcgagaagttagtgtccgtcaattttatcaataaagagtcatatttacagatcccatcagccaaggtccggcctcagaccaacatcaccttgcagatagccaccgatgaggactctgggatactgttatataaaggggataaggaccatattgccgtggaactctacaggggaagagtcagagccagctacgacaccggctcccaccccgcttctgccatctacagtgtcgagactatcaacgatggcaattttcacattgtcgaattactggctctggatcagtcactgtcactctccgtggacggcggaaatcctaagattattactaatctttcaaaacaatccacactgaattttgacagtccgctctacgtcgggggtatgccaggaaaaagcaatgtcgccagtctgcgacaggcgccaggtcagaatggtacgtccttccacggttgtattcggaatctctacatcaactctgaactgcaggatttccagaaagtccccatgcagacagggattctgccgggatgtgagccttgtcataagaaagtatgtgcccacgggacctgccagccaagtagtcaggctggttttacatgcgagtgccaggagggctggatgggtccgttatgtgaccaacggaccaacgatccctgtctcggtaataagtgcgtacacggtacctgccttcccatcaacgcatttagttatagttgcaagtgtctggaagggcatggtggggtactctgtgacgaggaagaagacctgttcaatccttgtcaggccatcaagtgcaagcacggaaagtgccgcctcagcggactgggccaaccttattgtgaatgctcaagcggatacaccggagacagctgcgaccgggagataagctgtagaggggagcggatccgggactattaccagaagcagcagggctacgcggcttgtcaaactaccaagaaggtatctaggttagaatgcagggggggatgtgctggcggacaatgctgtgggcctctgcgcagtaaaaggaggaagtattccttcgagtgcacagatggaagttcattcgttgacgaggtcgagaaggttgtaaaatgcggatgcactcgttgtgtgtcttag

SEQ ID NO: 149552 - DNA, 6390 bp, Artificial Sequence
  derived and/or modified sequence
cggattcatcctcaggacctaaagttgcccaaggagctcctgctctgccagaggagggtggagagggcggtgggaggcgtgtgcctgagtgggctctactgccttgttccatattatttggtgcacattttccctggcactctgggttgctagccccgccgggcactgggcctcagacactgcgcggttccctcggagcagcaagctaaagaaagcccccagtgccggcgaggaaggaggcggcggggaaagatgcgcggcgttggctggcagatgctgtccctgtcgctggggttagtgctggcgatcctgaacaaggtggcaccgcaggcgtgcccggcgcagtgctcttgctcgggcagcacagtggactgtcacgggctggcgctgcgcagcgtgcccaggaatatcccccgcaacaccgagagactggatttaaatggaaataacatcacaagaattacgaagacagattttgctggtcttagacatctaagagttcttcagcttatggagaataagattagcaccattgaaagaggagcattccaggatcttaaagaactagagagactgcgtttaaacagaaatcaccttcagctgtttcctgagttgctgtttcttgggactgcgaagctatacaggcttgatctcagtgaaaaccaaattcaggcaatcccaaggaaagctttccgtggggcagttgacataaaaaatttgcaactggattacaaccagatcagctgtattgaagatggggcattcagggctctccgggacctggaagtgctcactctcaacaataacaacattactagactttctgtggcaagtttcaaccatatgcctaaacttaggacttttcgactgcattcaaacaacctgtattgtgactgccacctggcctggctctccgactggcttcgccaaaggcctcgggttggtctgtacactcagtgtatgggcccctcccacctgagaggccataatgtagccgaggttcaaaaacgagaatttgtctgcagtggtcaccagtcatttatggctccttcttgtagtgttttgcactgccctgccgcctgtacctgtagcaacaatatcgtagactgtcgtgggaaaggtctcactgagatccccacaaatcttccagagaccatcacagaaatacgtttggaacagaacacaatcaaagtcatccctcctggagctttctcaccatataaaaagcttagacgaattgacctgagcaataatcagatctctgaacttgcaccagatgctttccaaggactacgctctctgaattcacttgtcctctatggaaataaaatcacagaactccccaaaagtttatttgaaggactgttttccttacagctcctattattgaatgccaacaagataaactgccttcgggtagatgcttttcaggatctccacaacttgaaccttctctccctatatgacaacaagcttcagaccatcgccaaggggaccttttcacctcttcgggccattcaaactatgcatttggcccagaacccctttatttgtgactgccatctcaagtggctagcggattatctccataccaacccgattgagaccagtggtgcccgttgcaccagcccccgccgcctggcaaacaaaagaattggacagatcaaaagcaagaaattccgttgttcagctaaagaacagtatttcattccaggtacagaagattatcgatcaaaattaagtggagactgctttgcggatctggcttgccctgaaaagtgtcgctgtgaaggaaccacagtagattgctctaatcaaaagctcaacaaaatcccggagcacattccccagtacactgcagagttgcgtctcaataataatgaatttaccgtgttggaagccacaggaatctttaagaaacttcctcaattacgtaaaataaactttagcaacaataagatcacagatattgaggagggagcatttgaaggagcatctggtgtaaatgaaatacttcttacgagtaatcgtttggaaaatgtgcagcataagatgttcaagggattggaaagcctcaaaactttgatgttgagaagcaatcgaataacctgtgtggggaatgacagtttcataggactcagttctgtgcgtttgctttctttgtatgataatcaaattactacagttgcaccaggggcatttgatactctccattctttatctactctaaacctcttggccaatccttttaactgtaactgctacctggcttggttgggagagtggctgagaaagaagagaattgtcacgggaaatcctagatgtcaaaaaccatacttcctgaaagaaatacccatccaggatgtggccattcaggacttcacttgtgatgacggaaatgatgacaatagttgctccccactttctcgctgtcctactgaatgtacttgcttggatacagtcgtccgatgtagcaacaagggtttgaaggtcttgccgaaaggtattccaagagatgtcacagagttgtatctggatggaaaccaatttacactggttcccaaggaactctccaactacaaacatttaacacttatagacttaagtaacaacagaataagcacgctttctaatcagagcttcagcaacatgacccagctcctcaccttaattcttagttacaaccgtctgagatgtattcctcctcgcacctttgatggattaaagtctcttcgattactttctctacatggaaatgacatttctgttgtgcctgaaggtgctttcaatgatctttctgcattatcacatctagcaattggagccaaccctctttactgtgattgtaacatgcagtggttatccgactgggtgaagtcggaatataaggagcctggaattgctcgttgtgctggtcctggagaaatggcagataaacttttactcacaactccctccaaaaaatttacctgtcaaggtcctgtggatgtcaatattctagctaagtgtaacccctgcctatcaaatccgtgtaaaaatgatggcacatgtaatagtgatccagttgacttttaccgatgcacctgtccatatggtttcaaggggcaggactgtgatgtcccaattcatgcctgcatcagtaacccatgtaaacatggaggaacttgccacttaaaggaaggagaagaagatggattctggtgtatttgtgctgatggatttgaaggagaaaattgtgaagtcaacgttgatgattgtgaagataatgactgtgaaaataattctacatgtgtcgatggcattaataactacacatgcctttgcccacctgagtatacaggtgagttgtgtgaggagaagctggacttctgtgcccaggacctgaacccctgccagcacgattcaaagtgcatcctaactccaaagggattcaaatgtgactgcacaccagggtacgtaggtgaacactgcgacatcgattttgacgactgccaagacaacaagtgtaaaaacggagcccactgcacagatgcagtgaacggctatacgtgcatatgccccgaaggttacagtggcttgttctgtgagttttctccacccatggtcctccctcgtaccagcccctgtgataattttgattgtcagaatggagctcagtgtatcgtcagaataaatgagccaatatgtcagtgtttgcctggctatcagggagaaaagtgtgaaaaattggttagtgtgaattttataaacaaagagtcttatcttcagattccttcagccaaggttcggcctcagacgaacataacacttcagattgccacagatgaagacagcggaatcctcctgtataagggtgacaaagaccatatcgcggtagaactctatcgggggcgtgttcgtgccagctatgacaccggctctcatccagcttctgccatttacagtgtggagacaatcaatgatggaaacttccacattgtggaactacttgccttggatcagagtctctctttgtccgtggatggtgggaaccccaaaatcatcactaacttgtcaaagcagtccactctgaattttgactctccactctatgtaggaggcatgccagggaagagtaacgtggcatctctgcgccaggcccctgggcagaacggaaccagcttccacggctgcatccggaacctttacatcaacagtgagctgcaggacttccagaaggtgccgatgcaaacaggcattttgcctggctgtgagccatgccacaagaaggtgtgtgcccatggcacatgccagcccagcagccaggcaggcttcacctgcgagtgccaggaaggatggatggggcccctctgtgaccaacggaccaatgacccttgccttggaaataaatgcgtacatggcacctgcttgcccatcaatgcgttctcctacagctgtaagtgcttggagggccatggaggtgtcctctgtgatgaagaggaggatctgtttaacccatgccaggcgatcaagtgcaagcatgggaagtgcaggctttcaggtctggggcagccctactgtgaatgcagcagtggatacacgggggacagctgtgatcgagaaatctcttgtcgaggggaaaggataagagattattaccaaaagcagcagggctatgctgcttgccaaacaaccaagaaggtgtcccgattagagtgcagaggtgggtgtgcaggagggcagtgctgtggaccgctgaggagcaagcggcggaaatactctttcgaatgcactgacggctcctcctttgtggacgaggttgagaaagtggtgaagtgcggctgtacgaggtgtgtgtcctaaacacactcccggcagctctgtctttggaaaaggttgtatacttcttgaccgtgtgggactaatgaatgcttcatagtggaaatatttgaaatatattgtaaaatacagaacagacttatttttattatgagaataaagactttttttctgcatttggaaaaaaaaaaaaagaaatgcttgaactaaagcttcccctatgctggagaagtatgaagaaagatatacctggagacattagaacagcgatgggaaccattgcaactcgggtccatctttgtaacatgctgaagacaagcagaagcacatgcacgagggacagaggagctactgtgcactgctgtgaaattgcccagagcataaaacctgtgtaccctccttcacatcaaccaagttcactaggacataccaagcacatgcgtgtgaatgaggatgcaaggcaagagaatggaactccagaattcacagatagaacaaatggatgagaaatatttcatgcaaaatataaagtgtcctgaggatctgggttccatttacgagaggaaatgaaagtgctaaaataaattttatcttccttttaaatgtcagcatgtcagcagaagcagcacacaaaagtctttaccattttccagtattaatttttttgtaatataaatgataaaggagatgataaagaaccaatagattattgataaataaattagtaataatatgattttttgtttctatgagttctaaacagccctatacagtattcagtttccatgagaaatatttattgtatcaaagtacattgtacttaacattttaggccatccttttactgttccttgatgctttaatatatattaatttataattatcctgatatttttgtacatttttcaaacttaaaaatcaggatttttttttttttttttttggcaatagtactaacatagggttttatcttgggatacatatgtattggtctgtttgttgaccttgacatctgatcactgatgtcaatgacctactggcctcattcaggacacctgcagagagtatgcaaagtccgagagaggaaaacagaaatctgtatgtgagatggtcattgtacagaaagaagtggcccctctgcaacatgtcctcacagaaacgaaatggtgtgtagcaatcaacactagaaagtagaccttttgcaaattaatatgtccttgaccttttttgcccttttgtgggggtgaggtggggataaaaagactgtcatatcaagaactgtgacttttctttccctcaaacaataaaactcctttattatcttaatgctcccatgttaacatgtttgctgctaaattacaatgtagaattgataatggtttatagtgaactgtgctcttccctcattaaaatcccagggtgccctgtaaagatgcagatgtttcttcctgaaaacttctttttttacaaagaaaattagatgtacatgtataattcagtgtgctttgtctttctccagattaatatcggttacactgctgatgtttgtaaattaaacagatatttacttca

SEQ ID NO: 149553 - DNA, 4590 bp, Artificial Sequence
  derived and/or modified sequence
atgagaggcgtgggctggcagatgctgagcctgagcctgggcctggtgctggccatcctgaacaaggtggccccccaggcctgccccgcccagtgcagctgcagcggcagcaccgtggactgccacggcctggccctgagaagcgtgcccagaaacatccccagaaacaccgagagactggacctgaacggcaacaacatcaccagaatcaccaagaccgacttcgccggcctgagacacctgagagtgctgcagctgatggagaacaagatcagcaccatcgagagaggcgccttccaggacctgaaggagctggagagactgagactgaacagaaaccacctgcagctgttccccgagctgctgttcctgggcaccgccaagctgtacagactggacctgagcgagaaccagatccaggccatccccagaaaggccttcagaggcgccgtggacatcaagaacctgcagctggactacaaccagatcagctgcatcgaggacggcgccttcagagccctgagagacctggaggtgctgaccctgaacaacaacaacatcaccagactgagcgtggccagcttcaaccacatgcccaagctgagaaccttcagactgcacagcaacaacctgtactgcgactgccacctggcctggctgagcgactggctgagacagagacccagagtgggcctgtacacccagtgcatgggccccagccacctgagaggccacaacgtggccgaggtgcagaagagagagttcgtgtgcagcggccaccagagcttcatggcccccagctgcagcgtgctgcactgccccgccgcctgcacctgcagcaacaacatcgtggactgcagaggcaagggcctgaccgagatccccaccaacctgcccgagaccatcaccgagatcagactggagcagaacaccatcaaggtgatcccccccggcgccttcagcccctacaagaagctgagaagaatcgacctgagcaacaaccagatcagcgagctggcccccgacgccttccagggcctgagaagcctgaacagcctggtgctgtacggcaacaagatcaccgagctgcccaagagcctgttcgagggcctgttcagcctgcagctgctgctgctgaacgccaacaagatcaactgcctgagagtggacgccttccaggacctgcacaacctgaacctgctgagcctgtacgacaacaagctgcagaccatcgccaagggcaccttcagccccctgagagccatccagaccatgcacctggcccagaaccccttcatctgcgactgccacctgaagtggctggccgactacctgcacaccaaccccatcgagaccagcggcgccagatgcaccagccccagaagactggccaacaagagaatcggccagatcaagagcaagaagttcagatgcagcgccaaggagcagtacttcatccccggcaccgaggactacagaagcaagctgagcggcgactgcttcgccgacctggcctgccccgagaagtgcagatgcgagggcaccaccgtggactgcagcaaccagaagctgaacaagatccccgagcacatcccccagtacaccgccgagctgagactgaacaacaacgagttcaccgtgctggaggccaccggcatcttcaagaagctgccccagctgagaaagatcaacttcagcaacaacaagatcaccgacatcgaggagggcgccttcgagggcgccagcggcgtgaacgagatcctgctgaccagcaacagactggagaacgtgcagcacaagatgttcaagggcctggagagcctgaagaccctgatgctgagaagcaacagaatcacctgcgtgggcaacgacagcttcatcggcctgagcagcgtgagactgctgagcctgtacgacaaccagatcaccaccgtggcccccggcgccttcgacaccctgcacagcctgagcaccctgaacctgctggccaaccccttcaactgcaactgctacctggcctggctgggcgagtggctgagaaagaagagaatcgtgaccggcaaccccagatgccagaagccctacttcctgaaggagatccccatccaggacgtggccatccaggacttcacctgcgacgacggcaacgacgacaacagctgcagccccctgagcagatgccccaccgagtgcacctgcctggacaccgtggtgagatgcagcaacaagggcctgaaggtgctgcccaagggcatccccagagacgtgaccgagctgtacctggacggcaaccagttcaccctggtgcccaaggagctgagcaactacaagcacctgaccctgatcgacctgagcaacaacagaatcagcaccctgagcaaccagagcttcagcaacatgacccagctgctgaccctgatcctgagctacaacagactgagatgcatcccccccagaaccttcgacggcctgaagagcctgagactgctgagcctgcacggcaacgacatcagcgtggtgcccgagggcgccttcaacgacctgagcgccctgagccacctggccatcggcgccaaccccctgtactgcgactgcaacatgcagtggctgagcgactgggtgaagagcgagtacaaggagcccggcatcgccagatgcgccggccccggcgagatggccgacaagctgctgctgaccacccccagcaagaagttcacctgccagggccccgtggacgtgaacatcctggccaagtgcaacccctgcctgagcaacccctgcaagaacgacggcacctgcaacagcgaccccgtggacttctacagatgcacctgcccctacggcttcaagggccaggactgcgacgtgcccatccacgcctgcatcagcaacccctgcaagcacggcggcacctgccacctgaaggagggcgaggaggacggcttctggtgcatctgcgccgacggcttcgagggcgagaactgcgaggtgaacgtggacgactgcgaggacaacgactgcgagaacaacagcacctgcgtggacggcatcaacaactacacctgcctgtgcccccccgagtacaccggcgagctgtgcgaggagaagctggacttctgcgcccaggacctgaacccctgccagcacgacagcaagtgcatcctgacccccaagggcttcaagtgcgactgcacccccggctacgtgggcgagcactgcgacatcgacttcgacgactgccaggacaacaagtgcaagaacggcgcccactgcaccgacgccgtgaacggctacacctgcatctgccccgagggctacagcggcctgttctgcgagttcagcccccccatggtgctgcccagaaccagcccctgcgacaacttcgactgccagaacggcgcccagtgcatcgtgagaatcaacgagcccatctgccagtgcctgcccggctaccagggcgagaagtgcgagaagctggtgagcgtgaacttcatcaacaaggagagctacctgcagatccccagcgccaaggtgagaccccagaccaacatcaccctgcagatcgccaccgacgaggacagcggcatcctgctgtacaagggcgacaaggaccacatcgccgtggagctgtacagaggcagagtgagagccagctacgacaccggcagccaccccgccagcgccatctacagcgtggagaccatcaacgacggcaacttccacatcgtggagctgctggccctggaccagagcctgagcctgagcgtggacggcggcaaccccaagatcatcaccaacctgagcaagcagagcaccctgaacttcgacagccccctgtacgtgggcggcatgcccggcaagagcaacgtggccagcctgagacaggcccccggccagaacggcaccagcttccacggctgcatcagaaacctgtacatcaacagcgagctgcaggacttccagaaggtgcccatgcagaccggcatcctgcccggctgcgagccctgccacaagaaggtgtgcgcccacggcacctgccagcccagcagccaggccggcttcacctgcgagtgccaggagggctggatgggccccctgtgcgaccagagaaccaacgacccctgcctgggcaacaagtgcgtgcacggcacctgcctgcccatcaacgccttcagctacagctgcaagtgcctggagggccacggcggcgtgctgtgcgacgaggaggaggacctgttcaacccctgccaggccatcaagtgcaagcacggcaagtgcagactgagcggcctgggccagccctactgcgagtgcagcagcggctacaccggcgacagctgcgacagagagatcagctgcagaggcgagagaatcagagactactaccagaagcagcagggctacgccgcctgccagaccaccaagaaggtgagcagactggagtgcagaggcggctgcgccggcggccagtgctgcggccccctgagaagcaagagaagaaagtacagcttcgagtgcaccgacggcagcagcttcgtggacgaggtggagaaggtggtgaagtgcggctgcaccagatgcgtgagctag

SEQ ID NO: 149554 - protein, 1073 aa, Artificial Sequence
  derived and/or modified sequence
MTDQENNNNISSNPFAALFGSLADAKQFAAIQKEQLKQQSDELPASPDDSDNSVSESLDEFDYSVAEISRSFRSQQEICEQLNINHMIQRIFLITLDNSDPSLKSGNGIPSRCVYLEEMAVELEDQDWLDMSNVEQALFARLLLQDPGNHLINMTSSTTLNLSADRDAGERHIFCYLYSCFQRAKEEITKVPENLLPFAVQCRNLTVSNTRTVLLTPEIYVDQNIHEQLVDLMLEAIQGAREYMNKIYFEDVTEFLEEVIEALILDEEVRTFPEVMIPVFDILLGRIKDLELCQILLYAYLDILLYFTRQKDMAKVFVEYIQPKDPTNGQMYQKTLLGVILSISCLLKTPGVVENHGYFLNPSRSSPQEIKVQEANIHQFMAQFHEKIYQMLKNLLQLSPETKHCILSWLGNCLHANAGRTKIWANQMPEIFFQMYASDAFFLNLGAALLKLCQPFCKPRSSRLLTFNPTYCALKELNDEERKIKNVHMRGLDKETCLIPAVQEPKFPQNYNLVTENLALTEYTLYLGFHRLHDQMVKINQNLHRLQVAWRDAQQSSSPAADNLREQFERLMTIYLSTKTAMTEPQMLQNCLNLQVSMAVLLVQLAIGNEGSQPIELTFPLPDGYSSLAYVPEFFADNLGDFLIFLRRFADDILETSADSLEHVLHFITIFTGSIERMKNPHLRAKLAEVLEAVMPHLDQTPNPLVSSVFHRKRVFCNFQYAPQLAEALIKVFVDIEFTGDPHQFEQKFNYRRPMYPILRYMWGTDTYRESIKDLADYASKNLEAMNPPLFLRFLNLLMNDAIFLLDEAIQYLSKIKIQQIEKDRGEWDSLTPEARREKEAGLQMFGQLARFHNIMSNETIGTLAFLTSEIKSLFVHPFLAERIISMLNYFLQHLVGPKMGALKVKDFSEFDFKPQQLVSDICTIYLNLGDEENFCATVPKDGRSYSPTLFAQTVRVLKKINKPGNMIMAFSNLAERIKSLADLQQQEEETYADACDEFLDPIMSTLMCDPVVLPSSRVTVDRSTIARHLLSDQTDPFNRSPLTMDQIRPNTELKEKIQRWLAERKQQKEQLE

SEQ ID NO: 149555 - protein, 538 aa, Artificial Sequence
  derived and/or modified sequence
MVKINQNLHRLQVAWRDAQQSSSPAADNLREQFERLMTIYLSTKTAMTEPQMLQNCLNLQVSMAVLLVQLAIGNEGSQPIELTFPLPDGYSSLAYVPEFFADNLGDFLIFLRRFADDILETSADSLEHVLHFITIFTGSIERMKNPHLRAKLAEVLEAVMPHLDQTPNPLVSSVFHRKRVFCNFQYAPQLAEALIKVFVDIEFTGDPHQFEQKFNYRRPMYPILRYMWGTDTYRESIKDLADYASKNLEAMNPPLFLRFLNLLMNDAIFLLDEAIQYLSKIKIQQIEKDRGEWDSLTPEARREKEAGLQMFGQLARFHNIMSNETIGTLAFLTSEIKSLFVHPFLAERIISMLNYFLQHLVGPKMGALKVKDFSEFDFKPQQLVSDICTIYLNLGDEENFCATVPKDGRSYSPTLFAQTVRVLKKINKPGNMIMAFSNLAERIKSLADLQQQEEETYADACDEFLDPIMSTLMCDPVVLPSSRVTVDRSTIARHLLSDQTDPFNRSPLTMDQIRPNTELKEKIQRWLAERKQQKEQLE

SEQ ID NO: 149556 - DNA, 3222 bp, Artificial Sequence
  derived and/or modified sequence
atgaccgaccaggagaacaacaacaacatcagcagcaaccccttcgccgccctgttcggcagcctggccgacgccaagcagttcgccgccatccagaaggagcagctgaagcagcagagcgacgagctgcccgccagccccgacgacagcgacaacagcgtgagcgagagcctggacgagttcgactacagcgtggccgagatcagcagaagcttcagaagccagcaggagatctgcgagcagctgaacatcaaccacatgatccagagaatcttcctgatcaccctggacaacagcgaccccagcctgaagagcggcaacggcatccccagcagatgcgtgtacctggaggagatggccgtggagctggaggaccaggactggctggacatgagcaacgtggagcaggccctgttcgccagactgctgctgcaggaccccggcaaccacctgatcaacatgaccagcagcaccaccctgaacctgagcgccgacagagacgccggcgagagacacatcttctgctacctgtacagctgcttccagagagccaaggaggagatcaccaaggtgcccgagaacctgctgcccttcgccgtgcagtgcagaaacctgaccgtgagcaacaccagaaccgtgctgctgacccccgagatctacgtggaccagaacatccacgagcagctggtggacctgatgctggaggccatccagggcgccagagagtacatgaacaagatctacttcgaggacgtgaccgagttcctggaggaggtgatcgaggccctgatcctggacgaggaggtgagaaccttccccgaggtgatgatccccgtgttcgacatcctgctgggcagaatcaaggacctggagctgtgccagatcctgctgtacgcctacctggacatcctgctgtacttcaccagacagaaggacatggccaaggtgttcgtggagtacatccagcccaaggaccccaccaacggccagatgtaccagaagaccctgctgggcgtgatcctgagcatcagctgcctgctgaagacccccggcgtggtggagaaccacggctacttcctgaaccccagcagaagcagcccccaggagatcaaggtgcaggaggccaacatccaccagttcatggcccagttccacgagaagatctaccagatgctgaagaacctgctgcagctgagccccgagaccaagcactgcatcctgagctggctgggcaactgcctgcacgccaacgccggcagaaccaagatctgggccaaccagatgcccgagatcttcttccagatgtacgccagcgacgccttcttcctgaacctgggcgccgccctgctgaagctgtgccagcccttctgcaagcccagaagcagcagactgctgaccttcaaccccacctactgcgccctgaaggagctgaacgacgaggagagaaagatcaagaacgtgcacatgagaggcctggacaaggagacctgcctgatccccgccgtgcaggagcccaagttcccccagaactacaacctggtgaccgagaacctggccctgaccgagtacaccctgtacctgggcttccacagactgcacgaccagatggtgaagatcaaccagaacctgcacagactgcaggtggcctggagagacgcccagcagagcagcagccccgccgccgacaacctgagagagcagttcgagagactgatgaccatctacctgagcaccaagaccgccatgaccgagccccagatgctgcagaactgcctgaacctgcaggtgagcatggccgtgctgctggtgcagctggccatcggcaacgagggcagccagcccatcgagctgaccttccccctgcccgacggctacagcagcctggcctacgtgcccgagttcttcgccgacaacctgggcgacttcctgatcttcctgagaagattcgccgacgacatcctggagaccagcgccgacagcctggagcacgtgctgcacttcatcaccatcttcaccggcagcatcgagagaatgaagaacccccacctgagagccaagctggccgaggtgctggaggccgtgatgccccacctggaccagacccccaaccccctggtgagcagcgtgttccacagaaagagagtgttctgcaacttccagtacgccccccagctggccgaggccctgatcaaggtgttcgtggacatcgagttcaccggcgacccccaccagttcgagcagaagttcaactacagaagacccatgtaccccatcctgagatacatgtggggcaccgacacctacagagagagcatcaaggacctggccgactacgccagcaagaacctggaggccatgaacccccccctgttcctgagattcctgaacctgctgatgaacgacgccatcttcctgctggacgaggccatccagtacctgagcaagatcaagatccagcagatcgagaaggacagaggcgagtgggacagcctgacccccgaggccagaagagagaaggaggccggcctgcagatgttcggccagctggccagattccacaacatcatgagcaacgagaccatcggcaccctggccttcctgaccagcgagatcaagagcctgttcgtgcaccccttcctggccgagagaatcatcagcatgctgaactacttcctgcagcacctggtgggccccaagatgggcgccctgaaggtgaaggacttcagcgagttcgacttcaagccccagcagctggtgagcgacatctgcaccatctacctgaacctgggcgacgaggagaacttctgcgccaccgtgcccaaggacggcagaagctacagccccaccctgttcgcccagaccgtgagagtgctgaagaagatcaacaagcccggcaacatgatcatggccttcagcaacctggccgagagaatcaagagcctggccgacctgcagcagcaggaggaggagacctacgccgacgcctgcgacgagttcctggaccccatcatgagcaccctgatgtgcgaccccgtggtgctgcccagcagcagagtgaccgtggacagaagcaccatcgccagacacctgctgagcgaccagaccgaccccttcaacagaagccccctgaccatggaccagatcagacccaacaccgagctgaaggagaagatccagagatggctggccgagagaaagcagcagaaggagcagctggagtag

SEQ ID NO: 149557 - DNA, 1617 bp, Artificial Sequence
  derived and/or modified sequence
atggtgaagatcaaccagaacctgcacagactgcaggtggcctggagagacgcccagcagagcagcagccccgccgccgacaacctgagagagcagttcgagagactgatgaccatctacctgagcaccaagaccgccatgaccgagccccagatgctgcagaactgcctgaacctgcaggtgagcatggccgtgctgctggtgcagctggccatcggcaacgagggcagccagcccatcgagctgaccttccccctgcccgacggctacagcagcctggcctacgtgcccgagttcttcgccgacaacctgggcgacttcctgatcttcctgagaagattcgccgacgacatcctggagaccagcgccgacagcctggagcacgtgctgcacttcatcaccatcttcaccggcagcatcgagagaatgaagaacccccacctgagagccaagctggccgaggtgctggaggccgtgatgccccacctggaccagacccccaaccccctggtgagcagcgtgttccacagaaagagagtgttctgcaacttccagtacgccccccagctggccgaggccctgatcaaggtgttcgtggacatcgagttcaccggcgacccccaccagttcgagcagaagttcaactacagaagacccatgtaccccatcctgagatacatgtggggcaccgacacctacagagagagcatcaaggacctggccgactacgccagcaagaacctggaggccatgaacccccccctgttcctgagattcctgaacctgctgatgaacgacgccatcttcctgctggacgaggccatccagtacctgagcaagatcaagatccagcagatcgagaaggacagaggcgagtgggacagcctgacccccgaggccagaagagagaaggaggccggcctgcagatgttcggccagctggccagattccacaacatcatgagcaacgagaccatcggcaccctggccttcctgaccagcgagatcaagagcctgttcgtgcaccccttcctggccgagagaatcatcagcatgctgaactacttcctgcagcacctggtgggccccaagatgggcgccctgaaggtgaaggacttcagcgagttcgacttcaagccccagcagctggtgagcgacatctgcaccatctacctgaacctgggcgacgaggagaacttctgcgccaccgtgcccaaggacggcagaagctacagccccaccctgttcgcccagaccgtgagagtgctgaagaagatcaacaagcccggcaacatgatcatggccttcagcaacctggccgagagaatcaagagcctggccgacctgcagcagcaggaggaggagacctacgccgacgcctgcgacgagttcctggaccccatcatgagcaccctgatgtgcgaccccgtggtgctgcccagcagcagagtgaccgtggacagaagcaccatcgccagacacctgctgagcgaccagaccgaccccttcaacagaagccccctgaccatggaccagatcagacccaacaccgagctgaaggagaagatccagagatggctggccgagagaaagcagcagaaggagcagctggagtag

SEQ ID NO: 149558 - DNA, 3222 bp, Artificial Sequence
  derived and/or modified sequence
atgaccgatcaagagaacaataacaacatctcaagcaatccctttgctgccctcttcggcagcctggccgacgcaaagcaattcgccgcaatccagaaggagcagctgaagcagcagtcggatgaactgccggccagtcctgatgacagtgataacagcgtgtccgagtcactcgacgagttcgactactccgtggccgaaatttcacggagctttaggtcccagcaagagatatgtgaacagctaaacattaatcacatgatccagaggattttcctcatcacactggacaattctgatccatccctgaagtccggaaacggcataccctccaggtgcgtatacctggaagaaatggcagtagagctggaggaccaagactggctcgatatgtccaacgtggaacaggccttgtttgcccgcctcctgctgcaggatccaggcaatcatctgataaatatgacatcttctactacgctgaatcttagcgcagaccgggacgctggagaacgccacattttctgctatctttattcctgttttcagagagcaaaggaggagatcaccaaggttcctgaaaacctgctgcctttcgctgtccagtgtcgaaatctcacagtatcaaacactcgaactgtcctgttaaccccggagatctatgttgaccaaaatattcacgaacaacttgtggatctgatgttggaggccatacagggcgccagggagtacatgaataagatttacttcgaggacgtgacggagttcctagaggaggtgatcgaggcgttgattctggatgaagaggtccgaactttcccagaagttatgatccccgtgttcgatattctgctagggcggataaaggacctggagctttgccagatcctcctctacgcctacctggacattctgttatactttaccagacagaaggatatggcaaaagtgtttgttgagtatattcaacccaaggatccaaccaacggacagatgtatcagaagaccctgctaggcgtgatcctgagcatatcttgcctcctgaagacgcctggggtggtcgagaatcatgggtactttctcaacccgtcaaggtccagcccccaggagatcaaagtgcaggaggccaatatccatcagttcatggcgcagttccacgagaaaatctaccagatgcttaagaatctcctgcaactgagcccagaaactaagcactgcatcctgtcctggctggggaactgcctccatgctaatgctggcaggacaaaaatctgggctaaccaaatgccggagatcttcttccagatgtacgcctccgatgcattctttctcaacctcggagccgcattattgaagctctgtcaacccttttgcaagccccggtcttctcgactccttacttttaacccaacctactgcgccctcaaagagcttaatgatgaagagcggaaaatcaaaaacgtgcacatgaggggcctcgacaaagagacctgcctgattcccgccgtccaagagcccaagttcccccaaaactataacctggtgacagagaacctcgccctgacagagtatacactttatcttgggttccacagactacacgatcagatggtgaagatcaaccagaatctgcatcggctccaggtggcatggcgtgacgcccagcagagttcctcaccagccgccgataatctcagggagcagttcgagagattgatgacaatttatctctccaccaaaaccgctatgaccgaaccacagatgctacagaattgcctaaatctgcaggtttctatggcggtgctgctcgttcagcttgcaatcggcaacgagggaagccagccgatcgagctgacctttccactgccagacggctacagctctcttgcgtatgtgcctgaattcttcgccgacaacctaggcgacttcctgatatttcttagaaggttcgccgacgatatacttgagacgtccgcagattctctagagcacgttttgcactttatcacaatttttaccggatcaatcgagcgcatgaagaacccccatctccgggccaaactggccgaggtacttgaagctgtcatgccgcaccttgaccagacaccaaaccctcttgtctccagtgtcttccatagaaaacgagtgttttgtaactttcaatatgcacctcaactggcagaggctcttataaaggtcttcgtggacatagaattcactggcgacccacatcagtttgagcaaaagttcaactatcgaaggcccatgtaccctatcctccgctatatgtggggcacagatacgtacagagaatcaatcaaagatctggccgactacgctagtaaaaacttggaagcaatgaatccacccctgtttctgaggtttttaaatcttctcatgaatgacgcaatctttttactcgatgaggccattcagtatttgagcaagattaaaatccagcaaatcgagaaggaccggggggagtgggattctctgacccccgaagcccgcagggagaaagaggcgggactacaaatgtttggtcagttagcgcgctttcacaacataatgagcaatgagaccattggtaccctcgctttccttacatcggagatcaagagcctgttcgtgcatccatttctggcggagaggatcatcagtatgctgaattactttcttcagcatctggtgggccccaaaatgggggcccttaaagtgaaagacttcagcgaatttgactttaaaccccagcaacttgtcagcgacatctgcaccatctatctgaacctgggcgacgaggagaacttttgtgccactgtgcctaaggacgggcgatcctactccccgaccttgtttgcccagaccgttcgcgttcttaagaaaataaacaaacctgggaatatgattatggccttttccaatttggccgagcggattaagtccctcgctgatctgcaacagcaggaagaagaaacttacgccgacgcttgtgacgagtttctcgatccaatcatgtcaaccctgatgtgcgatcccgtggtgctgcctagttcgagagtgaccgtcgatcggagcacaattgcgaggcacctgctgtccgaccagactgaccccttcaatcgaagcccactcactatggaccagatcagacctaataccgaattaaaagagaaaattcagagatggcttgccgaacgaaaacagcagaaagagcagctggaatag

SEQ ID NO: 149559 - DNA, 1617 bp, Artificial Sequence
  derived and/or modified sequence
atggtgaaaattaaccagaatctccatagactgcaggtcgcttggagggacgcccagcaatcctcgagtccagctgcagacaatctcagagaacagtttgagcggctcatgaccatatacctgagcacaaagaccgccatgaccgagcctcagatgctgcagaattgcctgaatctccaggttagcatggccgtcctgttggttcagttggctatcggaaacgagggctcccaacccattgagctgaccttccccctcccagatgggtatagctccttggcctacgttccagaattctttgccgataatctcggagacttcctgatctttctgcgtaggttcgccgatgacattctggagaccagtgcagacagcctggagcatgtgctgcacttcattactatctttacaggctccattgagagaatgaagaacccccacctcagagctaaattggctgaggttctggaggctgttatgccgcatctggatcaaacacccaatcctctggtgagctctgtgtttcataggaagagagtcttttgtaacttccagtacgcccctcagctggccgaagctttaattaaggtgtttgttgacatcgaatttacaggtgatccgcaccagtttgagcagaaattcaattatcgacggccaatgtaccctatcttacgctatatgtggggtactgacacctacagagagtccatcaaggatctggccgactacgccagtaaaaacctcgaggcaatgaacccacctctgtttctgcggtttctaaacctcctgatgaacgacgctatcttcctgctagacgaagcgatccagtatctgtcaaaaatcaagattcagcagatcgagaaagaccgtggtgagtgggattccctgactcctgaagcaaggcgtgagaaggaagcagggctccagatgttcgggcagttggcacgctttcataatattatgagtaacgaaacaataggaacccttgccttcctcaccagcgaaatcaagagcctgttcgttcatccattcttggctgagagaatcatctccatgcttaattactttcttcagcacctcgtgggtcccaagatgggagccctgaaggtcaaagacttctcggagtttgattttaagccccagcagctggtgagcgacatttgtaccatttaccttaacctgggcgacgaggagaatttttgcgcgactgtgccaaaggatggtcggtcatactcaccaacccttttcgcacagacagtcagggtacttaaaaagatcaacaaacccggcaatatgatcatggctttctcgaacctggctgagcgaataaaaagtctcgcagatttacagcagcaggaggaggaaacctacgctgacgcttgcgatgagtttttggatccaataatgagcacactgatgtgcgatcccgttgtcttacctagtagtcgagtaaccgtcgacagaagtacaatcgctaggcacctgctttcagaccagacagatccgtttaataggtcccctctcacaatggatcagattaggcctaatactgagctcaaggaaaagatccagagatggttggccgaacggaagcaacagaaggaacaactagagtag

SEQ ID NO: 149560 - DNA, 3222 bp, Artificial Sequence
  derived and/or modified sequence
atgacagaccaggagaacaacaacaacatcagcagcaacccctttgctgccctgtttggcagcctggctgatgccaagcagtttgctgccatccagaaggagcagctgaagcagcagagtgatgagctgcctgccagcccagatgacagcgacaacagcgtgtctgagagcctggatgaatttgactacagcgtggccgagatcagccgctccttccgcagccagcaggagatctgtgagcagctgaacatcaaccacatgatccagaggatcttcctgatcaccctggacaacagcgaccccagcctgaagtctggaaatggcatccccagccgctgtgtgtacctggaggagatggctgtggagctggaggaccaggactggctggacatgagcaatgtggagcaggccctgtttgcccggctgctgctgcaggaccccggcaaccacctgatcaacatgaccagcagcaccaccctgaacctgtctgctgacagagatgctggggagcggcacatcttctgctacctgtacagctgcttccagagggccaaggaggagatcaccaaggtgcctgagaacctgctgccctttgctgtgcagtgcaggaacctgactgtgagcaacaccaggacagtgctgctgaccccagagatctacgtggaccagaacatccacgagcagctggtggacctgatgctggaggccatccagggcgcccgggagtacatgaacaagatctactttgaagatgtgacagagttcctggaggaggtgattgaggccctgatcctggatgaggaggtgaggaccttccctgaggtgatgatccctgtgtttgacatcctgctgggccgcatcaaggacctggagctgtgccagatcctgctgtatgcctacctggacatcctgctgtacttcacccggcagaaggacatggccaaggtgtttgtggagtacatccagcccaaggaccccaccaacggccagatgtaccagaagaccctgctgggcgtcatcctgagcatcagctgcctgctgaagaccccaggagtggtggagaaccacggctacttcctgaaccccagccgcagcagcccccaggagatcaaggtgcaggaggccaacatccaccagttcatggcccagttccacgagaagatctaccagatgctgaagaacctgctgcagctgagccctgagaccaagcactgcatcctgtcctggctgggcaactgcctgcacgccaatgccggccgcaccaagatctgggccaaccagatgcctgagatcttcttccagatgtatgccagtgatgccttcttcctgaacctgggcgccgccctgctgaagctgtgccagcccttctgcaagcccaggagcagccggctgctgaccttcaaccccacctactgtgccctgaaggagctgaatgatgaggagaggaagatcaagaatgtgcacatgaggggcctggacaaggagacctgcctgatcccagctgtgcaggagcccaagttcccccagaactacaacctggtgacagagaacctggccctgacagagtacaccctgtacctgggcttccaccggctgcatgaccagatggtgaagatcaaccagaacctgcaccggctgcaggtggcctggagagatgcccagcagagcagcagccctgctgctgacaacctgcgggagcagtttgagcggctgatgaccatctacctgagcaccaagacagccatgacagagccccagatgctgcagaactgcctgaacctgcaggtgtccatggctgtgctgctggtgcagctggccatcggaaatgaaggcagccagcccatcgagctgaccttccccctgcctgatggctacagcagcctggcctacgtgcctgagttctttgctgacaacctgggggacttcctgatcttcctgcggagatttgctgatgacatcctggagaccagcgctgacagcctggagcacgtgctgcacttcatcaccatcttcaccggcagcattgaaagaatgaagaacccccacctgcgggccaagctggccgaggtgctggaggccgtgatgccccacctggaccagacccccaaccccctggtgagcagcgtcttccacaggaagagggtcttctgcaacttccagtatgccccccagctggccgaggccctgatcaaggtgtttgtggacatcgagttcaccggggacccccaccagtttgagcagaagttcaactaccgccggcccatgtaccccatcctgcgctacatgtggggcacagacacctaccgggagagcatcaaggacctggccgactatgccagcaagaacctggaggccatgaaccccccactcttcctgcgcttcctgaacctgctgatgaatgatgccatcttcctgctggatgaggccatccagtacctgagcaagatcaagatccagcagatcgagaaggacagaggagagtgggacagcctgaccccagaggcccggcgggagaaggaggccggcctgcagatgtttggccagctggcccgcttccacaacatcatgagcaatgagaccatcggcaccctggccttcctgaccagcgagatcaagagcctgtttgtgcaccccttcctggccgagcgcatcatctccatgctgaactacttcctgcagcacctggtgggccccaagatgggcgccctgaaggtgaaggacttcagcgagtttgacttcaagccccagcagctggtgtctgacatctgcaccatctacctgaacctgggagatgaggagaacttctgtgccaccgtgcccaaggatggccgcagctacagccccaccctgtttgcccagacagtgcgggtgctgaagaagatcaacaagccaggcaacatgatcatggccttcagcaacctggccgagcgcatcaagagcctggccgacctgcagcagcaggaggaggagacctatgcagatgcctgtgatgagttcctggaccccatcatgagcaccctgatgtgtgaccctgtggtgctgcccagcagccgggtgacagtggacaggagcaccatcgcccggcacctgctgagtgaccagacagaccccttcaacagaagccccctgaccatggaccagatccggcccaacacagagctgaaggagaagatccagcgctggctggccgagaggaagcagcagaaggagcagctggagtag

SEQ ID NO: 149561 - DNA, 1617 bp, Artificial Sequence
  derived and/or modified sequence
atggtgaagatcaaccagaacctgcaccggctgcaggtggcctggagagatgcccagcagagcagcagccctgctgctgacaacctgcgggagcagtttgagcggctgatgaccatctacctgagcaccaagacagccatgacagagccccagatgctgcagaactgcctgaacctgcaggtgtccatggctgtgctgctggtgcagctggccatcggaaatgaaggcagccagcccatcgagctgaccttccccctgcctgatggctacagcagcctggcctacgtgcctgagttctttgctgacaacctgggggacttcctgatcttcctgcggagatttgctgatgacatcctggagaccagcgctgacagcctggagcacgtgctgcacttcatcaccatcttcaccggcagcattgaaagaatgaagaacccccacctgcgggccaagctggccgaggtgctggaggccgtgatgccccacctggaccagacccccaaccccctggtgtcctctgtgttccacaggaagagggtcttctgcaacttccagtatgccccccagctggccgaggccctgatcaaggtgtttgtggacatcgagttcaccggggacccccaccagtttgagcagaagttcaactacagaagacccatgtaccccatcctgcgctacatgtggggcacagacacctaccgggagagcatcaaggacctggccgactatgccagcaagaacctggaggccatgaaccccccactcttcctgcgcttcctgaacctgctgatgaatgatgccatcttcctgctggatgaggccatccagtacctgagcaagatcaagatccagcagatcgagaaggacagaggagagtgggacagcctgaccccagaggcccggcgggagaaggaggccggcctgcagatgtttggccagctggcccgcttccacaacatcatgagcaatgagaccatcggcaccctggccttcctgaccagcgagatcaagagcctgtttgtgcaccccttcctggccgagcgcatcatctccatgctgaactacttcctgcagcacctggtgggccccaagatgggcgccctgaaggtgaaggacttcagcgagtttgacttcaagccccagcagctggtgtctgacatctgcaccatctacctgaacctgggagatgaggagaacttctgtgccaccgtgcccaaggatggccgcagctacagccccaccctgtttgcccagacagtgcgggtgctgaagaagatcaacaagccaggcaacatgatcatggccttcagcaacctggccgagcgcatcaagagcctggccgacctgcagcagcaggaggaggagacctatgcagatgcctgtgatgagttcctggaccccatcatgagcaccctgatgtgtgaccctgtggtgctgcccagcagccgggtgacagtggacaggagcaccatcgcccggcacctgctgagtgaccagacagaccccttcaacagaagccccctgaccatggaccagatccggcccaacacagagctgaaggagaagatccagcgctggctggccgagaggaagcagcagaaggagcagctggagtag

SEQ ID NO: 149562 - DNA, 3222 bp, Artificial Sequence
  derived and/or modified sequence
atgaccgaccaggagaacaacaacaacatcagcagcaaccccttcgctgcgttgttcggctctctggcagacgcaaagcagttcgcagccattcagaaggagcagttaaagcagcaatccgacgaactgccggcaagccccgatgacagtgataacagtgttagcgagagccttgacgagtttgattatagtgtggccgagatctcccgatcgtttaggtcgcagcaggagatctgcgagcaactcaacatcaatcatatgatccagagaatttttctgatcacactggataactcagacccatccttgaaatcaggtaacggcattccatctcggtgtgtttatctggaagaaatggccgttgaactagaagaccaggattggttggacatgtcaaacgtcgagcaggccctttttgcccggcttttgctgcaggaccccgggaatcacctgatcaacatgacatccagcactacactcaacctctccgcagaccgagacgccggggaacggcacatcttctgttacttatactcctgctttcagagagcaaaggaagaaatcacaaaagttcctgagaacctcctgccattcgctgtgcagtgcaggaatctgacagtgagcaacactagaacggtactgctgaccccagagatttatgtggatcagaatattcatgagcagctggtagacttaatgcttgaggccatccagggtgcacgtgagtacatgaataagatctatttcgaggacgtcaccgagtttctcgaggaagtgatcgaggctctgatccttgatgaagaggtccgcacatttcccgaggtgatgatcccagtgttcgacatcttgctgggaagaattaaggacttggaactctgtcagatactcctctacgcttatctggacatcttgttgtatttcacccggcagaaggacatggccaaggtcttcgtggagtatatccagccaaaggatcccacaaacggccagatgtatcaaaagacactgctaggcgtgattctctcgatttcgtgtttgcttaaaaccccaggggtggtggagaaccatggctactttctgaaccctagtaggtccagcccacaagaaattaaggttcaggaagccaacattcaccagtttatggcccagttccacgaaaagatctatcagatgctcaaaaatctcctgcagctgtccccagaaaccaaacactgcatcctctcctggttgggtaattgtttgcatgcaaacgcaggcagaaccaaaatctgggcaaatcagatgccggagatcttcttccagatgtatgcttcggacgctttttttttgaatctgggagccgcactgttgaagctttgccaaccattctgtaagccacggagtagtcggctcctcacctttaatccaacctattgcgccttgaaagaactgaatgatgaagagcgaaagataaagaatgtccatatgcgggggctggataaagagacgtgcctgatcccagcagttcaggagcctaagtttcctcagaattacaacctggtcacagaaaatctggcgctaaccgagtataccctgtacctgggcttccatcgattgcatgaccagatggttaagatcaaccagaacctacaccggttgcaggtggcatggagagacgcccagcagtcatcctcgcctgcggctgacaatctgcgggagcagtttgaaaggctgatgacaatttatctcagcaccaaaactgccatgaccgagccccaaatgctgcagaactgtctgaatctacaggtgagcatggccgtgctgcttgtccaattagccatcgggaatgagggctcccagcctattgaacttacatttcccttaccagacggctactcgagcctggcgtacgtaccagagttttttgccgataacctcggcgattttctcatatttttgcgtcgtttcgccgatgacatcctcgaaacatccgccgattctcttgagcacgtgctgcacttcatcaccatctttaccgggtctatcgaacggatgaagaacccacaccttagagccaagttggctgaagtgctagaggccgtgatgcctcacctcgatcagacccccaatcccctggtgtcctcagtcttccaccgcaagcgggttttctgcaacttccaatacgcaccgcagctagctgaggcattaattaaggtgttcgtggatattgaatttactggcgaccctcatcaattcgaacagaaatttaactatcgccggccaatgtaccctatccttcgatatatgtgggggactgacacctatagagaaagtattaaggacctcgccgattacgccagtaaaaatcttgaggccatgaacccccccctctttttgcgttttctgaacctcctgatgaatgatgctatctttctgctggacgaagccatacagtatcttagcaaaatcaagatacagcaaatcgaaaaggatcgcggcgaatgggatagcctgactcctgaggcccgccgtgagaaggaggccggactgcagatgttcggccagttggcgcgttttcataatatcatgtctaacgagactatcggaaccctcgcgttcttgacctcagagatcaaaagtctgttcgtgcatccgttcctggcagagcgtataatctctatgctgaactacttcttgcagcacttagttggcccaaagatgggcgccttgaaggttaaggacttcagtgaatttgactttaagcctcagcagctggtcagtgacatatgtacaatttatcttaatctgggtgatgaagagaatttctgcgctacagtgcctaaggacggacggagctactcacctactctgtttgcccagacagtgcgggtacttaagaagataaataaaccggggaatatgataatggctttttcaaatctagcggagcgcattaaatcgctagctgatctccaacagcaggaagaggaaacttacgccgatgcgtgcgacgagttcctagatccaattatgtcgaccctgatgtgcgatcccgtcgtccttccaagctcccgcgtgacggtggatagaagcaccattgcccgacacctcctgagcgaccagacggacccattcaatagatcccctctcactatggaccagatccgaccaaacactgagttgaaagaaaagatccagcggtggctggcagagcggaagcagcagaaagaacagctcgagtag

SEQ ID NO: 149563 - DNA, 1617 bp, Artificial Sequence
  derived and/or modified sequence
atggtgaagatcaaccagaacctgcaccggctgcaggtggcctggagagatgcccagcagagctcaagccctgccgccgacaatctacgtgagcagttcgagcgactgatgactatctatttgtcaactaaaaccgccatgactgaaccacaaatgttgcagaattgtctgaatttgcaggtgagtatggcagttctgctggtccagctggccattggtaacgagggatcccagccaatcgagctgaccttcccactgccagacggttattcatcactggcctacgttcctgagttctttgccgataatcttggcgactttctgattttcctgagaaggttcgcagacgatatcttggagactagtgcagactcactagaacatgtgttacacttcataaccatttttacaggatctattgaacggatgaagaatccacatctgagagctaagctggctgaggtgctggaggccgttatgccccacctagaccagactccaaatcctctagtctcaagtgtattccaccgcaaaagggtgttttgcaactttcagtatgccccccagctcgccgaggctttgatcaaagtgtttgtggatattgagttcaccggcgatcctcaccagtttgagcagaaatttaattaccggcggcctatgtacccaatcctacgatatatgtggggcactgacacctatcgcgagtccatcaaagaccttgcggattatgcctcgaagaacctcgaggcaatgaatccaccccttttccttagattcctgaatctgttaatgaacgatgctatctttctgctggatgaggcaattcagtacttaagtaagatcaaaatccaacagatcgaaaaggatcggggagagtgggacagcctcacgccagaagctcgacgggagaaggaagcaggcctgcaaatgtttggacagctggcgcgcttccacaacattatgtctaacgagacaatcggaaccttagctttcctgacctccgagataaagagtctcttcgtgcacccatttcttgccgagagaattatttccatgctgaactacttcctccagcacctggtgggcccaaagatgggagctctgaaagttaaagacttctcagagttcgacttcaagccacaacagctggtatcagacatctgtactatatacctgaacctgggtgatgaagagaacttctgtgccaccgtgcccaaagacggaaggtcgtacagtcccacacttttcgcgcaaaccgtgcgggtgctgaagaagataaacaagccgggaaacatgataatggccttcagtaatctagccgagaggattaagagccttgctgatctacagcagcaagaagaagagacctatgcagacgcctgcgatgagtttctggaccccattatgtctacattaatgtgtgaccccgtcgtattgccctcctcgagggtgacagtcgatcgttcaacaattgctagacacctgttaagtgaccaaaccgacccattcaatagatcaccgctgactatggaccagatacgaccaaacaccgagctgaaagagaaaatccaaaggtggctagcggaaaggaaacagcagaaggaacagctggagtag

SEQ ID NO: 149564 - DNA, 3222 bp, Artificial Sequence
  derived and/or modified sequence
atgaccgaccaggagaacaacaacaacatctccagcaacccgttcgccgcactgttcggatccctcgccgacgcaaagcaattcgccgctatccagaaagaacagttgaagcagcagagcgacgaactgcccgcaagccctgatgacagtgataactctgtttccgagtctctggacgagttcgactatagcgtcgctgaaatttcacgcagctttcgatcccagcaggagatctgtgagcagctgaacatcaatcacatgattcaacggatattcttgatcacgctggacaactccgatccttctctgaaatccggaaacggtattcccagtcggtgcgtgtatttggaggaaatggccgttgagttagaggaccaggactggttggacatgagtaacgttgaacaggcgttgttcgccaggcttctgttgcaggatcccggaaaccatctaatcaatatgacaagttctactactctgaatctttctgcagacagggacgccggagagaggcatatcttttgttatttgtactcatgctttcagagggctaaggaagagataactaaagtgcctgaaaacctgctgcctttcgccgtgcagtgtagaaacctgacagtgtccaatacgcgtactgttctgcttacccctgaaatttatgtagaccaaaatatccatgagcagctggttgatctgatgctggaggccatacaaggggctagggagtacatgaacaagatatattttgaggatgtaaccgagttccttgaggaggtgatcgaggccctgattttagacgaagaggttaggactttccccgaggtgatgattcctgtgtttgatattctacttgggaggataaaagatttggagttgtgccagatcctgctctatgcgtacctggacatcctgctctactttacccgccagaaggacatggcaaaggttttcgttgagtatatccagccaaaggatcccacaaacggacagatgtaccagaagacgttgctcggggtcatcctgtcaatctcttgcctactcaaaaccccaggagtcgtggaaaatcacgggtatttcctgaacccttcgcggtcatccccgcaggagattaaagtgcaggaggcaaatatacaccaattcatggcacagtttcatgaaaagatttatcagatgctaaagaatctgctgcagctgagccccgaaaccaagcactgcatactctcatggctgggaaactgtctccatgccaacgctggacggacaaaaatttgggccaaccagatgccagagattttctttcagatgtacgctagcgacgcattttttctgaatctgggcgctgcactgcttaagctctgccagcccttctgtaaacctagatcatcacgactactgacttttaatcccacttattgcgcgctcaaagagttaaatgatgaggagaggaagattaaaaacgtccatatgagaggcctggataaggagacctgcttgatccctgccgttcaggagcccaagtttccacagaactacaacctcgtgacggaaaacttagcattgacagaatatacgttatacctcgggtttcaccgccttcacgaccagatggtgaaaatcaaccagaacctccacagacttcaggtggcttggagagatgcccaacagtcttcgagtcctgctgctgacaatctgagagaacagtttgaaaggctgatgacgatttacctgagtaccaaaactgcaatgactgagccacagatgctgcagaattgcctgaacctgcaggtttctatggcagtgcttctggtgcagctcgccatcgggaacgagggcagccagcctatcgagctaaccttccccctgcccgacggctactccagcctggcatatgtgcctgagttctttgcggataatctcggtgatttcctcatctttttgcggagattcgccgatgacatcctagagacctcggccgattcacttgagcacgtgctacattttataacaatctttaccggatccatagaacggatgaagaaccctcacctgcgggcaaaactggctgaagtgctggaggcggtgatgccccacctggaccagacccctaacccccttgtttcctccgtgttccaccgcaagcgggttttctgcaatttccaatacgcccctcagcttgccgaggctctgatcaaggtgttcgtggacatcgagttcactggcgaccctcaccagtttgaacagaagttcaattacagaaggccaatgtatcccatcctgcggtatatgtggggaaccgacacttacagggagtccatcaaggacctggcagattacgcatcaaagaacctagaggccatgaaccctccgttgtttctacggttcctgaacctgttgatgaacgacgctatctttctgcttgacgaggctattcagtatctcagtaagattaagatacagcagatagagaaagataggggagagtgggattccctgacccctgaggcacgcagagaaaaagaggccggtctccagatgttcggccagctcgcccgtttccacaacataatgtccaacgagaccatcggcacactggcctttctgaccagtgagataaagtcgttatttgtgcaccccttcctggctgagcgcataatcagcatgctcaactactttttacagcaccttgttggacctaagatgggcgctcttaaggtgaaggatttttcagagttcgattttaagccccagcagctcgtttctgatatttgcacgatctatcttaatctcggcgacgaggaaaacttctgcgccaccgttcctaaagatggaaggtcctactctcccaccttattcgcccagactgtgagagtcttaaagaaaattaataaaccaggaaacatgatcatggcattcagcaacctggcggagcgcattaagagcctcgctgacctgcagcagcaggaggaggagacctacgccgacgcctgtgatgagtttctggaccctattatgagtactctcatgtgtgatccagtggtgctgccaagcagtcgtgtgaccgtggatcgctcaactattgccagacacctactcagtgatcagaccgaccccttcaatcggtccccactcaccatggatcagatccgcccaaacactgaactgaaagagaaaatccagcggtggctcgctgagcgtaagcaacagaaggagcagctcgaatag

SEQ ID NO: 149565 - DNA, 1617 bp, Artificial Sequence
  derived and/or modified sequence
atggttaagattaatcagaacctgcaccggctccaggttgcatggagagacgctcagcagagttcctccccggctgccgacaacctgagagagcagttcgaacggttgatgaccatctacttgagcactaagacggccatgaccgagccccagatgctgcagaattgcctcaacctccaagtttctatggcggttctgctggtccaattggctatcggaaatgagggtagtcagcctattgagctgacatttccactgccggacggctacagtagtctggcctatgttccagagttctttgctgataatctgggcgacttccttattttcctccgccgattcgcagacgatattctcgaaacttccgctgattcactggaacacgtgctgcatttcatcacaattttcacgggaagcattgagagaatgaagaaccctcacctgcgcgctaagctggctgaggtgctggaggcagttatgcctcacctcgatcagacccccaatccgctggtgtcaagcgtgtttcacaggaagcgcgttttttgcaacttccaatacgctcctcagcttgcagaagctctgatcaaagtgttcgttgatatcgagttcactggagatccacaccagttcgagcagaaatttaattaccgtagacctatgtacccaattctccgatatatgtggggcactgacacatacagggagtccattaaagatctggcagattacgcatcgaagaacctagaagcaatgaaccccccactgtttctgcggttcttgaatcttctgatgaacgatgcgatattcctcctggacgaagcaattcaatacctgtcaaagatcaagatacaacaaatcgaaaaggacagaggtgagtgggatagtctcactcccgaagcaaggcgagaaaaggaggctggacttcagatgttcgggcagttagcgcgattccacaacatcatgagcaatgagaccatcgggaccctggcattccttacaagtgagattaagagcttatttgtgcatccatttttggcagaacgcatcatctccatgctgaattactttttacagcatctggtgggccctaagatgggggcactgaaggtgaaggacttttccgagttcgacttcaagccccaacagttggtaagcgatatctgtactatttaccttaacctaggagacgaggagaatttctgcgcgaccgtgcccaaggacggcagaagttacagccccacactctttgcccaaacggtgagagttctcaagaagattaacaaaccgggaaacatgatcatggcattctccaatctagccgaacggatcaaatccctcgcggacctgcagcaacaggaggaggagacttacgccgacgcctgtgatgaattcctggatcctattatgagcacactaatgtgcgatccagtcgtacttccaagttctcgagtcacagtcgacagatccacaatcgcacgccatctcctgagcgaccagactgatcctttcaaccgaagccctttgaccatggaccagatccgtccaaacactgagctcaaggaaaagatccagcgttggcttgctgagaggaagcagcagaaggagcagctcgaatag

SEQ ID NO: 149566 - DNA, 6061 bp, Artificial Sequence
  derived and/or modified sequence
cgtgtcgtcgctgctggcacttcaggctctgcctctcccactaggtctggatggaggataccttaaagtgaaatgacagaccaggagaataacaacaacatctcaagtaacccctttgctgctctttttggctccctggctgatgccaaacagtttgcggcaatccaaaaagagcagctgaagcaacaatctgatgaactcccagctagcccagatgactcggataatagcgtgtcagagagcctggatgaattcgattactctgtggctgagattagccgctcattccgatcacagcaggaaatatgtgagcaactcaacatcaatcacatgatccaaaggatcttccttattactctggacaacagtgatcccagcttgaaaagcgggaatggcatccctagccgttgtgtgtatttggaagaaatggcagtagagctagaagatcaagactggcttgatatgagcaatgttgagcaggccctcttcgctcgcttattacttcaagatccaggcaaccacttaattaacatgacttcttctacaacgctaaatctctctgctgatcgagatgcaggagagaggcacattttttgttacctttactcctgcttccagagagccaaggaagagattaccaaagttccagagaacctgctaccctttgcagtgcagtgcagaaacctcactgtgtccaatacccgaacagttcttctcaccccagagatctatgttgaccaaaacatccatgagcaactggtagatttgatgttagaagccatccagggagcccgtgagtacatgaacaagatctattttgaagatgtaactgagtttctggaagaggtcattgaagccttgatattggatgaggaagttagaacatttccagaagtcatgattccagtgtttgatattttattgggccgaataaaagatctagagctctgtcagatccttttgtatgcatatctggatattcttctctatttcactaggcaaaaagatatggcaaaggtttttgtagaatacattcagcccaaggaccctaccaatgggcaaatgtaccagaagaccttgctgggagtaattctgagtatctcctgcttattaaagactccgggtgttgtagaaaatcatggctactttttgaatccatctcgttccagcccccaggagatcaaagtacaggaggccaacatccatcagttcatggctcagttccacgaaaagatctaccagatgctgaagaacttactccagctctctccagaaaccaaacactgtatcttgtcctggcttggaaactgtttgcatgcaaatgcaggccgcaccaagatttgggccaatcagatgccagaaatctttttccaaatgtatgcctcagatgctttctttctgaatctgggtgctgctctcctgaagctatgccagccattttgcaaacccagatcctctcggctcctcacctttaatcccacatactgtgccctcaaggagttgaatgatgaagaacgaaaaattaaaaatgtacacatgagaggtttggacaaagaaacctgtttgatcccagctgtgcaggagccgaagtttccacagaactacaaccttgtaacagagaaccttgctctgacagagtacaccttgtacttgggatttcacaggttgcatgatcagatggtaaaaatcaaccaaaatctgcatcggctgcaggttgcctggcgggatgctcagcaaagttctagccctgctgctgacaatcttcgtgagcagtttgaacgactgatgaccatctatctttctaccaagactgccatgacagagccacaaatgctacaaaactgcctaaacttgcaggtgtccatggctgttctactggttcaactggccataggcaatgagggctcacagccaatagagctaacctttcctttgccagatggctacagctctttggcttatgtgccagaattttttgcagataacctgggtgattttctcatttttctccgccgctttgccgatgacattttggagacatcagcagattccctggagcatgtccttcactttatcaccattttcactggaagcatagaaagaatgaagaatccccacctgagggccaaactagcagaggtgttggaagcagtgatgccccacctggatcagaccccaaatcccttggtatccagtgtgttccaccggaaacgtgtgttctgcaactttcagtatgcaccccaacttgcagaggctctaatcaaggtttttgtggacatcgaatttacaggagacccccatcaatttgaacagaagtttaattaccgccgtcccatgtatcctatcctaagatacatgtgggggacagatacctatcgggagagcattaaggatttggctgactatgcctctaagaatttagaagccatgaatcccccacttttcctccgctttcttaacctgctaatgaatgatgccatcttccttttggatgaagccatacagtatttgagcaagataaagattcagcaaattgagaaggatcgaggtgaatgggatagtctgactccagaagcccgccgagaaaaggaggctggcctacagatgtttggacagctggcacgtttccataacatcatgtccaatgaaacaatcggtacccttgcctttctcacatcagagatcaagtcactctttgtgcatcccttcctggctgagcgcatcatctccatgttgaactacttcctgcaacacctggttggccccaagatgggtgccttaaaagtcaaggacttcagcgaatttgacttcaaaccccagcagcttgtatcagatatctgcactatctacttaaatcttggggatgaggagaatttctgtgccactgtgcccaaggatggacgttcctattccccaactctctttgcacagacagttcgagtcttgaagaaaataaataagcctgggaatatgattatggctttcagcaacttggcagagagaatcaagtctcttgcagacctccaacaacaggaagaggaaacctatgcagatgcctgtgatgagttcctggatcccattatgagcacactgatgtgtgaccctgtggtgctgccatcttccagagtcactgtggatagatccaccattgcaagacatttgctcagtgaccaaacagatccctttaaccgtagtcccctcaccatggaccagatccggccaaacacagaactaaaagaaaaaatccaacggtggcttgcagagaggaaacaacaaaaggagcaacttgaatagatactgtgaactaaccaaaccaaaaccaaccccagagtgcagataaacaattgtttgtggtttctctctttctggttctgttccttttctttcttcttttctttttcttttttttttttttttttactaaattagagaactgctcttgctgaaattatgatagttaagattcctaagaacttgacaatgctcccctggcttgcaggaaattatacttattatagcatcaccaagtttagaaatcatcactaattttcaccctctgttgtctcttcatattcttcttccttttcctaaatgaaattatattatttcaactactaaaacttcccgccaccctgctatttctcttccaattactgttcaaacatttttggtgagtgctgcttttataaatatgtgatgtcacatatttcagtgacagctgatgttatcagaaaaatcctgttatcctgtgtatttactagtcctcatgatctagacttaaccccttttctgtgttacagagtaacttcacataaaagcagatacctttaagtttgtgtagacttctgaataagatgatagacgagaattttttttaaaaaaggaatttaaaggaatcttgtgcaacttctgttgatagctcttaattttgttatacagtctttttaatgaggattggtagggcaatcctaccaattgatgggggtgaggagactgttgggcccttattctcttatgaaaatctgtttctacaaggactaggcctaagtagatttaggcaacgggtatcatatccatgaaaaatgtcattttaagacactaatatcaacagtatatctcagtgtgtgagatatataaatacacatacaccccatgtgcttttttgttggtttagtgtaaactgagtaccactttatattttctcttccatagtgagatgtatgcagtatgtggccatgtttactaacatactcattcttcacaaaattctgagattataaaatgtatatagttaatatttgtttgagcttgtgacctgacttctaagagctacttctaacacagccttaggtcttcaattaacaaagtaggaagttgagcacaaccttgtccacagccattttaaatatccacttagccctgtgtagttggtaggtggacaccactttcataagtgaacttgagctcactactcaattgtgcagcttaatatgctgactagggacattcccctatggattatctttatatcactgtctttctaagcccagagatgtcataagtgacaagaaaagtgataggatcaagaaatgggtgtcactgcttcatttggaacatgttattaactatggtctctttcaaataaatagtagttttatatttcaacacaagttgctataagcagtccttgatgggtttttgattgcatcagctggaaagcctcaaatctaagagggcttcccatcctagatataaaataggtgttgcctattgctgtgcttataaaatgaaaaaggaaattgaggacacttttgcaaatgccagaatgtaagattcattcagtgtgctccctgggcctttatggcatgggttgacaggatttgtttattttctaaaattagcttcattcaatatttatcatcctcctttccctctctgagaatgaactatgtataaaataagcttctgcctatttgcatttatcttccaaacccaatctagtaggatgttctcattttaaaaacgaggggaaaagaccagagtttttcaggagaaaactggaggaaaatgggcacaaaaactcagaaggcagctattcccagcagcttcctagttaacaacccccatgctgcctccagtctttgtctgtattcttctgtatttaaccttcagattgtaagccttttctggcaagcttttcttctttttttaaactcttttcctgaaactttttatgaatggctatggcaccattaatgctgctgaatatctttaaactctgcacaagcaagtgtgtagcttaaggccactactggtaaggaaaccaagtgtcctctgtgccttttttctttctgtgaagtaatttaagaatatccaaaaaaattagactttaaaaagttatcttggtacaacaccgtgtgtatatacacttggaagcttaaaaaggtgttttgtctggaacttagaagcagctctaaatctagtagagcagactttctaacatacctagttttgtgtattggctttgctggagtatgatagcaaaatgaagactcttttactcagctctggtattgctcataacttaccaagaggctaatactaaacttggaaaattgtttaagtatgttttatcaagcagtctgggttttgttttttaatatactttttaatggatatgtgaaaactgaaggaaatgttaaaggttttttaatggtgcaagtgaaggtgccagttgctatttgatatcacactctacaaaagcttcattactttatttgatggtggttgctaagcagccattgcacagagcataagtctactgggtgcctttacatgccagaggctgatgctgcactgttgatgtcatgtgaggaaataatgcacatgctctaactgctcaacaggaaatgaacctagaaacagaaaatgaaaaggttgattgaaataaaacttgatcaacgcgactgtattttgaaacattccaggaaggttacttcttgtcaaacttgcctggcagtgtttgttcaaaacttgtatttaataaatgaacatctgactt

SEQ ID NO: 149567 - DNA, 2149 bp, Artificial Sequence
  derived and/or modified sequence
gtataagtagaggaagaaaacagcaactcagtcatagaaagggacactaagaatagcaatttttaatgccttctcaagatacctgaattgatgcagagcatttttcaaaactactcagtcaacacattgccggaagaaggaaattatgtctttagagagaaatctccatcatagacattttaaataagacagtagataaaagttcagcatgtgcttaagctgctcagctgcctagattcaaacaaaaaatgaatatcatctagtttcccaatattagctagctcaagacattatctacagggccaaaggaaatgattttggactattatccataactttgaattatgtgtcttcctttcagtagagaatattaggctgaccttttctgaagaataatttaatttaatattgaacaacagagagctggaagctgctcttagattgcatctcaggttgcatgatcagatggtaaaaatcaaccaaaatctgcatcggctgcaggttgcctggcgggatgctcagcaaagttctagccctgctgctgacaatcttcgtgagcagtttgaacgactgatgaccatctatctttctaccaagactgccatgacagagccacaaatgctacaaaactgcctaaacttgcaggtgtccatggctgttctactggttcaactggccataggcaatgagggctcacagccaatagagctaacctttcctttgccagatggctacagctctttggcttatgtgccagaattttttgcagataacctgggtgattttctcatttttctccgccgctttgccgatgacattttggagacatcagcagattccctggagcatgtccttcactttatcaccattttcactggaagcatagaaagaatgaagaatccccacctgagggccaaactagcagaggtgttggaagcagtgatgccccacctggatcagaccccaaatcccttggtatccagtgtgttccaccggaaacgtgtgttctgcaactttcagtatgcaccccaacttgcagaggctctaatcaaggtttttgtggacatcgaatttacaggagacccccatcaatttgaacagaagtttaattaccgccgtcccatgtatcctatcctaagatacatgtgggggacagatacctatcgggagagcattaaggatttggctgactatgcctctaagaatttagaagccatgaatcccccacttttcctccgctttcttaacctgctaatgaatgatgccatcttccttttggatgaagccatacagtatttgagcaagataaagattcagcaaattgagaaggatcgaggtgaatgggatagtctgactccagaagcccgccgagaaaaggaggctggcctacagatgtttggacagctggcacgtttccataacatcatgtccaatgaaacaatcggtacccttgcctttctcacatcagagatcaagtcactctttgtgcatcccttcctggctgagcgcatcatctccatgttgaactacttcctgcaacacctggttggccccaagatgggtgccttaaaagtcaaggacttcagcgaatttgacttcaaaccccagcagcttgtatcagatatctgcactatctacttaaatcttggggatgaggagaatttctgtgccactgtgcccaaggatggacgttcctattccccaactctctttgcacagacagttcgagtcttgaagaaaataaataagcctgggaatatgattatggctttcagcaacttggcagagagaatcaagtctcttgcagacctccaacaacaggaagaggaaacctatgcagatgcctgtgatgagttcctggatcccattatgagcacactgatgtgtgaccctgtggtgctgccatcttccagagtcactgtggatagatccaccattgcaagacatttgctcagtgaccaaacagatccctttaaccgtagtcccctcaccatggaccagatccggccaaacacagaactaaaagaaaaaatccaacggtggcttgcagagaggaaacaacaaaaggagcaacttgaatagatactgtgaactaaccaaaccaaaaccaaccccagagtgcagataaacaattgtttgtggtttctct

SEQ ID NO: 149568 - protein, 406 aa, Artificial Sequence
  derived and/or modified sequence
MLFHSLSGPEVHGVIDEMDRRAKSEAPAISSAIDRGDTETTMPSISSDRAALCAGCGGKISDRYYLLAVDKQWHMRCLKCCECKLNLESELTCFSKDGSIYCKEDYYRRFSVQRCARCHLGISASEMVMRARDLVYHLNCFTCTTCNKMLTTGDHFGMKDSLVYCRLHFEALLQGEYPAHFNHADVAAAAAAAAAAKSAGLGAAGANPLGLPYYNGVGTVQKGRPRKRKSPGPGADLAAYNAALSCNENDAEHLDRDQPYPSSQKTKRMRTSFKHHQLRTMKSYFAINHNPDAKDLKQLAQKTGLTKRVLQVWFQNARAKFRRNLLRQENTGVDKSTDAALQTGTPSGPASELSNASLSPSSTPTTLTDLTSPTLPTVTSVLTSVPGNLEGHEPHSPSQTTLTNLF

SEQ ID NO: 149569 - DNA, 2416 bp, Artificial Sequence
  derived and/or modified sequence
gactgcagagccggggctgggctaggcgcgcgcttggagagcattgcgcgcggctgggcccgcggccggcggctcctcctcccactctgctcctcctcttttttctcctcctccacctcctcctccgcctcctcctcctcctcttcctcctcctcttcaattctcccggtggctcgactcggctcgcaggcttcggagaaacccctactccagtcgccgactcagcgcccaagagggtcgccttgggctgggggcgcaccccagggaggggaggggtccaggcagctgggccgccgcggacacctagcggcttcagggtgaaccccgaccgcagccgtcgccgcctcgggcagagtttgcgcccttgctttgcgccccgggcgctgaagccgggcgggcgatgcccgcggcgtgaaagcgcccgcggcgggcgccgacctctgtcctagtctcctgctccccccgccccgcttgtcccgtgcccttgtgaccctggctttggcgccgtcgcccaggcgccccgcaatgtagctgcccctgcgcctcggcgggaggcgtcctgccccgcgagcgcccggggcccggagcccggcctgggggctcagccgagctcgggcggggccggggccgcggtggcgatgcaccgggcccgttagcgccaggagcgccaggcagctgaggcggggggcaagccctccctcggaggagccgcgcccccggccccgccggtcccgccgcgatgctgttccacagtctgtcgggccccgaggtgcacggggtcatcgacgagatggaccgcagggccaagagcgaggctcccgccatcagctccgccatcgaccgcggcgacaccgagacgaccatgccgtccatcagcagtgaccgcgccgcgctgtgcgccggctgcgggggcaagatctcggaccgctactacctgctggcggtggacaagcagtggcacatgcgctgcctcaagtgctgcgagtgcaagctcaacctggagtcggagctcacctgtttcagcaaggacggtagcatctactgcaaggaagactactacaggcgcttctctgtgcagcgctgcgcccgctgccacctgggcatctcggcctcggagatggtgatgcgcgctcgggacttggtttatcacctcaactgcttcacgtgcaccacgtgtaacaagatgctgaccacgggcgaccacttcggcatgaaggacagcctggtctactgccgcttgcacttcgaggcgctgctgcagggcgagtaccccgcacacttcaaccatgccgacgtggcagcggcggccgctgcagccgcggcggccaagagcgcggggctgggcgcagcaggggccaaccctctgggtcttccctactacaatggcgtgggcactgtgcagaaggggcggccgaggaaacgtaagagcccgggccccggtgcggatctggcggcctacaacgctgcgctaagctgcaacgaaaacgacgcagagcacctggaccgtgaccagccatacccgagcagccagaagaccaagcgcatgcgcacgtccttcaagcaccaccagcttcggaccatgaagtcttactttgccattaaccacaaccccgacgccaaggacttgaagcagctcgcgcaaaagacgggcctcaccaagcgggtcctccaggtctggttccagaacgcccgagccaagttcaggcgcaacctcttacggcaggaaaacacgggcgtggacaagtcgacagacgcggcgctgcagacagggacgccatcgggcccggcctcggagctctccaacgcctcgctcagcccctccagcacgcccaccaccctgacagacttgactagccccaccctgccaactgtgacgtccgtcttaacttctgtgcctggcaacctggagggccatgagcctcacagcccctcacaaacgactcttaccaaccttttctaatgactcgcaacccctcaccccacaatttctttaaaaaagaaattatctttagttgaattccaagtgtattttaaaatagaggctttgagcaactaactaaccacattttaggatctcgcctggaaacagaggtaaaaaaaagaagtgtgcgcccggctaatgcagcggtgtggaccgaggaacaacttggaagatctacctgcaacacaacatttgtgtcactgtacagttttgtggactgagcgaggaaaaacaacaaataatttaagttggctagagcttctgtattttcaaagactgccacgtgccttaggaatactgttttatctccatactttggatgacttgttcatttttctctccctctttttctctgtatatttatgaccagagcaaaaatgtaaaaaacaaaaaaaacaacaaaaaaagtttgttactttgaatagtcctaaaaag

SEQ ID NO: 149570 - DNA, 1221 bp, Artificial Sequence
  derived and/or modified sequence
atgcttttccattctctgagcggccctgaggtccatggagtgatagatgaaatggataggcgtgccaaaagcgaagcaccagcaatcagcagcgctatcgatcgtggggacactgaaacgaccatgcccagcatttcttcagatagagcagcactttgtgctggctgcggaggtaaaattagtgataggtactacctcctggctgtggacaagcaatggcacatgcggtgtctgaagtgttgcgagtgcaaactgaatctggagagtgagttgacctgcttttccaaggacgggtccatttattgtaaagaggattattaccggaggttttctgtacaaagatgtgctcgatgccatctcgggatatcagcaagtgagatggttatgagggcccgcgatctggtgtaccacctcaattgtttcacatgtacgacatgcaataaaatgctgaccacaggagaccacttcggcatgaaggactctctggtttattgcaggttacacttcgaagctctcctccaaggagaataccctgcccactttaaccacgccgatgtcgctgccgccgcagccgccgccgcggcagcaaaaagtgccggactgggcgcagcaggggccaatccattggggctgccatattacaatggagtgggcacggttcagaaaggccggcccagaaaaaggaaatctccaggcccgggagccgaccttgctgcttacaacgctgccctcagttgtaacgaaaatgacgccgagcatctggaccgcgatcagccctatccatcatcgcagaaaacaaagcggatgagaacgagcttcaaacaccaccagctgaggacaatgaaatcctacttcgccataaatcataacccagacgccaaggatctaaaacagctcgcccagaagaccggcctaaccaagcgcgtgctgcaagtttggtttcagaacgcccgggcgaaattcagacgcaatctgctgcgtcaggaaaacacgggggtggataagagcactgacgcggccctccagaccggaactccatccgggcctgcatcagaactttcaaacgctagcctctcgccatcgtccactcctaccaccttgaccgacctgacctctcctacactcccgacagtgacctctgtactgacgagcgtgcctggaaacttggaagggcacgagccacacagccctagccagacaacactgacgaacctgttctag

SEQ ID NO: 149571 - DNA, 1221 bp, Artificial Sequence
  derived and/or modified sequence
atgctgttccacagcctgagcggccctgaggtgcacggcgtgattgatgagatggaccggcgggccaagtctgaggccccagccatcagcagcgccatcgacagaggagacacagagaccaccatgcccagcatcagcagtgaccgggccgccctgtgtgccggctgcggcggcaagatcagtgaccgctactacctgctggccgtggacaagcagtggcacatgcgctgcctgaagtgctgtgagtgcaagctgaacctggagagcgagctgacctgcttcagcaaggatggcagcatctactgcaaggaggactactaccgccgcttctctgtgcagagatgtgcccgctgccacctgggcatcagcgccagcgagatggtgatgagggcccgggacctggtgtaccacctgaactgcttcacctgcaccacctgcaacaagatgctgaccaccggggaccacttcggcatgaaggacagcctggtgtactgccgcctgcactttgaggccctgctgcagggcgagtacccagcccacttcaaccacgcagatgtggccgctgctgctgctgctgctgctgctgccaagtctgctggcctgggcgccgccggggccaaccccctgggcctgccctactacaatggagtgggcaccgtgcagaagggccggcccaggaagaggaagagccctggccctggagctgacctggccgcctacaatgctgccctgagctgcaatgaaaatgatgctgagcacctggaccgggaccagccctaccccagcagccagaagaccaagaggatgaggaccagcttcaagcaccaccagctgcggaccatgaagagctactttgccatcaaccacaacccagatgccaaggacctgaagcagctggcccagaagacaggcctgaccaagagggtgctgcaggtgtggttccagaatgcccgggccaagttcagaagaaacctgctgcggcaggagaacacaggagtggacaagagcacagatgctgccctgcagacaggcaccccatctggccctgccagcgagctgagcaatgccagcctgagccccagcagcacccccaccaccctgacagacctgaccagccccaccctgcccaccgtgacctctgtgctgacctctgtgcccggcaacctggagggccacgagccccacagccccagccagaccaccctgaccaacctcttctag

SEQ ID NO: 149572 - DNA, 2554 bp, Artificial Sequence
  derived and/or modified sequence
gactgcagagccggggctgggctaggcgcgcgcttggagagcattgcgcgcggctgggcccgcggccggcggctcctcctcccactctgctcctcctcttttttctcctcctccacctcctcctccgcctcctcctcctcctcttcctcctcctcttcaattctcccggtggctcgactcggctcgcaggcttcggagaaacccctactccagtcgccgactcagcgcccaagagggtcgccttgggctgggggcgcaccccagggaggggaggggtccaggcagctgggccgccgcggacacctagcggcttcagggtgaaccccgaccgcagccgtcgccgcctcgggcagagtttgcgcccttgctttgcgccccgggcgctgaagccgggcgggcgatgcccgcggcgtgaaagcgcccgcggcgggcgccgacctctgtcctagtctcctgctccccccgccccgcttgtcccgtgcccttgtgaccctggctttggcgccgtcgcccaggcgccccgcaatgtagctgcccctgcgcctcggcgggaggcgtcctgccccgcgagcgcccggggcccggagcccggcctgggggctcagccgagctcgggcggggccggggccgcggtggcgatgcaccgggcccgttagcgccaggagcgccaggcagctgaggcggggggcaagccctccctcggaggagccgcgcccccggccccgccggtcccgccgcgatgctgttccacagtctgtcgggccccgaggtgcacggggtcatcgacgagatggaccgcagggccaagagcgaggctcccgccatcagctccgccatcgaccgcggcgacaccgagacgaccatgccgtccatcagcagtgaccgcgccgcgctgtgcgccggctgcgggggcaagatctcggaccgctactacctgctggcggtggacaagcagtggcacatgcgctgcctcaagtgctgcgagtgcaagctcaacctggagtcggagctcacctgtttcagcaaggacggtagcatctactgcaaggaagactactacaggcgcttctctgtgcagcgctgcgcccgctgccacctgggcatctcggcctcggagatggtgatgcgcgctcgggacttggtttatcacctcaactgcttcacgtgcaccacgtgtaacaagatgctgaccacgggcgaccacttcggcatgaaggacagcctggtctactgccgcttgcacttcgaggcgctgctgcagggcgagtaccccgcacacttcaaccatgccgacgtggcagcggcggccgctgcagccgcggcggccaagagcgcggggctgggcgcagcaggggccaaccctctgggtcttccctactacaatggcgtgggcactgtgcagaaggggcggccgaggaaacgtaagagcccgggccccggtgcggatctggcggcctacaacgctgcgctaagctgcaacgaaaacgacgcagagcacctggaccgtgaccagccatacccgagcagccagaagaccaagcgcatgcgcacgtccttcaagcaccaccagcttcggaccatgaagtcttactttgccattaaccacaaccccgacgccaaggacttgaagcagctcgcgcaaaagacgggcctcaccaagcgggtcctccaggtctggttccagaacgcccgagccaagttcaggcgcaacctcttacggcaggaaaacacgggcgtggacaagtcgacagacgcggcgctgcagacagggacgccatcgggcccggcctcggagctctccaacgcctcgctcagcccctccagcacgcccaccaccctgacagacttgactagccccaccctgccaactgtgacgtccgtcttaacttctgtgcctggcaacctggagggccatgagcctcacagcccctcacaaacgactcttaccaaccttttctaatgactcgcaacccctcaccccacaatttctttaaaaaagaaattatctttagttgaattccaagtgtattttaaaatagaggctttgagcaactaactaaccacattttaggatctcgcctggaaacagaggtaaaaaaaagaagtgtgcgcccggctaatgcagcggtgtggaccgaggaacaacttggaagatctacctgcaacacaacatttgtgtcactgtacagttttgtggactgagcgaggaaaaacaacaaataatttaagttggctagagcttctgtattttcaaagactgccacgtgccttaggaatactgttttatctccatactttggatgacttgttcatttttctctccctctttttctctgtatatttatgaccagagcaaaaatgtaaaaaacaaaaaaaacaacaaaaaaagtttgttactttgaatagtcctaaaaagaaaaaaagaaaaaaaaaaaaggaaaaatcaaaccccctccaacggtcgctttgttgttttagaattttaaggtggaagtctgttcgaatatcagaatttgtaaaatctaaccagtaataaaaccacttattgaaacta

SEQ ID NO: 149573 - DNA, 1221 bp, Artificial Sequence
  derived and/or modified sequence
atgctgttccacagcctgagcggccccgaggtgcacggcgtgatcgacgagatggatcggagggccaagtcagaggcacccgctatttcttcggccatagatcggggagataccgaaacaactatgccgtctattagctctgatcgcgctgctctttgcgcagggtgtggcggtaagatttcagacagatattatcttctggcggttgacaaacagtggcacatgaggtgcttgaagtgttgcgagtgcaagctcaatctcgagtccgaactaacctgcttttccaaggacggaagcatctactgcaaagaggactactaccggcggttctccgtgcagcggtgtgcccgctgtcatctgggtatctcagcctctgaaatggtgatgagggcgcgcgacctcgtctatcatctcaattgctttacctgtaccacctgtaataaaatgctgaccaccggcgaccatttcggtatgaaagacagccttgtgtactgccggctgcacttcgaagctctcttgcaaggagagtaccctgcgcattttaaccacgctgacgtcgccgcggcagccgctgctgccgctgccgcaaagtcggcgggtctgggggcagcgggagccaaccccctggggcttccctactacaatggcgtaggaacagtgcagaaaggacgccctcgaaagcgaaaatccccggggcctggggctgacctggcagcgtacaacgccgccctgagctgcaatgagaatgacgcagaacatctggaccgggatcagccatacccgagttcgcagaagactaaaaggatgagaacatcattcaagcatcatcagctcagaaccatgaagtcatatttcgcaatcaatcacaacccggacgccaaggacttgaaacagttggcacaaaaaacggggctgactaagcgcgtgttgcaggtctggttccagaatgccagggccaaatttagacggaacctactcagacaggagaataccggggtggacaaatctaccgatgccgctttacagaccggtaccccctcaggtcctgcttccgaactgagcaatgccagtctttccccaagcagcacaccgaccacactcactgacttgactagccctaccctcccaactgtaacatcagtgctcacaagcgtgcccggcaacctcgagggccatgagcctcactctccgtcacagaccacattaactaatctgttttag

SEQ ID NO: 149574 - DNA, 1221 bp, Artificial Sequence
  derived and/or modified sequence
atgcttttccattccctctctgggcctgaggtacacggcgtgatcgatgagatggatcggcgtgcaaagtctgaggctcccgctatatcttctgcaatcgacaggggcgataccgaaacaaccatgccgtcaatatcatctgatcgcgcagctttatgcgctgggtgtgggggtaagatctccgatcggtactacctgctcgctgtagacaagcagtggcacatgaggtgcctgaaatgctgcgagtgcaaactgaacttggagtcggagctgacttgtttctcaaaagatggctctatatactgcaaggaggattactatcggaggttctcggtgcagcggtgtgctagatgccacctcggaatctcagcctccgagatggttatgagagccagagacctagtttaccatcttaattgttttacctgcactacatgcaacaaaatgctcacaacaggcgaccatttcggcatgaaagatagccttgtgtattgtaggctgcactttgaggcgttgctgcaaggcgagtatccagctcactttaatcacgcagatgtcgctgccgctgcagctgccgcagcggcagctaagagtgccggactgggggcagctggggctaacccactgggtttgccgtattataacggagtgggaacggtccaaaaaggtcgcccacggaagcgcaagagccctggccctggagcagatctcgccgcttacaacgcagctctgagctgcaatgagaatgacgcagagcacttggaccgggaccagccctacccatcttctcaaaagacaaagcggatgcgcacgagtttcaaacatcaccagcttcgcacaatgaagtcatattttgctataaaccacaaccccgatgcaaaagatctcaagcagctcgcacagaaaaccgggctcactaaaagagtcctgcaggtctggtttcagaatgcaagggccaaatttcggcgtaacctgctacgtcaagaaaataccggggtggataaatcaacagacgccgctcttcagacagggacgccgagtggccctgcctccgagctcagcaatgctagcctgagcccttccagcacaccaaccacacttaccgatctgacatccccaactctgcccaccgttacctccgtgcttacctcagtaccagggaacctggagggacacgagcctcacagtccaagccagaccactctgaccaatctgttttag

SEQ ID NO: 149575 - DNA, 1221 bp, Artificial Sequence
  derived and/or modified sequence
atgctgttccacagcctgagcggccccgaggtgcacggcgtgatcgacgagatggacagaagagccaagagcgaggcccccgccatcagcagcgccatcgacagaggcgacaccgagaccaccatgcccagcatcagcagcgacagagccgccctgtgcgccggctgcggcggcaagatcagcgacagatactacctgctggccgtggacaagcagtggcacatgagatgcctgaagtgctgcgagtgcaagctgaacctggagagcgagctgacctgcttcagcaaggacggcagcatctactgcaaggaggactactacagaagattcagcgtgcagagatgcgccagatgccacctgggcatcagcgccagcgagatggtgatgagagccagagacctggtgtaccacctgaactgcttcacctgcaccacctgcaacaagatgctgaccaccggcgaccacttcggcatgaaggacagcctggtgtactgcagactgcacttcgaggccctgctgcagggcgagtaccccgcccacttcaaccacgccgacgtggccgccgccgccgccgccgccgccgccgccaagagcgccggcctgggcgccgccggcgccaaccccctgggcctgccctactacaacggcgtgggcaccgtgcagaagggcagacccagaaagagaaagagccccggccccggcgccgacctggccgcctacaacgccgccctgagctgcaacgagaacgacgccgagcacctggacagagaccagccctaccccagcagccagaagaccaagagaatgagaaccagcttcaagcaccaccagctgagaaccatgaagagctacttcgccatcaaccacaaccccgacgccaaggacctgaagcagctggcccagaagaccggcctgaccaagagagtgctgcaggtgtggttccagaacgccagagccaagttcagaagaaacctgctgagacaggagaacaccggcgtggacaagagcaccgacgccgccctgcagaccggcacccccagcggccccgccagcgagctgagcaacgccagcctgagccccagcagcacccccaccaccctgaccgacctgaccagccccaccctgcccaccgtgaccagcgtgctgaccagcgtgcccggcaacctggagggccacgagccccacagccccagccagaccaccctgaccaacctgttctag

SEQ ID NO: 149576 - protein, 563 aa, Artificial Sequence
  derived and/or modified sequence
MAFNDLLQQVGGVGRFQQIQVTLVVLPLLLMASHNTLQNFTAAIPTHHCRPPADANLSKNGGLEVWLPRDRQGQPESCLRFTSPQWGLPFLNGTEANGTGATEPCTDGWIYDNSTFPSTIVTEWDLVCSHRALRQLAQSLYMVGVLLGAMVFGYLADRLGRRKVLILNYLQTAVSGTCAAFAPNFPIYCAFRLLSGMALAGISLNCMTLNVEWMPIHTRACVGTLIGYVYSLGQFLLAGVAYAVPHWRHLQLLVSAPFFAFFIYSWFFIESARWHSSSGRLDLTLRALQRVARINGKREEGAKLSMEVLRASLQKELTMGKGQASAMELLRCPTLRHLFLCLSMLWFATSFAYYGLVMDLQGFGVSIYLIQVIFGAVDLPAKLVGFLVINSLGRRPAQMAALLLAGICILLNGVIPQDQSIVRTSLAVLGKGCLAASFNCIFLYTGELYPTMIRQTGMGMGSTMARVGSIVSPLVSMTAELYPSMPLFIYGAVPVAASAVTVLLPETLGQPLPDTVQDLESRWAPTQKEAGIYPRKGKQTRQQQEHQKYMVPLQASAQEKNGL

SEQ ID NO: 149577 - DNA, 1692 bp, Artificial Sequence
  derived and/or modified sequence
atggctttcaacgatctgttacaacaagttggcggagtgggtagatttcaacagattcaagttactttggtggttctccccctgctcctcatggcaagccataacaccctgcagaatttcaccgccgccattccgacacaccattgcaggcctcccgcggatgctaacctgagcaaaaatggcggcctggaggtctggcttcctcgagataggcaggggcagccagagagttgcctgcggtttacatctccacagtgggggctgcccttcctcaacggcacagaggcaaacggcactggagccactgaaccctgtacggatggctggatttatgataacagtacctttcccagcacaatcgtgaccgaatgggatctagtgtgcagccaccgcgctttgcgccagctggcacagtctctttatatggtaggcgttctactcggggccatggtgtttgggtaccttgctgaccgattgggccgtcgcaaggtattaatcctcaattatctgcagactgcagtgtcaggcacatgcgccgcattcgccccaaatttcccaatatattgtgctttcagacttttaagtgggatggctctcgcagggatcagcctcaactgcatgacactgaatgtggaatggatgcctatccacacaagggcctgtgtgggtactctgatcggttatgtttactccttgggtcagtttcttctggctggcgtcgcatatgctgtcccacactggcggcacctgcagctgctggtgtcagcaccctttttcgcattttttatctactcttggttttttattgaaagtgcccgatggcactcaagctcaggacgtttagatcttaccttacgggcactccagcgggttgcccggatcaacggcaagagagaggaaggagccaaactgtcaatggaagtgctgagagcctctctccaaaaggaactgacgatggggaaaggacaggcatctgccatggaacttctcagatgtccgactctgcggcatttatttctttgcctgagcatgctgtggttcgcgacctctttcgcgtactatggactggtgatggacttgcagggatttggcgtgtctatttacttgattcaggtcatcttcggggccgttgacctgccagctaaactggtgggcttccttgtgatcaactccctgggcaggcggcccgctcaaatggctgccctcctgcttgcagggatttgtatcctcctgaacggggtgattccacaggatcagtcaatcgtgcggaccagccttgcagttctgggtaaaggttgcctggcagccagttttaattgtatttttctgtatacgggcgagctgtaccctacaatgatacgacaaaccggcatggggatgggctcaacaatggcacgcgttggcagtatagtgtcccctctcgtgtcgatgaccgccgaattatatccttctatgcccctatttatctatggcgcagtgccagtcgcagccagcgcagtgacggtgctgctgcccgaaacacttggccagccactgccagataccgtacaggacctcgagagcaggtgggcgcccacccagaaagaggctggcatttatcctcggaagggaaagcaaacacgacagcagcaggagcaccagaagtatatggttcctctgcaggcttccgctcaagaaaagaatggcctgtag

SEQ ID NO: 149578 - DNA, 1692 bp, Artificial Sequence
  derived and/or modified sequence
atggccttcaatgacctgctgcagcaggtgggcggcgtgggccgcttccagcagatccaggtgaccctggtggtgctgcccctgctgctgatggccagccacaacaccctgcagaacttcaccgctgccatccccacccaccactgccggcccccagcagatgccaacctgagcaagaatggaggcctggaggtgtggctgccccgggaccggcagggccagcctgagagctgcctgcgcttcaccagcccccagtggggcctgcccttcctgaatggaacagaggccaatggaactggagccacagagccctgcacagatggctggatctatgacaacagcaccttccccagcaccatcgtgacagagtgggacctggtgtgcagccaccgggccctgcggcagctggcccagagcctgtacatggtgggcgtgctgctgggcgccatggtgtttggctacctggccgaccggctgggccgcaggaaggtgctgatcctgaactacctgcagacagctgtgtctggcacctgtgccgcctttgcccccaacttccccatctactgtgccttccggctgctgagcggcatggccctggccggcatcagcctgaactgcatgaccctgaatgtggagtggatgcccatccacacccgggcctgtgtgggcaccctcatcggctacgtgtacagcctgggccagttcctgctggccggcgtggcctatgctgtgccccactggaggcacctgcagctgctggtgtctgcccccttctttgccttcttcatctacagctggttcttcattgaaagtgcccgctggcacagcagcagcggccgcctggacctgaccctgcgggccctgcagagggtggcccgcatcaatggcaagcgggaggagggcgccaagctgtccatggaggtgctgcgggccagcctgcagaaggagctgaccatgggcaagggccaggccagcgccatggagctgctgcgctgccccaccctgcggcacctgttcctgtgcctgtccatgctgtggtttgccaccagctttgcctactacggcctggtgatggacctgcagggctttggagtgtccatctacctgatccaggtgatctttggagctgtggacctgcctgccaagctggtgggcttcctggtgatcaacagcctgggccggcggcctgcccagatggccgccctgctgctggccggcatctgcatcctgctgaatggagtcatcccccaggaccagagcatcgtgaggaccagcctggccgtgctgggcaagggctgcctggccgccagcttcaactgcatcttcctgtacacaggagagctgtaccccaccatgatccggcagacaggcatgggcatgggcagcaccatggcccgggtgggcagcatcgtgagccccctggtgtccatgacagctgagctgtaccccagcatgcccctcttcatctacggggctgtgcctgtggccgccagcgctgtgacagtgctgctgcctgagaccctgggccagcccctgcctgacacagtgcaggacctggagagccgctgggcccccacccagaaggaggccggcatctaccccaggaagggcaagcagacccggcagcagcaggagcaccagaagtacatggtgcccctgcaggccagcgcccaggagaagaatggcctgtag

SEQ ID NO: 149579 - DNA, 1692 bp, Artificial Sequence
  derived and/or modified sequence
atggccttcaacgacctgctgcagcaggtgggcggcgtgggccggtttcagcagattcaggtaaccctagtggtactccccctgttgctaatggcgagtcacaacaccctccaaaactttacagcagcaatccctactcatcactgccgcccgcctgccgatgccaacctctccaagaacgggggccttgaggtgtggcttccccgcgacaggcagggacagccagagtcatgcctgagatttactagccctcagtggggcttaccctttctgaatgggacagaggcaaatggcactggcgccactgagccttgcaccgacgggtggatatacgataacagcacattcccatctacaattgtgaccgaatgggacctggtatgttcgcacagggccctgcgccagttagcacaatcattatacatggtcggagtgctcctgggggcgatggtcttcggctacctcgccgatcggctcggacggcggaaggtgcttattctaaactacctgcagactgcggtctctggcacttgcgccgcattcgctccaaactttcctatctactgcgctttccggcttctgagtggcatggctctcgcagggattagcttgaattgcatgacactcaacgtagaatggatgcccatccatacaagggcttgcgtcggcactttaatcggctatgtgtactcacttggacaattcctcctggcgggcgtggcctatgcggtgcctcactggaggcacctacaactgctcgtttctgcaccattcttcgcctttttcatctattcctggttctttatcgaatcagcacggtggcacagttccagtggtcgcttggacttaacattacgagcgcttcagcgggtggcaaggataaatggaaaacgagaagagggggccaaacttagcatggaagtacttcgtgcatctctgcagaaggagctcaccatgggcaaaggccaggcctccgctatggagcttcttagatgtcccacgttgaggcacctgtttctgtgtctgtctatgctttggtttgccacctctttcgcctactatggcctcgtgatggatctccaggggttcggagtttccatctatttaatccaggtgatcttcggggcggttgatctccctgcaaagttggtgggctttcttgtgatcaacagcctggggcgtagacctgcacagatggcagccctgctccttgcagggatctgcattctgttgaacggagttatcccacaggaccaatctatcgtaagaacctcccttgccgtgctgggaaaagggtgcctcgctgccagctttaattgtatattcctatacacaggagagctgtaccctaccatgatacgccagacagggatgggcatggggagcactatggcacgcgtggggagcattgtttcccccctggtgtccatgactgcagagctgtatcccagtatgcccttatttatttacggcgccgtacccgttgcagcctccgccgtgaccgtgctcctgcccgagactctcggccagccactgccagacaccgtacaggacctggagtcccgctgggcacccacccagaaggaagcgggcatttacccaaggaagggaaaacagaccaggcagcagcaggaacaccaaaagtacatggttcccctgcaggccagtgcccaagagaagaatggcctatag

SEQ ID NO: 149580 - DNA, 1692 bp, Artificial Sequence
  derived and/or modified sequence
atggcgtttaacgacctactgcagcaggtggggggagtgggcagatttcagcaaatccaggtgacactagtggtgctgcctctcctgcttatggcttcccataatacactccagaatttcaccgccgcaattcccactcaccactgtagacccccagcggacgcgaatctcagcaagaacggaggactggaagtgtggttgccacgcgacagacaggggcagcctgagagttgcttgcgcttcacctcacctcagtggggcttgcccttcctgaacggtactgaggctaacgggaccggggcaacagaaccctgtactgacggatggatttatgataattctacattccccagtaccatcgtcacggagtgggatctggtgtgtagccatcgagccttgcgacagttagctcagagtctttatatggtaggcgtcctactcggggctatggtcttcggttacctggccgatcggctgggcaggcgcaaggtgctcattctgaattacctccagacagctgtgagcgggacctgcgccgcatttgcaccaaatttcccaatctactgtgcctttcggttgctgagcggaatggctctagcgggaatctccctaaattgtatgactttgaatgtggagtggatgcctatacatactcgcgcatgtgtaggaaccctcatcgggtacgtgtactccctggggcaatttttgttagcgggagtggcttatgcagtacctcactggcggcacctgcaactgctggtatcggctcccttctttgcatttttcatatattcctggtttttcattgagtccgcccgatggcatagcagctcaggaaggctagacctcactctgcgcgcactgcagagggtcgcgagaataaacgggaagagagaggagggcgctaaactgtctatggaagtcctgcgcgcatcacttcagaaagagctgaccatgggcaagggccaagcgagcgctatggaactgttgaggtgcccaacactgaggcacctgttcctttgtctgagtatgctatggttcgccacaagttttgcctattacgggctggtgatggatcttcagggctttggcgtgtcgatctatctcatccaggtgattttcggagcagtcgacctgcccgctaagctggtggggttcctggttatcaactccctgggaaggcgcccagcccagatggctgcattgttactggccggtatttgtatcctgttgaatggcgtgataccccaggatcaaagcatcgtaaggacgtctctggctgtgctcgggaagggatgcctggccgcatcttttaattgcatctttctctatacaggggagttgtatcctaccatgatcaggcaaacaggaatggggatgggatccactatggccagagtgggctccatagtctcacctttggtctcgatgactgctgagttgtatccaagtatgcccctttttatttacggtgccgtcccagtggcagcgagcgcagtgactgtccttttaccggaaaccctaggccagcctcttcccgacactgtgcaggacttggagagcaggtgggcgcctacccagaaagaggccggtatatacccaagaaaaggcaagcagactaggcagcagcaagagcaccaaaaatacatggtgcccctgcaggcgagtgctcaggagaagaacgggctgtag

SEQ ID NO: 149581 - DNA, 2151 bp, Artificial Sequence
  derived and/or modified sequence
gaaagctgagctgccctgacccccaaagtgaggagaagctgcaagggaaaagggagggacagatcagggagaccggggaagaaggaggagcagccaaggaggctgctgtccccccacagagcagctcggactcagctcccggagcaacccagctgcggaggcaacggcagtgctgctcctccagcgaaggacagcaggcaggcagacagacagaggtcctgggactggaaggcctcagcccccagccactgggctgggcctggcccaatggcctttaatgacctcctgcagcaggtggggggtgtcggccgcttccagcagatccaggtcaccctggtggtcctccccctgctcctgatggcttctcacaacaccctgcagaacttcactgctgccatccctacccaccactgccgcccgcctgccgatgccaacctcagcaagaacggggggctggaggtctggctgccccgggacaggcaggggcagcctgagtcctgcctccgcttcacctccccgcagtggggactgccctttctcaatggcacagaagccaatggcacaggggccacagagccctgcaccgatggctggatctatgacaacagcaccttcccatctaccatcgtgactgagtgggaccttgtgtgctctcacagggccctacgccagctggcccagtccttgtacatggtgggggtgctgctcggagccatggtgttcggctaccttgcagacaggctaggccgccggaaggtactcatcttgaactacctgcagacagctgtgtcagggacctgcgcagccttcgcacccaacttccccatctactgcgccttccggctcctctcgggcatggctctggctggcatctccctcaactgcatgacactgaatgtggagtggatgcccattcacacacgggcctgcgtgggcaccttgattggctatgtctacagcctgggccagttcctcctggctggtgtggcctacgctgtgccccactggcgccacctgcagctactggtctctgcgcctttttttgccttcttcatctactcctggttcttcattgagtcggcccgctggcactcctcctccgggaggctggacctcaccctgagggccctgcagagagtcgcccggatcaatgggaagcgggaagaaggagccaaattgagtatggaggtactccgggccagtctgcagaaggagctgaccatgggcaaaggccaggcatcggccatggagctgctgcgctgccccaccctccgccacctcttcctctgcctctccatgctgtggtttgccactagctttgcatactatgggctggtcatggacctgcagggctttggagtcagcatctacctaatccaggtgatctttggtgctgtggacctgcctgccaagcttgtgggcttccttgtcatcaactccctgggtcgccggcctgcccagatggctgcactgctgctggcaggcatctgcatcctgctcaatggggtgataccccaggaccagtccattgtccgaacctctcttgctgtgctggggaagggttgtctggctgcctccttcaactgcatcttcctgtatactggggaactgtatcccacaatgatccggcagacaggcatgggaatgggcagcaccatggcccgagtgggcagcatcgtgagcccactggtgagcatgactgccgagctctacccctccatgcctctcttcatctacggtgctgttcctgtggccgccagcgctgtcactgtcctcctgccagagaccctgggccagccactgccagacacggtgcaggacctggagagcaggtgggcccccactcagaaagaagcagggatatatcccaggaaagggaaacagacgcgacagcaacaagagcaccagaagtatatggtcccactgcaggcctcagcacaagagaagaatggactctgaggactgagaaggggccttacagaaccctaaagggagggaaggtcctacaggtctccggccacccacacaaggaggaggaagaggaaatggtgacccaagtgtgggggttgtggttcaggaaagcatcttcccaggggtccacctccctttataaaccccaccagaaccacatcattaaaaggtttgactgcg

SEQ ID NO: 149582 - DNA, 1692 bp, Artificial Sequence
  derived and/or modified sequence
atggccttcaacgacctgctgcagcaggtgggcggcgtgggcagattccagcagatccaggtgaccctggtggtgctgcccctgctgctgatggccagccacaacaccctgcagaacttcaccgccgccatccccacccaccactgcagaccccccgccgacgccaacctgagcaagaacggcggcctggaggtgtggctgcccagagacagacagggccagcccgagagctgcctgagattcaccagcccccagtggggcctgcccttcctgaacggcaccgaggccaacggcaccggcgccaccgagccctgcaccgacggctggatctacgacaacagcaccttccccagcaccatcgtgaccgagtgggacctggtgtgcagccacagagccctgagacagctggcccagagcctgtacatggtgggcgtgctgctgggcgccatggtgttcggctacctggccgacagactgggcagaagaaaggtgctgatcctgaactacctgcagaccgccgtgagcggcacctgcgccgccttcgcccccaacttccccatctactgcgccttcagactgctgagcggcatggccctggccggcatcagcctgaactgcatgaccctgaacgtggagtggatgcccatccacaccagagcctgcgtgggcaccctgatcggctacgtgtacagcctgggccagttcctgctggccggcgtggcctacgccgtgccccactggagacacctgcagctgctggtgagcgcccccttcttcgccttcttcatctacagctggttcttcatcgagagcgccagatggcacagcagcagcggcagactggacctgaccctgagagccctgcagagagtggccagaatcaacggcaagagagaggagggcgccaagctgagcatggaggtgctgagagccagcctgcagaaggagctgaccatgggcaagggccaggccagcgccatggagctgctgagatgccccaccctgagacacctgttcctgtgcctgagcatgctgtggttcgccaccagcttcgcctactacggcctggtgatggacctgcagggcttcggcgtgagcatctacctgatccaggtgatcttcggcgccgtggacctgcccgccaagctggtgggcttcctggtgatcaacagcctgggcagaagacccgcccagatggccgccctgctgctggccggcatctgcatcctgctgaacggcgtgatcccccaggaccagagcatcgtgagaaccagcctggccgtgctgggcaagggctgcctggccgccagcttcaactgcatcttcctgtacaccggcgagctgtaccccaccatgatcagacagaccggcatgggcatgggcagcaccatggccagagtgggcagcatcgtgagccccctggtgagcatgaccgccgagctgtaccccagcatgcccctgttcatctacggcgccgtgcccgtggccgccagcgccgtgaccgtgctgctgcccgagaccctgggccagcccctgcccgacaccgtgcaggacctggagagcagatgggcccccacccagaaggaggccggcatctaccccagaaagggcaagcagaccagacagcagcaggagcaccagaagtacatggtgcccctgcaggccagcgcccaggagaagaacggcctgtag

SEQ ID NO: 149583 - protein, 494 aa, Artificial Sequence
  derived and/or modified sequence
MRPPGFRNFLLLASSLLFAGLSAVPQSFSPSLRSWPGAACRLSRAESERRCRAPGQPPGAALCHGRGRCDCGVCICHVTEPGMFFGPLCECHEWVCETYDGSTCAGHGKCDCGKCKCDQGWYGDACQYPTNCDLTKKKSNQMCKNSQDIICSNAGTCHCGRCKCDNSDGSGLVYGKFCECDDRECIDDETEEICGGHGKCYCGNCYCKAGWHGDKCEFQCDITPWESKRRCTSPDGKICSNRGTCVCGECTCHDVDPTGDWGDIHGDTCECDERDCRAVYDRYSDDFCSGHGQCNCGRCDCKAGWYGKKCEHPQSCTLSAEESIRKCQGSSDLPCSGRGKCECGKCTCYPPGDRRVYGKTCECDDRRCEDLDGVVCGGHGTCSCGRCVCERGWFGKLCQHPRKCNMTEEQSKNLCESADGILCSGKGSCHCGKCICSAEEWYISGEFCDCDDRDCDKHDGLICTGNGICSCGNCECWDGWNGNACEIWLGSEYP

SEQ ID NO: 149584 - protein, 402 aa, Artificial Sequence
  derived and/or modified sequence
MSGCARPTTGAPVQAMVSVTGKCKCDQGWYGDACQYPTNCDLTKKKSNQMCKNSQDIICSNAGTCHCGRCKCDNSDGSGLVYGKFCECDDRECIDDETEEICGGHGKCYCGNCYCKAGWHGDKCEFQCDITPWESKRRCTSPDGKICSNRGTCVCGECTCHDVDPTGDWGDIHGDTCECDERDCRAVYDRYSDDFCSGHGQCNCGRCDCKAGWYGKKCEHPQSCTLSAEESIRKCQGSSDLPCSGRGKCECGKCTCYPPGDRRVYGKTCECDDRRCEDLDGVVCGGHGTCSCGRCVCERGWFGKLCQHPRKCNMTEEQSKNLCESADGILCSGKGSCHCGKCICSAEEWYISGEFCDCDDRDCDKHDGLICTGNGICSCGNCECWDGWNGNACEIWLGSEYP

SEQ ID NO: 149585 - DNA, 1485 bp, Artificial Sequence
  derived and/or modified sequence
atgcggccgccaggttttaggaacttcctcctgctggccagcagtctcctgtttgccggcctgtccgccgtgccccagtctttcagcccctcgctccgctcttggcccggggctgcttgtaggctgtcaagggccgaatccgaacgaaggtgccgcgcccccggacagccaccgggagccgctctctgtcacggaagaggacgatgtgactgcggggtttgcatttgtcacgtgactgagcctgggatgttcttcgggcccctgtgcgagtgtcacgagtgggtctgtgagacgtacgacgggagtacctgtgcgggtcacggtaaatgcgactgtgggaagtgtaaatgtgaccagggctggtacggtgatgcctgccagtatccaactaattgtgaccttacaaagaaaaagtccaatcaaatgtgtaaaaatagccaggatatcatttgcagcaatgctggaacctgccactgtgggcgatgtaaatgcgataactccgatgggtccggcctggtctatggcaaattttgtgaatgtgacgatagagaatgcatcgacgacgagacagaagagatctgcggagggcatggcaaatgctactgcggaaactgctattgtaaagctggatggcacggagataaatgcgagttccagtgtgacattactccctgggagagcaaacggcgctgcacctccccagacgggaagatttgtagcaacaggggcacctgcgtgtgtggagaatgtacatgccacgacgtggaccctacaggcgactggggggacattcacggggacacttgcgagtgcgatgaacgtgattgtagagcggtttatgataggtactccgatgacttttgctctgggcatgggcaatgcaactgcggacgctgcgattgcaaggctgggtggtacggcaaaaagtgcgagcatcctcagtcttgcaccctgtcagccgaagagtctatcagaaagtgccagggcagcagtgacctcccttgtagtggccggggtaagtgcgagtgtgggaaatgcacgtgctacccacctggagatcgccgcgtttatgggaaaacctgcgagtgtgatgatagacgttgcgaggacttggatggggttgtgtgcgggggacatggcacttgcagttgtgggaggtgcgtgtgcgagcgaggctggtttgggaagctttgtcaacaccccaggaaatgtaacatgacagaagagcagagtaagaatttatgtgagtctgctgacgggatcctttgctccgggaaagggtcttgccactgtggtaaatgtatttgttcagccgaagagtggtacatcagcggcgagttctgtgactgcgacgatagggactgtgataagcatgacgggttgatttgcacaggtaacggcatatgttcttgcggcaactgtgaatgctgggatggctggaacggcaacgcctgcgagatctggctgggaagtgagtatccgtag

SEQ ID NO: 149586 - DNA, 2494 bp, Artificial Sequence
  derived and/or modified sequence
accagcaccccgcccagagcagtgccgctgcccaaatcctcgcaggcagctcatcaacgcaattgcaactccggctggagccccggacctgcaagcctgggtgtccgtgggtccgtctgcccagccatctgctggtggcacctctccctcctgccgcctccctcggtgaaccccaccttgcagaagtgcagctcgcccggagcagcccaggagctcagcatgcgtcccccaggcttcaggaacttcttgctgctggcgtcctcccttctctttgctgggttgtcagctgttcctcaaagcttctcgccatctctgaggagctggccgggcgccgcctgcaggctgtcccgggccgagtcggagcgacgctgccgcgcacctgggcagcccccgggggccgcgctgtgccacggccggggccgctgcgactgcggcgtctgcatctgccacgtgactgagccgggcatgttcttcgggcccctgtgtgagtgccatgagtgggtgtgcgagacctacgacgggagcacctgtgcaggccatggtaagtgtgactgtggcaagtgcaagtgtgaccagggatggtatggggatgcttgccagtacccaactaactgtgacttgacaaagaagaaaagtaaccaaatgtgcaagaattcacaagacatcatctgctctaatgcaggtacatgtcactgtggcaggtgtaagtgtgataattcagatggaagtggacttgtgtatggtaaattttgtgagtgtgacgatagagaatgcatagacgatgaaacagaagaaatatgtggaggccatgggaagtgttactgtggaaactgctactgcaaggctggttggcatggagataaatgtgaattccagtgcgatatcaccccctgggaaagcaagcgaagatgcacgtctccagatggcaaaatctgcagtaacagagggacttgtgtatgtggtgaatgtacctgtcacgatgttgatccgactggggactggggagatattcatggggacacctgtgaatgtgatgagagggactgtagagctgtctatgaccgatattctgatgacttctgttcaggtcatggacagtgtaattgcggaagatgtgactgcaaagcaggctggtatgggaagaagtgtgagcacccacagtcctgcacgctgtcagctgaggagagcatcaggaagtgccagggaagctcggatctgccttgctctgggaggggtaaatgtgaatgtggcaaatgcacctgctatcctccaggagatcgccgggtgtatggcaagacttgtgagtgtgatgatcgccgctgtgaagacctcgatggtgtggtctgtggaggccacggcacatgttcctgtggtcgctgtgtttgtgagagaggatggtttggaaagctctgccaacatccgcggaagtgtaacatgacggaagaacaaagcaagaatctgtgtgaatcagcagatggcatattgtgctcggggaagggttcttgtcattgtgggaagtgcatttgttctgctgaagagtggtatatttctggggagttctgtgactgtgatgacagagactgcgacaaacatgatggtctcatttgtacagggaatggaatatgtagctgtggaaactgtgaatgctgggatggatggaatggaaatgcatgtgaaatctggcttggctcagaatatccttaacaattacatgagagaggtctggattcttattttttctgggccattagaacagataaatgcgaaggaaaccatgtatattcaccactaggacaggttaaaaagaccattgtatgtttttctatttctgaattacgaatgaaatccgagtacctattagaaatgagttatgcaaatttagatgcaaataacattagaaaaaaaagattcttccataattaacataagtggttcctaacgagagcaatttttccacccaaaagtcatttggcaacatctacagacaattttgattgtcacactgggtcgggtaggaaggtatgctgcagacatttggtgggtagaggccagggatgctgctgagcatcccgcagtgtacaggacagcccccaaacaaggaattatccagccccaaatgccaatagggctcaaactgagaaacattgagttatatggctattagaaatccacattcttacacaagaaagaccatattagaatctaaggaaaacatgcatattcacattaattaatcgatcagatttttccagaattccgtatcagtcaccattttaatatggggacaatgaagacaagcacacaggaggtagaatatcagagtggggctggatcaagggcaaaaactggtcattaagtcatctgacattaaatcatttagccactaagttatttgtctactctcactttaaactcaccaaagaagattctcttaaagaaattatgaaaaatgtacaatttaacattttaaataaatagtgacagaagttgttta

SEQ ID NO: 149587 - DNA, 2491 bp, Artificial Sequence
  derived and/or modified sequence
accagcaccccgcccagagcagtgccgctgcccaaatcctcgcaggcagctcatcaacgcaattgcaactccggctggagccccggacctgcaagcctgggtgtccgtgggtccgtctgcccagccatctgctggtggcacctctccctcctgccgcctccctcggtgaaccccaccttgcagaagtgcagctcgcccggagcagcccaggagctcagcatgcgtcccccaggcttcaggaacttcttgctgctggcgtcctcccttctctttgctgggttgtcagctgttcctcaaagcttctcgccatctctgaggagctggccgggcgccgcctgcaggctgtcccgggccgagtcggagcgacgctgccgcgcacctgggcagcccccgggggccgcgctgtgccacggccggggccgctgcgactgcggcgtctgcatctgccacgtgactgagccgggcatgttcttcgggcccctgtgtgagtgccatgagtgggtgtgcgagacctacgacgggagcacctgtgcaggccatggtaagtgtgactggcaagtgcaagtgtgaccagggatggtatggggatgcttgccagtacccaactaactgtgacttgacaaagaagaaaagtaaccaaatgtgcaagaattcacaagacatcatctgctctaatgcaggtacatgtcactgtggcaggtgtaagtgtgataattcagatggaagtggacttgtgtatggtaaattttgtgagtgtgacgatagagaatgcatagacgatgaaacagaagaaatatgtggaggccatgggaagtgttactgtggaaactgctactgcaaggctggttggcatggagataaatgtgaattccagtgcgatatcaccccctgggaaagcaagcgaagatgcacgtctccagatggcaaaatctgcagtaacagagggacttgtgtatgtggtgaatgtacctgtcacgatgttgatccgactggggactggggagatattcatggggacacctgtgaatgtgatgagagggactgtagagctgtctatgaccgatattctgatgacttctgttcaggtcatggacagtgtaattgcggaagatgtgactgcaaagcaggctggtatgggaagaagtgtgagcacccacagtcctgcacgctgtcagctgaggagagcatcaggaagtgccagggaagctcggatctgccttgctctgggaggggtaaatgtgaatgtggcaaatgcacctgctatcctccaggagatcgccgggtgtatggcaagacttgtgagtgtgatgatcgccgctgtgaagacctcgatggtgtggtctgtggaggccacggcacatgttcctgtggtcgctgtgtttgtgagagaggatggtttggaaagctctgccaacatccgcggaagtgtaacatgacggaagaacaaagcaagaatctgtgtgaatcagcagatggcatattgtgctcggggaagggttcttgtcattgtgggaagtgcatttgttctgctgaagagtggtatatttctggggagttctgtgactgtgatgacagagactgcgacaaacatgatggtctcatttgtacagggaatggaatatgtagctgtggaaactgtgaatgctgggatggatggaatggaaatgcatgtgaaatctggcttggctcagaatatccttaacaattacatgagagaggtctggattcttattttttctgggccattagaacagataaatgcgaaggaaaccatgtatattcaccactaggacaggttaaaaagaccattgtatgtttttctatttctgaattacgaatgaaatccgagtacctattagaaatgagttatgcaaatttagatgcaaataacattagaaaaaaaagattcttccataattaacataagtggttcctaacgagagcaatttttccacccaaaagtcatttggcaacatctacagacaattttgattgtcacactgggtcgggtaggaaggtatgctgcagacatttggtgggtagaggccagggatgctgctgagcatcccgcagtgtacaggacagcccccaaacaaggaattatccagccccaaatgccaatagggctcaaactgagaaacattgagttatatggctattagaaatccacattcttacacaagaaagaccatattagaatctaaggaaaacatgcatattcacattaattaatcgatcagatttttccagaattccgtatcagtcaccattttaatatggggacaatgaagacaagcacacaggaggtagaatatcagagtggggctggatcaagggcaaaaactggtcattaagtcatctgacattaaatcatttagccactaagttatttgtctactctcactttaaactcaccaaagaagattctcttaaagaaattatgaaaaatgtacaatttaacattttaaataaatagtgacagaagttgttt

SEQ ID NO: 149588 - DNA, 2155 bp, Artificial Sequence
  derived and/or modified sequence
agagcagtgccgctgcccaaatcctcgcaggcagctcatcaacgcaattgcaactccggctggagccccggacctgcaagcctgggtgtccgtgggtccgtctgcccagccatctgctggtggcacctctccctcctgccacgtgactgagtgccatgagtgggtgtgcgagacctacgacgggagcacctgtgcaggccatggtaagtgtgactgtggcaagtgcaagtgtgaccagggatggtatggggatgcttgccagtacccaactaactgtgacttgacaaagaagaaaagtaaccaaatgtgcaagaattcacaagacatcatctgctctaatgcaggtacatgtcactgtggcaggtgtaagtgtgataattcagatggaagtggacttgtgtatggtaaattttgtgagtgtgacgatagagaatgcatagacgatgaaacagaagaaatatgtggaggccatgggaagtgttactgtggaaactgctactgcaaggctggttggcatggagataaatgtgaattccagtgcgatatcaccccctgggaaagcaagcgaagatgcacgtctccagatggcaaaatctgcagtaacagagggacttgtgtatgtggtgaatgtacctgtcacgatgttgatccgactggggactggggagatattcatggggacacctgtgaatgtgatgagagggactgtagagctgtctatgaccgatattctgatgacttctgttcaggtcatggacagtgtaattgcggaagatgtgactgcaaagcaggctggtatgggaagaagtgtgagcacccacagtcctgcacgctgtcagctgaggagagcatcaggaagtgccagggaagctcggatctgccttgctctgggaggggtaaatgtgaatgtggcaaatgcacctgctatcctccaggagatcgccgggtgtatggcaagacttgtgagtgtgatgatcgccgctgtgaagacctcgatggtgtggtctgtggaggccacggcacatgttcctgtggtcgctgtgtttgtgagagaggatggtttggaaagctctgccaacatccgcggaagtgtaacatgacggaagaacaaagcaagaatctgtgtgaatcagcagatggcatattgtgctcggggaagggttcttgtcattgtgggaagtgcatttgttctgctgaagagtggtatatttctggggagttctgtgactgtgatgacagagactgcgacaaacatgatggtctcatttgtacagggaatggaatatgtagctgtggaaactgtgaatgctgggatggatggaatggaaatgcatgtgaaatctggcttggctcagaatatccttaacaattacatgagagaggtctggattcttattttttctgggccattagaacagataaatgcgaaggaaaccatgtatattcaccactaggacaggttaaaaagaccattgtatgtttttctatttctgaattacgaatgaaatccgagtacctattagaaatgagttatgcaaatttagatgcaaataacattagaaaaaaaagattcttccataattaacataagtggttcctaacgagagcaatttttccacccaaaagtcatttggcaacatctacagacaattttgattgtcacactgggtcgggtaggaaggtatgctgcagacatttggtgggtagaggccagggatgctgctgagcatcccgcagtgtacaggacagcccccaaacaaggaattatccagccccaaatgccaatagggctcaaactgagaaacattgagttatatggctattagaaatccacattcttacacaagaaagaccatattagaatctaaggaaaacatgcatattcacattaattaatcgatcagatttttccagaattccgtatcagtcaccattttaatatggggacaatgaagacaagcacacaggaggtagaatatcagagtggggctggatcaagggcaaaaactggtcattaagtcatctgacattaaatcatttagccactaagttatttgtctactctcactttaaactcaccaaagaagattctcttaaagaaattatgaaaaatgtacaatttaacattttaaataaatagtgacagaagttgttt

SEQ ID NO: 149589 - DNA, 1485 bp, Artificial Sequence
  derived and/or modified sequence
atgaggcctcctggcttcaggaacttcctgctgctggccagcagcctgctgtttgctggcctgtctgctgtgccccagagcttcagccccagcctgcgctcctggccaggggccgcctgccgcctgagcagagctgagagcgagcggcgctgccgggcccctggccagcccccaggggccgccctgtgccacggccggggccgctgtgactgtggggtgtgcatctgccacgtgacagagcccggcatgttcttcggccccctgtgtgagtgccacgagtgggtgtgtgagacctatgatggcagcacctgtgccggccatggaaaatgtgactgtgggaagtgcaagtgtgaccagggctggtatggagatgcctgccagtaccccaccaactgtgacctgaccaagaagaagagcaaccagatgtgcaagaacagccaggacatcatctgcagcaatgccggcacctgccactgcggccgctgcaagtgtgacaacagtgatggcagcggcctggtgtatggcaagttctgtgaatgtgatgaccgggagtgcattgatgatgaaacagaggagatctgtggcggccacggcaagtgctactgcggcaactgctactgcaaggccggctggcacggggacaagtgtgagttccagtgtgacatcaccccctgggagagcaagaggcgctgcaccagcccagatggcaagatctgcagcaacagaggcacctgtgtgtgtggagaatgtacctgccatgatgtggaccccaccggggactggggagacatccatggagacacctgtgaatgtgatgagcgggactgcagagctgtgtatgaccgctacagtgatgacttctgcagcggccacggccagtgcaactgtggccgctgtgactgcaaggccggctggtacggcaagaagtgtgagcacccccagagctgcaccctgtctgctgaggagagcatcaggaagtgccagggcagcagtgacctgccctgcagcggccggggcaaatgtgaatgtgggaagtgcacctgctacccacctggggaccggcgggtgtatggcaagacctgtgaatgtgatgaccggcgctgtgaggacctggatggagtggtgtgtggcggccacggcacctgcagctgtggccgctgtgtgtgtgagcggggctggtttgggaagctgtgccagcaccccaggaagtgcaacatgacagaggagcagagcaagaacctgtgtgagagcgcagatggcatcctgtgcagcggcaagggcagctgccactgtgggaagtgcatctgcagcgctgaggagtggtacatcagcggggagttctgtgactgtgatgaccgggactgtgacaagcatgatggcctcatctgcacaggaaatggcatctgcagctgtggcaactgtgagtgctgggatggctggaatggaaatgcctgtgagatctggctgggcagcgagtacccctag

SEQ ID NO: 149590 - DNA, 1485 bp, Artificial Sequence
  derived and/or modified sequence
atgcggccccccggcttccggaacttcctgctgctggccagcagcctgctgtttgccggcctgtctgctgtgcctcaatcctttagtccctcactgagatcctggccgggggctgcctgcaggctaagtcgtgccgagagcgagagacggtgcagggcccctgggcagccacccggcgccgctctctgtcatggacgtggaagatgtgactgcggggtgtgcatttgccatgttaccgagcctggcatgttctttgggcctctgtgcgagtgccatgagtgggtttgtgagacttatgacggctcaacctgtgctggccatggaaaatgcgactgtgggaagtgcaagtgtgaccaaggctggtatggagacgcgtgtcaatatcccaccaattgcgacctgacaaagaagaagtcaaaccaaatgtgtaagaattctcaagacattatatgctcaaatgctgggacatgtcattgtggaaggtgtaaatgcgataacagcgacgggagcggactagtgtacggtaagttctgtgaatgtgatgacagagagtgcatagacgatgaaaccgaggaaatttgtggtggacatggtaaatgctattgcggcaattgctactgcaaggctggatggcacggtgacaaatgtgagttccagtgcgatatcactccctgggagagtaagagacggtgcacttctcccgatggaaagatttgcagcaacaggggaacttgtgtatgcggggagtgtacttgccatgatgtggatcccactggcgattggggagatattcatggagacacctgtgaatgcgacgagcgggactgcagggccgtctatgatcggtacagcgacgacttctgtagtggacatggtcaatgcaactgcggtcgctgcgattgcaaagcggggtggtatggaaagaagtgcgaacatcctcagagctgtacactctctgctgaagagtctatccgtaagtgccagggatcttcagatctcccctgctctgggcgtgggaagtgtgaatgcggcaaatgtacctgctatccccctggcgatcgaagagtgtacggcaagacctgcgagtgcgatgatcgccgttgtgaggatctggatggcgtggtgtgtgggggacacgggacatgtagctgcggacgctgtgtttgcgagagagggtggttcggaaagctctgtcagcatcctaggaaatgtaacatgactgaggagcagtccaagaatctgtgcgagtctgccgatgggatactttgtagcggaaaaggctcttgccactgtggaaagtgcatttgcagtgcagaagagtggtatatctcgggagaattttgcgactgcgatgacagggattgcgacaaacacgatgggcttatttgcacagggaatgggatctgttcctgcggaaactgcgagtgttgggacggctggaacggaaacgcatgcgaaatctggcttggaagcgaatatccctag

SEQ ID NO: 149591 - DNA, 1485 bp, Artificial Sequence
  derived and/or modified sequence
atgcggcctcccggatttagaaactttttactgctcgcctcatcactgttatttgccggtctgtcagcagtgccccagtcattttctccctcactgcggagttggcccggtgccgcttgccggctctcacgggctgagagcgagcgccgttgtcgggctcctggtcagcctccaggcgctgccctgtgtcacggaagggggagatgcgactgcggcgtgtgtatttgtcatgtgacggagcctgggatgttttttgggccactttgtgagtgccatgagtgggtatgtgagacatacgatggttcaacatgtgccggacatggaaagtgcgactgcggcaagtgcaaatgtgaccaaggctggtacggagatgcttgtcagtacccgaccaattgcgatcttacaaaaaaaaagtctaaccaaatgtgtaagaattcccaggacataatatgttccaacgccggaacttgccactgtggtcgctgcaagtgtgataactcggacggtagtggattagtatatggcaaattttgcgagtgcgacgaccgggaatgcattgacgacgagacagaggagatttgcggcggacacggcaaatgctattgtggtaattgttactgcaaggctggttggcacggcgataaatgtgagtttcagtgtgatataacaccgtgggagtctaagaggaggtgcaccagccccgacggaaagatatgttctaacagaggcacatgcgtatgtggggaatgtacatgtcacgatgtagacccgaccggtgattggggagacattcatggtgatacttgtgagtgtgacgagagagattgtagggcggtttatgatcggtatagtgatgatttttgtagcggacacggtcagtgcaattgcgggcgatgcgattgcaaagccggttggtatgggaaaaaatgcgagcatccccagtcctgtacactgagtgctgaggaaagcataagaaaatgtcagggttcaagcgaccttccttgctccgggagaggaaaatgtgaatgcggcaagtgcacatgctaccccccaggcgaccgtagagtgtacgggaaaacatgcgaatgcgatgatagacgctgtgaggacctagatggcgtcgtttgcgggggacatggaacctgcagctgtgggaggtgtgtctgcgagcgcggttggtttggcaaattgtgccaacaccctcgaaaatgtaatatgactgaggagcagtccaagaacctgtgtgaatcggcagatgggatcctgtgttcaggaaagggcagctgtcattgcgggaaatgcatttgcagtgcggaggagtggtatatctctggagagttttgtgattgcgatgaccgcgactgtgacaagcacgatggtctgatctgcactggaaatggcatatgctcctgcgggaattgtgagtgctgggatggttggaacggtaatgcctgtgaaatttggctagggtcagaatacccttag

SEQ ID NO: 149592 - DNA, 1485 bp, Artificial Sequence
  derived and/or modified sequence
atgagaccccccggcttcagaaacttcctgctgctggccagcagcctgctgttcgccggcctgagcgccgtgccccagagcttcagccccagcctgagaagctggcccggcgccgcctgcagactgagcagagccgagagcgagagaagatgcagagcccccggccagccccccggcgccgccctgtgccacggcagaggcagatgcgactgcggcgtgtgcatctgccacgtgaccgagcccggcatgttcttcggccccctgtgcgagtgccacgagtgggtgtgcgagacctacgacggcagcacctgcgccggccacggcaagtgcgactgcggcaagtgcaagtgcgaccagggctggtacggcgacgcctgccagtaccccaccaactgcgacctgaccaagaagaagagcaaccagatgtgcaagaacagccaggacatcatctgcagcaacgccggcacctgccactgcggcagatgcaagtgcgacaacagcgacggcagcggcctggtgtacggcaagttctgcgagtgcgacgacagagagtgcatcgacgacgagaccgaggagatctgcggcggccacggcaagtgctactgcggcaactgctactgcaaggccggctggcacggcgacaagtgcgagttccagtgcgacatcaccccctgggagagcaagagaagatgcaccagccccgacggcaagatctgcagcaacagaggcacctgcgtgtgcggcgagtgcacctgccacgacgtggaccccaccggcgactggggcgacatccacggcgacacctgcgagtgcgacgagagagactgcagagccgtgtacgacagatacagcgacgacttctgcagcggccacggccagtgcaactgcggcagatgcgactgcaaggccggctggtacggcaagaagtgcgagcacccccagagctgcaccctgagcgccgaggagagcatcagaaagtgccagggcagcagcgacctgccctgcagcggcagaggcaagtgcgagtgcggcaagtgcacctgctacccccccggcgacagaagagtgtacggcaagacctgcgagtgcgacgacagaagatgcgaggacctggacggcgtggtgtgcggcggccacggcacctgcagctgcggcagatgcgtgtgcgagagaggctggttcggcaagctgtgccagcaccccagaaagtgcaacatgaccgaggagcagagcaagaacctgtgcgagagcgccgacggcatcctgtgcagcggcaagggcagctgccactgcggcaagtgcatctgcagcgccgaggagtggtacatcagcggcgagttctgcgactgcgacgacagagactgcgacaagcacgacggcctgatctgcaccggcaacggcatctgcagctgcggcaactgcgagtgctgggacggctggaacggcaacgcctgcgagatctggctgggcagcgagtacccctag

SEQ ID NO: 149593 - protein, 754 aa, Artificial Sequence
  derived and/or modified sequence
MGIKVQRPRCFFDIAINNQPAGRVVFELFSDVCPKTCENFRCLCTGEKGTGKSTQKPLHYKSCLFHRVVKDFMVQGGDFSEGNGRGGESIYGGFFEDESFAVKHNKEFLLSMANRGKDTNGSQFFITTKPTPHLDGHHVVFGQVISGQEVVREIENQKTDAASKPFAEVRILSCGELIPKSKVKKEEKKRHKSSSSSSSSSSDSDSSSDSQSSSDSSDSESATEEKSKKRKKKHRKNSRKHKKEKKKRKKSKKSASSESEAENLEAQPQSTVRPEEIPPIPENRFLMRKSPPKADEKERKNRERERERECNPPNSQPASYQRRLLVTRSGRKIKGRGPRRYRTPSRSRSRDRFRRSETPPHWRQEMQRAQRMRVSSGERWIKGDKSELNEIKENQRSPVRVKERKITDHRNVSESPNRKNEKEKKVKDHKSNSKERDIRRNSEKDDKYKNKVKKRAKSKSRSKSKEKSKSKERDSKHNRNEEKRMRSRSKGRDHENVKEKEKQSDSKGKDQERSRSKEKSKQLESKSNEHDHSKSKEKDRRAQSRSRECDITKGKHSYNSRTRERSRSRDRSRRVRSRTHDRDRSRSKEYHRYREQEYRRRGRSRSRERRTPPGRSRSKDRRRRRRDSRSSEREESQSRNKDKYRNQESKSSHRKENSESEKRMYSKSRDHNSSNNSREKKADRDQSPFSKIKQSSQDNELKSSMLKNKEDEKIRSSVEKENQKSKGQENDHVHEKNKKFDHESSPGTDEDKSG

SEQ ID NO: 149594 - protein, 246 aa, Artificial Sequence
  derived and/or modified sequence
MGIKVQRPRCFFDIAINNQPAGRVVFELFSDVCPKTCENFRCLCTGEKGTGKSTQKPLHYKSCLFHRVVKDFMVQGGDFSEGNGRGGESIYGGFFEDESFAVKHNKEFLLSMANRGKDTNGSQFFITTKPTPHLDGHHVVFGQVISGQEVVREIENQKTDAASKPFAEVRILSCGELIPKSKVKKEEKKRHKSSSSSSSSSSDSDSSSDSQSSSDSSDSESATEEKSKKRKKKHRKNSRKHKKEKK

SEQ ID NO: 149595 - protein, 59 aa, Artificial Sequence
  derived and/or modified sequence
MGIKVQRPRCFFDIAINNQPAGRVVFELFSDVCPKTCENFRCLCTGEKGTGKSTQKPLH

SEQ ID NO: 149596 - protein, 448 aa, Artificial Sequence
  derived and/or modified sequence
MGIKVQRPRCFFDIAINNQPAGRVVFELFSDVCPKTCENFRCLCTGEKGTGKSTQKPLHYKSCLFHRVVKDFMVQGGDFSEGNGRGGESIYGGFFEDESFAVKHNKEFLLSMANRGKDTNGSQFFITTKPTPHLDGHHVVFGQVISGQEVVREIENQKTDAASKPFAEVRILSCGELIPKSKVKKEEKKRHKSSSSSSSSSSDSDSSSDSQSSSDSSDSESATEEKSKKRKKKHRKNSRKHKKEKKKRKKSKKSASSESEAENLEAQPQSTVRPEEIPPIPENRFLMRKSPPKADEKERKNRERERERECNPPNSQPASYQRRLLVTRSGRKIKGRGPRRYRTPSRSRSRDRFRRSETPPHWRQEMQRAQRMRVSSGERWIKGDKSELNEIKENQRSPVRVKERKITDHRNVSESPNRKNEKEKKVKDHKSNSKERDIRRKKKKKKKK

SEQ ID NO: 149597 - DNA, 741 bp, Artificial Sequence
  derived and/or modified sequence
atggggattaaagttcagaggccgagatgtttcttcgatattgctattaataaccagccagcaggacgcgtggtgtttgagctgttcagcgacgtatgccccaagacgtgcgaaaacttccggtgcctctgcacaggggagaaggggacaggtaaaagcacacaaaaaccactgcactataagtcttgcttgtttcatcgggtggtaaaggacttcatggtgcaaggcggagacttttctgaaggcaacggccggggaggggagagtatctacggggggtttttcgaagacgaatcttttgccgttaaacacaataaagagttcctcctgagtatggccaatagagggaaagatacaaacggctctcagtttttcatcaccacaaaacccaccccccatctggacggtcaccacgtggtctttgggcaagtgatttccggccaggaggtcgtcagggagattgagaatcaaaagacagacgccgcatccaagccatttgctgaagtacggatcctgagttgcggagaactgattcctaaaagcaaagtaaagaaggaggagaagaaacgccataaatcatccagctcctcgagcagcagtagctccgactccgacagctcatcagacagccagtcttcctccgattcatccgattccgaatccgctactgaggagaagagtaagaaacggaaaaagaaacaccggaaaaacagcaggaagcacaaaaaagagaagaaatag

SEQ ID NO: 149598 - DNA, 180 bp, Artificial Sequence
  derived and/or modified sequence
atggggattaaggtgcaaagaccccgctgctttttcgacattgctatcaataaccagcccgccggccgggtcgtgttcgaactgttttccgacgtctgtcccaagacctgcgagaattttcgctgcctctgcacaggagaaaaaggtaccggtaagtccactcagaagcctctccattag

SEQ ID NO: 149599 - DNA, 1347 bp, Artificial Sequence
  derived and/or modified sequence
atgggtattaaagtgcagaggccccgctgttttttcgatattgctattaataaccagccagctggacgcgttgtatttgagctgttttcagatgtctgccccaagacatgcgagaattttaggtgtctgtgtaccggcgagaaagggacagggaaatcaactcagaaacccctccactacaaatcatgtctcttccatcgagtagtgaaagattttatggtacagggtggtgacttcagcgaggggaacgggagagggggggagtccatatatggcggattttttgaggacgagtcattcgccgtcaaacataacaaggaattcctgctctctatggccaaccgggggaaggacaccaacggcagccaattttttataaccacaaagccaacgcctcatctcgatgggcaccacgtggtcttcgggcaggtcataagcggccaggaggtggtacgggagatcgaaaatcagaagacggatgctgcctccaagccttttgctgaggtgagaatcctgtcatgcggagagctcatcccaaagagcaaagtgaagaaggaggagaagaagaggcataaaagctccagctctagttcctccagctcaagcgacagtgacagctcctccgactcccagagctcttccgatagttccgatagcgaatcggcaaccgaggagaaatctaaaaaacggaagaagaagcataggaagaactcaaggaaacacaagaaagaaaagaagaaaagaaagaagtcaaaaaaatccgccagcagtgaaagcgaggccgaaaacttggaggctcagccacagtccaccgtaagaccagaggaaatcccccccattccagagaacagattcctgatgcgaaagtcccctcccaaggcggatgagaaggagaggaagaaccgggaacgcgaaagggagcgcgagtgtaacccaccaaattcgcagcccgcttcatatcagaggcgcctactggttactaggagcggaaggaagattaagggccgtggccctagacgatatcgcacacctagccgcagccgctcccgtgatcgcttccgacggtcggaaacaccaccacactggcgccaggagatgcagcgggctcaaagaatgagagtctcctcaggagaaagatggatcaagggtgataagtccgagctgaacgagatcaaagagaaccaacgcagccccgtgcgggtaaaagaacggaaaattacagatcaccggaacgtctctgaaagccccaaccgaaaaaatgagaaggaaaaaaaggtgaaggatcacaagtccaatagcaaagagcgcgacatcaggaggaaaaaaaaaaagaagaaaaagaagtag

SEQ ID NO: 149600 - DNA, 741 bp, Artificial Sequence
  derived and/or modified sequence
atgggcatcaaggtgcagaggccccgctgcttctttgacatcgccatcaacaaccagcctgctggccgggtggtgtttgagctgttcagtgatgtgtgccccaagacctgtgagaacttccgctgcctgtgcacaggagagaagggcaccgggaagagcacccagaagcccctgcactacaagagctgcctcttccaccgggtggtgaaggacttcatggtgcagggcggggacttcagcgagggcaatggccggggcggggagagcatctatggaggcttctttgaagatgagagctttgctgtgaagcacaacaaggagttcctgctgtccatggccaacagaggcaaggacaccaacggcagccagttcttcatcaccaccaagcccaccccccacctggatggccaccacgtggtgtttggccaggtgatcagcggccaggaggtggtgcgggagattgagaaccagaagacagatgctgccagcaagccctttgctgaggtgcgcatcctgagctgtggggagctgatccccaagagcaaggtgaagaaggaggagaagaagaggcacaagagcagcagcagcagcagcagcagcagcagtgacagcgacagcagcagtgacagccagagcagcagtgacagcagtgacagcgagagcgccacagaggagaagagcaagaagaggaagaagaagcacaggaagaacagcaggaagcacaagaaggagaagaagtag

SEQ ID NO: 149601 - DNA, 180 bp, Artificial Sequence
  derived and/or modified sequence
atgggcatcaaggtgcagaggccccgctgcttctttgacatcgccatcaacaaccagcctgctggccgggtggtgtttgagctgttcagtgatgtgtgccccaagacctgtgagaacttccgctgcctgtgcacaggagagaagggcaccgggaagagcacccagaagcccctgcactag

SEQ ID NO: 149602 - DNA, 1347 bp, Artificial Sequence
  derived and/or modified sequence
atgggcatcaaggtgcagaggccccgctgcttctttgacatcgccatcaacaaccagcctgctggccgggtggtgtttgagctgttcagtgatgtgtgccccaagacctgtgagaacttccgctgcctgtgcacaggagagaagggcaccgggaagagcacccagaagcccctgcactacaagagctgcctcttccaccgggtggtgaaggacttcatggtgcagggcggggacttcagcgagggcaatggccggggcggggagagcatctatggaggcttctttgaagatgagagctttgctgtgaagcacaacaaggagttcctgctgtccatggccaacagaggcaaggacaccaacggcagccagttcttcatcaccaccaagcccaccccccacctggatggccaccacgtggtgtttggccaggtgatcagcggccaggaggtggtgcgggagattgagaaccagaagacagatgctgccagcaagccctttgctgaggtgcgcatcctgagctgtggggagctgatccccaagagcaaggtgaagaaggaggagaagaagaggcacaagagcagcagcagcagcagcagcagcagcagtgacagcgacagcagcagtgacagccagagcagcagtgacagcagtgacagcgagagcgccacagaggagaagagcaagaagaggaagaagaagcacaggaagaacagcaggaagcacaagaaggagaagaagaagaggaagaagagcaagaagagcgccagcagcgagagcgaggccgagaacctggaggcccagccccagagcacagtgcggcctgaggagatcccccccatccctgagaaccgcttcctgatgaggaagagcccccccaaggcagatgagaaggagaggaagaaccgggagcgggagcgggagcgggagtgcaacccccccaacagccagcctgccagctaccagaggcggctgctggtgaccaggagcggcaggaagatcaagggccggggcccccggcgctaccgcacccccagccgcagccgcagccgggaccgcttccgccgctctgagaccccaccccactggaggcaggagatgcagagggcccagaggatgagggtgagcagcggggagcgctggatcaagggggacaagtctgagctgaatgagatcaaggagaaccagaggagccctgtgcgggtgaaggagaggaagatcacagaccacagaaatgtgtctgagagccccaacaggaagaatgagaaggagaagaaggtgaaggaccacaagagcaacagcaaggagcgggacatccggaggaagaagaagaagaagaagaagaagtag

SEQ ID NO: 149603 - DNA, 741 bp, Artificial Sequence
  derived and/or modified sequence
atgggcatcaaggtgcagcggccccggtgcttcttcgacatcgccataaataaccaacctgccggccgggtagtcttcgaactgttttctgatgtctgccccaagacctgcgaaaatttcaggtgtctgtgtactggcgaaaaagggacaggaaagagcacccagaagcccctgcactataagagctgcttgttccacagagtcgtgaaagatttcatggtgcaggggggagattttagcgaaggaaacggcaggggtggcgaatctatctacggaggctttttcgaagacgaaagcttcgctgtcaaacataataaggaattcctcttgagcatggcaaaccgcggtaaagacaccaacggaagccaattttttatcactactaagcccactccccatctcgacggtcaccacgtagtgtttggccaggtgatatcaggtcaggaggtcgtcagagagattgaaaaccagaaaaccgacgccgcgtcaaagccttttgcggaggtgaggatccttagctgcggcgagctcatcccaaagtcaaaggtcaagaaagaagaaaagaagcgccacaaatcaagctcttcatccagctcttctagtagcgatagcgactcctctagcgacagtcaaagtagctcagattctagcgattcggaaagtgccacagaagaaaagagtaagaaaaggaagaaaaagcacaggaaaaattcgaggaaacacaaaaaggagaagaagtag

SEQ ID NO: 149604 - DNA, 180 bp, Artificial Sequence
  derived and/or modified sequence
atgggcatcaaggtgcagcggccccggtgcttcttcgacatcgccattaataatcagcccgccggtcgcgtggtgttcgagctcttcagcgatgtctgcccaaaaacatgcgagaactttagatgtctatgcaccggggagaagggcaccgggaaatcgacccaaaagcccctccactag

SEQ ID NO: 149605 - DNA, 1347 bp, Artificial Sequence
  derived and/or modified sequence
atgggcatcaaggtgcagcggccccggtgcttcttcgacatcgccatcaacaatcagccagcggggagagttgtattcgaactctttagcgacgtctgtcccaaaacttgcgagaactttcgctgcctatgcactggagaaaagggaaccgggaagtcaactcagaaaccactccattacaagtcgtgcctatttcaccgggtggtgaaggacttcatggtccagggaggagactttagcgagggaaacggtagaggtggtgagtcgatatatgggggcttcttcgaggacgagagctttgctgtgaaacataacaaggaattccttctaagtatggccaatagaggaaaggataccaacgggtctcagttctttattacaacaaaaccgacaccccatctagacggacatcatgtagtatttgggcaggtaatctcgggacaagaggttgttcgggaaatcgagaaccagaagaccgacgctgcttcaaagcccttcgcagaggtcaggatactgtcctgcggcgagctcatccctaaatctaaggtaaagaaggaggagaagaagaggcacaaatcatcctccagttctagctcctcttcctccgattcggactccagttcggattctcagtctagctctgattcttctgatagcgaatccgctacagaagaaaagtctaaaaagcggaagaagaagcacagaaagaatagccgcaaacataaaaaggagaaaaaaaagaggaaaaagagtaaaaaatccgcctcctccgagtccgaggctgaaaaccttgaggctcagccccagagtacggtgcggcctgaagagatcccaccaataccggagaacaggttcctgatgagaaagagccctcccaaggctgacgagaaggagaggaaaaatcgtgagcgcgagcgtgagcgcgaatgcaacccccctaacagccagcccgcaagttaccaaagacgactcctggtgacgcgcagcggtcggaaaatcaaggggcgcggccctcgccgataccgcaccccttcgcgcagtaggtctagggatcgattccgcaggagtgagacaccaccacattggcggcaggagatgcaacgggcccagcgtatgagggttagctcaggcgaacggtggattaaaggagacaaatctgaactgaatgagattaaggagaaccaaaggtctcccgtgcgagtgaaagagcgcaagataactgaccaccggaatgtgagcgaatctccgaaccgtaagaatgagaaggagaaaaaggtgaaagatcacaaaagcaattctaaagaaagagacattcggcggaagaagaaaaaaaaaaagaagaagtag

SEQ ID NO: 149606 - DNA, 1062 bp, Artificial Sequence
  derived and/or modified sequence
gaggaagtccctgaggaccgcagcagtgcctttgccgctgttgcagaaggagaaggcttgcagtcgagccccggggcctggggacggtccttcctctgccagcccccgccctccccactcaggcgcacacctccctcactgacgcattttgccgcacaagctgtaacatggcggcagcgactgcggcctgaactctagggagccgggttgatttttaaagcttcaaaatcctaagactcagcactgttgcggggagcacagggatcagttgtccttgtttttttttggtcttttcttcatttgaagattaagtattggagccatgggaataaaggttcaacgtcctcgatgtttttttgacattgccattaacaatcaacctgctggaagagttgtctttgaattattttctgatgtgtgccccaaaacatgcgagaactttcgttgtctttgtacaggtgaaaaggggaccgggaaatcaactcagaaaccattacattataagagttgtctctttcacagagttgtcaaggattttatggttcaaggtggtgacttcagtgaaggaaatggacgaggaggggaatctatctatggaggattttttgaagacgagagtttcgctgttaaacacaacaaagaatttctcttgtcaatggccaacagagggaaggatacaaatggttcacagttcttcataacaacgaaaccaactcctcatttagatgggcatcatgttgtttttggacaagtaatctctggtcaagaagttgtaagagagattgaaaaccagaaaacagatgcagctagcaaaccgtttgcggaggtacggatactcagttgtggagagctgattcccaaatctaaagttaagaaagaagaaaagaaaaggcataaatcatcatcatcttcctcctcctcatctagtgactcagatagctcaagtgattctcagtcctcttctgattcctctgattccgaaagtgctactgaagagaaatcaaagaaaagaaaaaagaaacatcggaaaaattcccgaaaacacaagaaagaaaagaaaaa

SEQ ID NO: 149607 - DNA, 525 bp, Artificial Sequence
  derived and/or modified sequence
gaagaggggcggagccggcgcggctgaccgggttgggtttaccgtctttccctcgaggtatcggggctgcttgggcccagaggaagtccctgaggaccgcagcagtgcctttgccgctgttgcagaaggagaaggcttgcagtcgagccccggggcctggggacggtccttcctctgccagcccccgccctccccactcaggcgcacacctccctcactgacgcattttgccgcacaagctgtaacatggcggcagcgactgcggcctgaactctagggagccgggttgatttttaaagcttcaaaatcctaagactcagcactgttgcgggattaagtattggagccatgggaataaaggttcaacgtcctcgatgtttttttgacattgccattaacaatcaacctgctggaagagttgtctttgaattattttctgatgtgtgccccaaaacatgcgagaactttcgttgtctttgtacaggtgaaaaggggaccgggaaatcaactcagaaaccattacat

SEQ ID NO: 149608 - DNA, 1564 bp, Artificial Sequence
  derived and/or modified sequence
gcgcttccggtgcgacgctgtctctccatgccaggactgagttgtgggggagggaggcggttagcgggctttagcgccttttctggcggcggtagatttgaagcgcttcaaaggaccggacccagagaagaggaaaactctaccggtgcaggagcacagggatcagttgtccttgtttttttttggtcttttcttcatttgaagattaagtattggagccatgggaataaaggttcaacgtcctcgatgtttttttgacattgccattaacaatcaacctgctggaagagttgtctttgaattattttctgatgtgtgccccaaaacatgcgagaactttcgttgtctttgtacaggtgaaaaggggaccgggaaatcaactcagaaaccattacattataagagttgtctctttcacagagttgtcaaggattttatggttcaaggtggtgacttcagtgaaggaaatggacgaggaggggaatctatctatggaggattttttgaagacgagagtttcgctgttaaacacaacaaagaatttctcttgtcaatggccaacagagggaaggatacaaatggttcacagttcttcataacaacgaaaccaactcctcatttagatgggcatcatgttgtttttggacaagtaatctctggtcaagaagttgtaagagagattgaaaaccagaaaacagatgcagctagcaaaccgtttgcggaggtacggatactcagttgtggagagctgattcccaaatctaaagttaagaaagaagaaaagaaaaggcataaatcatcatcatcttcctcctcctcatctagtgactcagatagctcaagtgattctcagtcctcttctgattcctctgattccgaaagtgctactgaagagaaatcaaagaaaagaaaaaagaaacatcggaaaaattcccgaaaacacaagaaagaaaagaaaaagcgaaagaaaagcaagaagagtgcatctagtgagagtgaagctgaaaatcttgaagcacaaccccagtctactgtccgtccagaagagatccctcctatacctgaaaatagattcctaatgagaaaaagtcctcctaaagctgatgagaaggaaaggaaaaacagagagagagaaagggaaagagagtgtaatccacctaactcccagcctgcttcataccagagacgacttttagttactagatctggcaggaaaattaaaggaagaggaccaaggcgttatcgaactccttccagatccagatcaagggatcgtttcagacgtagtgagactcctccacattggaggcaagagatgcagagagctcaaagaatgagggtatcaagtggtgaaagatggatcaagggggataagagtgagttgaatgaaataaaagaaaatcagagaagtccagttagagtaaaagagagaaaaataacagatcacaggaatgtatctgagagtccaaacagaaaaaatgaaaaggagaagaaagttaaagaccataaatctaacagcaaagagagagacatcagaagaaaaaaaaaaaaaaaaaaaaaaaaa

SEQ ID NO: 149609 - DNA, 741 bp, Artificial Sequence
  derived and/or modified sequence
atgggaattaaagttcagcggccacgatgtttcttcgacattgccataaacaaccagcctgccggtcgggtcgtatttgaacttttttcagacgtgtgtcccaagacctgtgaaaacttcaggtgcttatgcaccggagaaaagggaactgggaagagtacccaaaagcctctgcactacaaaagctgcctgttccaccgcgttgtgaaggacttcatggtgcagggcggagactttagcgaaggaaacggccgtggcggtgaatcaatttatgggggatttttcgaggatgagagtttcgctgtcaagcataacaaggagtttctcctatcaatggcaaaccgaggaaaggacaccaatggaagtcagtttttcatcaccactaagccaacccctcacttggatggccaccacgtcgtgttcggacaggtgatttccggccaggaggttgtgcgcgagattgaaaatcagaagacagacgccgcttccaaaccatttgcagaagtgagaattctgtcttgtggagaattgatcccaaagagtaaagtgaaaaaagaagagaaaaagcgccataaatcctcaagcagctcatcaagttcatctagcgacagcgatagttcctccgattcccaatctagctcggacagctccgattcagagtctgccacggaggagaaatccaagaaaagaaagaagaagcatcgcaagaatagtcggaaacacaagaaagagaagaagtag

SEQ ID NO: 149610 - DNA, 180 bp, Artificial Sequence
  derived and/or modified sequence
atgggcattaaggttcagcggccacgctgcttctttgacattgctataaacaatcagcctgcaggccgtgttgtgtttgagttgttctcagatgtctgcccaaaaacctgcgagaattttaggtgcctctgcactggcgagaaggggactggcaagtctacacaaaagcctctccactag

SEQ ID NO: 149611 - DNA, 1347 bp, Artificial Sequence
  derived and/or modified sequence
atgggaatcaaggttcaacggcctagatgttttttcgacatagccataaacaaccaaccagccggacgggtggtttttgagttattcagcgacgtatgccccaaaacttgcgaaaatttccgatgtctgtgtactggagagaaggggaccgggaaatctacccagaagccgttacattacaagagctgcttatttcatcgggtggtcaaggacttcatggtgcagggtggggacttctccgaagggaacgggcgtgggggagaatctatctacggcggtttcttcgaagatgaaagctttgccgtgaaacataacaaagaattccttctgtcaatggctaatcgtggaaaagacaccaatggaagtcagttcttcatcactacgaaacctacacctcacttggatggtcatcacgtcgtgtttggacaggttatctcaggccaggaggttgttagagaaattgagaatcagaaaactgatgccgcttcgaagccttttgctgaggtgcgtatcctgtcttgtggagagctgattcctaaatctaaggtgaagaaggaagagaagaaaagacataagtcttcaagctcttctagctcatcctctagtgattctgacagctcctctgactcccagtcaagcagtgattcgtccgattctgaaagtgccacggaagaaaagtcaaagaagagaaagaaaaaacacaggaaaaactcgaggaaacataaaaaggaaaagaagaagcgcaagaagtccaaaaagtctgcgtcaagtgaatcagaggccgaaaacctggaggcccaaccacagtctacagttcgccctgaggagatcccaccaattccagagaataggtttctcatgcggaagtctccccctaaggccgacgagaaggaacgtaaaaacagggagagagagagggaacgcgagtgcaacccacctaactctcagcccgcaagctaccaacgcagactactggtaacccgatccggtcgtaagatcaagggacgcggaccgaggcggtatagaacaccaagtcgatcccgttctcgtgaccgatttagaaggtctgagaccccgccacactggcggcaggagatgcagcgcgctcagaggatgcgcgtgagcagcggagagcgctggattaagggcgacaagtcagagctcaacgagatcaaagagaatcagcgatcacccgttcgcgtgaaggagcgtaaaattacagaccaccggaatgtctccgaatcccccaaccgtaaaaacgagaaggagaaaaaagtgaaagatcacaaaagcaattctaaggagcgagacattagaagaaaaaagaagaagaagaagaaaaagtag

SEQ ID NO: 149612 - DNA, 741 bp, Artificial Sequence
  derived and/or modified sequence
atgggcatcaaggtgcagagacccagatgcttcttcgacatcgccatcaacaaccagcccgccggcagagtggtgttcgagctgttcagcgacgtgtgccccaagacctgcgagaacttcagatgcctgtgcaccggcgagaagggcaccggcaagagcacccagaagcccctgcactacaagagctgcctgttccacagagtggtgaaggacttcatggtgcagggcggcgacttcagcgagggcaacggcagaggcggcgagagcatctacggcggcttcttcgaggacgagagcttcgccgtgaagcacaacaaggagttcctgctgagcatggccaacagaggcaaggacaccaacggcagccagttcttcatcaccaccaagcccaccccccacctggacggccaccacgtggtgttcggccaggtgatcagcggccaggaggtggtgagagagatcgagaaccagaagaccgacgccgccagcaagcccttcgccgaggtgagaatcctgagctgcggcgagctgatccccaagagcaaggtgaagaaggaggagaagaagagacacaagagcagcagcagcagcagcagcagcagcagcgacagcgacagcagcagcgacagccagagcagcagcgacagcagcgacagcgagagcgccaccgaggagaagagcaagaagagaaagaagaagcacagaaagaacagcagaaagcacaagaaggagaagaagtag

SEQ ID NO: 149613 - DNA, 180 bp, Artificial Sequence
  derived and/or modified sequence
atgggcatcaaggtgcagagacccagatgcttcttcgacatcgccatcaacaaccagcccgccggcagagtggtgttcgagctgttcagcgacgtgtgccccaagacctgcgagaacttcagatgcctgtgcaccggcgagaagggcaccggcaagagcacccagaagcccctgcactag

SEQ ID NO: 149614 - DNA, 1347 bp, Artificial Sequence
  derived and/or modified sequence
atgggcatcaaggtgcagagacccagatgcttcttcgacatcgccatcaacaaccagcccgccggcagagtggtgttcgagctgttcagcgacgtgtgccccaagacctgcgagaacttcagatgcctgtgcaccggcgagaagggcaccggcaagagcacccagaagcccctgcactacaagagctgcctgttccacagagtggtgaaggacttcatggtgcagggcggcgacttcagcgagggcaacggcagaggcggcgagagcatctacggcggcttcttcgaggacgagagcttcgccgtgaagcacaacaaggagttcctgctgagcatggccaacagaggcaaggacaccaacggcagccagttcttcatcaccaccaagcccaccccccacctggacggccaccacgtggtgttcggccaggtgatcagcggccaggaggtggtgagagagatcgagaaccagaagaccgacgccgccagcaagcccttcgccgaggtgagaatcctgagctgcggcgagctgatccccaagagcaaggtgaagaaggaggagaagaagagacacaagagcagcagcagcagcagcagcagcagcagcgacagcgacagcagcagcgacagccagagcagcagcgacagcagcgacagcgagagcgccaccgaggagaagagcaagaagagaaagaagaagcacagaaagaacagcagaaagcacaagaaggagaagaagaagagaaagaagagcaagaagagcgccagcagcgagagcgaggccgagaacctggaggcccagccccagagcaccgtgagacccgaggagatcccccccatccccgagaacagattcctgatgagaaagagcccccccaaggccgacgagaaggagagaaagaacagagagagagagagagagagagagtgcaacccccccaacagccagcccgccagctaccagagaagactgctggtgaccagaagcggcagaaagatcaagggcagaggccccagaagatacagaacccccagcagaagcagaagcagagacagattcagaagaagcgagacccccccccactggagacaggagatgcagagagcccagagaatgagagtgagcagcggcgagagatggatcaagggcgacaagagcgagctgaacgagatcaaggagaaccagagaagccccgtgagagtgaaggagagaaagatcaccgaccacagaaacgtgagcgagagccccaacagaaagaacgagaaggagaagaaggtgaaggaccacaagagcaacagcaaggagagagacatcagaagaaagaagaagaagaagaagaagaagtag

SEQ ID NO: 149615 - protein, 923 aa, Artificial Sequence
  derived and/or modified sequence
MAASTGYVRLWGAARCWVLRRPMLAAAGGRVPTAAGAWLLRGQRTCDASPPWALWGRGPAIGGSAGAGEGPVITALTPMTIPDVFPHLPLIAITRNPVFPRFIKIIEVKNKKLVELLRRKVRLAQPYVGVFLKRDDSNESDVVESLDEIYHTGTFAQIHEMQDLGDKLRMIVMGHRRVHISRQLEVEPEEPEAENKHKPRRKSKRGKKEAEDELSARHPAELAMEPTPELPAEVLMVEVENVVHEDFQVTEEVKALTAEIVKTIRDIIALNPLYRESVLQMMQAGQRVVDNPIYLSDMGAALTGAESHELQDVLEETNIPKRLYKALSLLKKEFELSKLQQRLGREVEEKIKQTHRKYLLQEQLKIIKKELGLEKDDKDAIEEKFRERLKELVVPKHVMDVVDEELSKLGLLDNHSSEFNVTRNYLDWLTSIPWGKYSNENLDLARAQAVLEEDHYGMEDVKKRILEFIAVSQLRGSTQGKILCFYGPPGVGKTSIARSIARALNREYFRFSVGGMTDVAEIKGHRRTYVGAMPGKIIQCLKKTKTENPLILIDEVDKIGRGYQGDPSSALLELLDPEQNANFLDHYLDVPVDLSKVLFICTANVTDTIPEPLRDRMEMINVSGYVAQEKLAIAERYLVPQARALCGLDESKAKLSSDVLTLLIKQYCRESGVRNLQKQVEKVLRKSAYKIVSGEAESVEVTPENLQDFVGKPVFTVERMYDVTPPGVVMGLAWTAMGGSTLFVETSLRRPQDKDAKGDKDGSLEVTGQLGEVMKESARIAYTFARAFLMQHAPANDYLVTSHIHLHVPEGATPKDGPSAGCTIVTALLSLAMGRPVRQNLAMTGEVSLTGKILPVGGIKEKTIAAKRAGVTCIVLPAENKKDFYDLAAFITEGLEVHFVEHYREIFDIAFPDEQAEALAVER

SEQ ID NO: 149616 - protein, 959 aa, Artificial Sequence
  derived and/or modified sequence
MAASTGYVRLWGAARCWVLRRPMLAAAGGRVPTAAGAWLLRGQRTCDASPPWALWGRGPAIGGQWRGFWEASSRGGGAFSGGEDASEGGAEEGAGGAGGSAGAGEGPVITALTPMTIPDVFPHLPLIAITRNPVFPRFIKIIEVKNKKLVELLRRKVRLAQPYVGVFLKRDDSNESDVVESLDEIYHTGTFAQIHEMQDLGDKLRMIVMGHRRVHISRQLEVEPEEPEAENKHKPRRKSKRGKKEAEDELSARHPAELAMEPTPELPAEVLMVEVENVVHEDFQVTEEVKALTAEIVKTIRDIIALNPLYRESVLQMMQAGQRVVDNPIYLSDMGAALTGAESHELQDVLEETNIPKRLYKALSLLKKEFELSKLQQRLGREVEEKIKQTHRKYLLQEQLKIIKKELGLEKDDKDAIEEKFRERLKELVVPKHVMDVVDEELSKLGLLDNHSSEFNVTRNYLDWLTSIPWGKYSNENLDLARAQAVLEEDHYGMEDVKKRILEFIAVSQLRGSTQGKILCFYGPPGVGKTSIARSIARALNREYFRFSVGGMTDVAEIKGHRRTYVGAMPGKIIQCLKKTKTENPLILIDEVDKIGRGYQGDPSSALLELLDPEQNANFLDHYLDVPVDLSKVLFICTANVTDTIPEPLRDRMEMINVSGYVAQEKLAIAERYLVPQARALCGLDESKAKLSSDVLTLLIKQYCRESGVRNLQKQVEKVLRKSAYKIVSGEAESVEVTPENLQDFVGKPVFTVERMYDVTPPGVVMGLAWTAMGGSTLFVETSLRRPQDKDAKGDKDGSLEVTGQLGEVMKESARIAYTFARAFLMQHAPANDYLVTSHIHLHVPEGATPKDGPSAGCTIVTALLSLAMGRPVRQNLAMTGEVSLTGKILPVGGIKEKTIAAKRAGVTCIVLPAENKKDFYDLAAFITEGLEVHFVEHYREIFDIAFPDEQAEALAVER

SEQ ID NO: 149617 - DNA, 2772 bp, Artificial Sequence
  derived and/or modified sequence
atggccgccagcaccggctacgtgagactgtggggcgccgccagatgctgggtgctgagaagacccatgctggccgccgccggcggcagagtgcccaccgccgccggcgcctggctgctgagaggccagagaacctgcgacgccagccccccctgggccctgtggggcagaggccccgccatcggcggcagcgccggcgccggcgagggccccgtgatcaccgccctgacccccatgaccatccccgacgtgttcccccacctgcccctgatcgccatcaccagaaaccccgtgttccccagattcatcaagatcatcgaggtgaagaacaagaagctggtggagctgctgagaagaaaggtgagactggcccagccctacgtgggcgtgttcctgaagagagacgacagcaacgagagcgacgtggtggagagcctggacgagatctaccacaccggcaccttcgcccagatccacgagatgcaggacctgggcgacaagctgagaatgatcgtgatgggccacagaagagtgcacatcagcagacagctggaggtggagcccgaggagcccgaggccgagaacaagcacaagcccagaagaaagagcaagagaggcaagaaggaggccgaggacgagctgagcgccagacaccccgccgagctggccatggagcccacccccgagctgcccgccgaggtgctgatggtggaggtggagaacgtggtgcacgaggacttccaggtgaccgaggaggtgaaggccctgaccgccgagatcgtgaagaccatcagagacatcatcgccctgaaccccctgtacagagagagcgtgctgcagatgatgcaggccggccagagagtggtggacaaccccatctacctgagcgacatgggcgccgccctgaccggcgccgagagccacgagctgcaggacgtgctggaggagaccaacatccccaagagactgtacaaggccctgagcctgctgaagaaggagttcgagctgagcaagctgcagcagagactgggcagagaggtggaggagaagatcaagcagacccacagaaagtacctgctgcaggagcagctgaagatcatcaagaaggagctgggcctggagaaggacgacaaggacgccatcgaggagaagttcagagagagactgaaggagctggtggtgcccaagcacgtgatggacgtggtggacgaggagctgagcaagctgggcctgctggacaaccacagcagcgagttcaacgtgaccagaaactacctggactggctgaccagcatcccctggggcaagtacagcaacgagaacctggacctggccagagcccaggccgtgctggaggaggaccactacggcatggaggacgtgaagaagagaatcctggagttcatcgccgtgagccagctgagaggcagcacccagggcaagatcctgtgcttctacggcccccccggcgtgggcaagaccagcatcgccagaagcatcgccagagccctgaacagagagtacttcagattcagcgtgggcggcatgaccgacgtggccgagatcaagggccacagaagaacctacgtgggcgccatgcccggcaagatcatccagtgcctgaagaagaccaagaccgagaaccccctgatcctgatcgacgaggtggacaagatcggcagaggctaccagggcgaccccagcagcgccctgctggagctgctggaccccgagcagaacgccaacttcctggaccactacctggacgtgcccgtggacctgagcaaggtgctgttcatctgcaccgccaacgtgaccgacaccatccccgagcccctgagagacagaatggagatgatcaacgtgagcggctacgtggcccaggagaagctggccatcgccgagagatacctggtgccccaggccagagccctgtgcggcctggacgagagcaaggccaagctgagcagcgacgtgctgaccctgctgatcaagcagtactgcagagagagcggcgtgagaaacctgcagaagcaggtggagaaggtgctgagaaagagcgcctacaagatcgtgagcggcgaggccgagagcgtggaggtgacccccgagaacctgcaggacttcgtgggcaagcccgtgttcaccgtggagagaatgtacgacgtgaccccccccggcgtggtgatgggcctggcctggaccgccatgggcggcagcaccctgttcgtggagaccagcctgagaagaccccaggacaaggacgccaagggcgacaaggacggcagcctggaggtgaccggccagctgggcgaggtgatgaaggagagcgccagaatcgcctacaccttcgccagagccttcctgatgcagcacgcccccgccaacgactacctggtgaccagccacatccacctgcacgtgcccgagggcgccacccccaaggacggccccagcgccggctgcaccatcgtgaccgccctgctgagcctggccatgggcagacccgtgagacagaacctggccatgaccggcgaggtgagcctgaccggcaagatcctgcccgtgggcggcatcaaggagaagaccatcgccgccaagagagccggcgtgacctgcatcgtgctgcccgccgagaacaagaaggacttctacgacctggccgccttcatcaccgagggcctggaggtgcacttcgtggagcactacagagagatcttcgacatcgccttccccgacgagcaggccgaggccctggccgtggagagatag

SEQ ID NO: 149618 - DNA, 2880 bp, Artificial Sequence
  derived and/or modified sequence
atggccgccagcaccggctacgtgagactgtggggcgccgccagatgctgggtgctgagaagacccatgctggccgccgccggcggcagagtgcccaccgccgccggcgcctggctgctgagaggccagagaacctgcgacgccagccccccctgggccctgtggggcagaggccccgccatcggcggccagtggagaggcttctgggaggccagcagcagaggcggcggcgccttcagcggcggcgaggacgccagcgagggcggcgccgaggagggcgccggcggcgccggcggcagcgccggcgccggcgagggccccgtgatcaccgccctgacccccatgaccatccccgacgtgttcccccacctgcccctgatcgccatcaccagaaaccccgtgttccccagattcatcaagatcatcgaggtgaagaacaagaagctggtggagctgctgagaagaaaggtgagactggcccagccctacgtgggcgtgttcctgaagagagacgacagcaacgagagcgacgtggtggagagcctggacgagatctaccacaccggcaccttcgcccagatccacgagatgcaggacctgggcgacaagctgagaatgatcgtgatgggccacagaagagtgcacatcagcagacagctggaggtggagcccgaggagcccgaggccgagaacaagcacaagcccagaagaaagagcaagagaggcaagaaggaggccgaggacgagctgagcgccagacaccccgccgagctggccatggagcccacccccgagctgcccgccgaggtgctgatggtggaggtggagaacgtggtgcacgaggacttccaggtgaccgaggaggtgaaggccctgaccgccgagatcgtgaagaccatcagagacatcatcgccctgaaccccctgtacagagagagcgtgctgcagatgatgcaggccggccagagagtggtggacaaccccatctacctgagcgacatgggcgccgccctgaccggcgccgagagccacgagctgcaggacgtgctggaggagaccaacatccccaagagactgtacaaggccctgagcctgctgaagaaggagttcgagctgagcaagctgcagcagagactgggcagagaggtggaggagaagatcaagcagacccacagaaagtacctgctgcaggagcagctgaagatcatcaagaaggagctgggcctggagaaggacgacaaggacgccatcgaggagaagttcagagagagactgaaggagctggtggtgcccaagcacgtgatggacgtggtggacgaggagctgagcaagctgggcctgctggacaaccacagcagcgagttcaacgtgaccagaaactacctggactggctgaccagcatcccctggggcaagtacagcaacgagaacctggacctggccagagcccaggccgtgctggaggaggaccactacggcatggaggacgtgaagaagagaatcctggagttcatcgccgtgagccagctgagaggcagcacccagggcaagatcctgtgcttctacggcccccccggcgtgggcaagaccagcatcgccagaagcatcgccagagccctgaacagagagtacttcagattcagcgtgggcggcatgaccgacgtggccgagatcaagggccacagaagaacctacgtgggcgccatgcccggcaagatcatccagtgcctgaagaagaccaagaccgagaaccccctgatcctgatcgacgaggtggacaagatcggcagaggctaccagggcgaccccagcagcgccctgctggagctgctggaccccgagcagaacgccaacttcctggaccactacctggacgtgcccgtggacctgagcaaggtgctgttcatctgcaccgccaacgtgaccgacaccatccccgagcccctgagagacagaatggagatgatcaacgtgagcggctacgtggcccaggagaagctggccatcgccgagagatacctggtgccccaggccagagccctgtgcggcctggacgagagcaaggccaagctgagcagcgacgtgctgaccctgctgatcaagcagtactgcagagagagcggcgtgagaaacctgcagaagcaggtggagaaggtgctgagaaagagcgcctacaagatcgtgagcggcgaggccgagagcgtggaggtgacccccgagaacctgcaggacttcgtgggcaagcccgtgttcaccgtggagagaatgtacgacgtgaccccccccggcgtggtgatgggcctggcctggaccgccatgggcggcagcaccctgttcgtggagaccagcctgagaagaccccaggacaaggacgccaagggcgacaaggacggcagcctggaggtgaccggccagctgggcgaggtgatgaaggagagcgccagaatcgcctacaccttcgccagagccttcctgatgcagcacgcccccgccaacgactacctggtgaccagccacatccacctgcacgtgcccgagggcgccacccccaaggacggccccagcgccggctgcaccatcgtgaccgccctgctgagcctggccatgggcagacccgtgagacagaacctggccatgaccggcgaggtgagcctgaccggcaagatcctgcccgtgggcggcatcaaggagaagaccatcgccgccaagagagccggcgtgacctgcatcgtgctgcccgccgagaacaagaaggacttctacgacctggccgccttcatcaccgagggcctggaggtgcacttcgtggagcactacagagagatcttcgacatcgccttccccgacgagcaggccgaggccctggccgtggagagatag

SEQ ID NO: 149619 - DNA, 2983 bp, Artificial Sequence
  derived and/or modified sequence
agtatggccgggctatggcggcgagcactggctacgtgcgactgtggggagcggcgcggtgctgggtgctgcggcggccgatgctggccgccgccggggggcgggttcccactgcagcaggagcgtggttgctccgaggccagcggacctgcgacgcctctcctccttgggcactgtggggccgaggcccggcaattgggggcagcgcgggcgccggggaaggcccggtcataacggcgctcacgcccatgacgatccccgatgtgtttccgcacctgccgctcatcgccatcacccgcaacccggtgttcccgcgctttatcaagattatcgaggttaaaaataagaagttggttgagctgctgagaaggaaagttcgtctcgcccagccttatgtcggcgtctttctaaagagagatgacagcaatgagtcggatgtggtcgagagcctggatgaaatctaccacacggggacgtttgcccagatccatgagatgcaggaccttggggacaagctgcgcatgatcgtcatgggacacagaagagtccatatcagcagacagctggaggtggagcccgaggagccggaggcggagaacaagcacaagccccgcaggaagtcaaagcggggcaagaaggaggcggaggacgagctgagcgccaggcacccggcggagctggcgatggagcccacccctgagctcccggctgaggtgctcatggtggaggtagagaacgttgtccacgaggacttccaggtcacggaggaggtgaaagccctgactgcagagatcgtgaagaccatccgggacatcattgccttgaaccctctctacagggagtcagtgctgcagatgatgcaggctggccagcgggtggtggacaaccccatctacctgagcgacatgggcgccgcgctcaccggggccgagtcccatgagctgcaggacgtcctggaagagaccaatattcctaagcggctgtacaaggccctctccctgctgaagaaggaatttgaactgagcaagctgcagcagcgcctggggcgggaggtggaggagaagatcaagcagacccaccgtaagtacctgctgcaggagcagctaaagatcatcaagaaggagctgggcctggagaaggacgacaaggatgccatcgaggagaagttccgggagcgcctgaaggagctcgtggtccccaagcacgtcatggatgttgtggacgaggagctgagcaagctgggcctgctggacaaccactcctcggagttcaatgtcacccgcaactacctagactggctcacgtccatcccttggggcaagtacagcaacgagaacctggacctggcgcgggcacaggcagtgctggaggaagaccactacggcatggaggacgtcaagaaacgcatcctggagttcattgccgttagccagctccgcggctccacccagggcaagatcctctgcttctatggcccccctggcgtgggtaagaccagcattgctcgctccatcgcccgcgccctgaaccgagagtacttccgcttcagcgtcgggggcatgactgacgtggctgagatcaagggccacaggcggacctacgtgggcgccatgcccgggaagatcatccagtgtttgaagaagaccaagacggagaaccccctgatcctcatcgacgaggtggacaagatcggccgaggctaccagggggacccgtcgtcggcactgctggagctgctggacccagagcagaatgccaacttcctggaccactacctggacgtgcccgtggacttgtccaaggtgctgttcatctgcacggccaacgtcacggacaccatccccgagccgctgcgagaccgtatggagatgatcaacgtgtcgggctacgtggcccaggagaagctggccattgcggagcgctacctggtgccccaggctcgcgccctgtgtggcttggatgagagcaaggccaagctgtcatcggacgtgctgacgctgctcatcaagcagtactgccgcgagagcggtgtccgcaacctgcagaagcaagtggagaaggtgttacggaaatcggcctacaagattgtcagcggcgaggccgagtccgtggaggtgacgcccgagaacctgcaggacttcgtggggaagcccgtgttcaccgtggagcgcatgtatgacgtgacaccgcccggcgtggtcatggggctggcctggaccgcaatgggaggctccacgctgtttgtggagacatccctgagacggccacaggacaaggatgccaagggtgacaaggatggcagcctggaggtgacaggccagctgggggaggtgatgaaggagagcgcccgcatagcctacaccttcgccagagccttcctcatgcagcacgcccccgccaatgactacctggtgacctcacacatccacctgcatgtgcccgagggcgccacccccaaggacggcccaagcgcaggctgcaccatcgtcacggccctgctgtccctggccatgggcaggcctgtccggcagaatctggccatgactggcgaagtctccctcacgggcaagatcctgcctgttggtggcatcaaggagaagaccattgcggccaagcgcgcaggggtgacgtgcatcgtcctgccagccgagaacaagaaggacttctacgacctggcagccttcatcaccgagggcctggaggtgcacttcgtggaacactaccgggagatcttcgacatcgccttcccggacgagcaggcagaggcgctggccgtggaacggtgacggccaccccgggactgcaggcggcggatgtcaggccctgtctgggccagaactgagcgctgtggggagcgcgcccggacctggcagtggagccaccgagcgagcagctcggtccagtgacccagatcccagggacctcagtcggcttaatcagagtgtggcatagaagctatttaatgattaaagtcatttgcagt

SEQ ID NO: 149620 - DNA, 2772 bp, Artificial Sequence
  derived and/or modified sequence
atggccgcctccaccgggtatgttcggctatggggtgccgcgcggtgttgggtactgaggaggcccatgctggcagcagcaggcggtcgggtcccaacagccgccggtgcttggttgctgagggggcaaagaacttgcgatgcaagccccccatgggctctgtgggggaggggccctgccatcggaggctccgctggcgccggggagggccccgtgatcaccgctctgacccccatgaccatccccgacgtcttcccacatcttcccctgattgcaatcacacggaatccagtcttcccccgattcatcaagatcatcgaggtgaagaataagaaactcgtggagctgctccggcggaaggttaggctggcgcaaccctacgtgggagtatttttgaaacgcgatgatagcaacgagtctgacgttgtggaaagtctcgacgaaatataccacaccggtacgttcgcacaaattcatgaaatgcaggatctcggcgacaaactgcgcatgatcgtgatgggacaccggcgggttcacatatccaggcagctagaagtggagccggaggaacccgaagccgaaaacaaacacaaaccaaggcgaaaatctaagcgaggtaagaaagaggccgaggacgagctcagcgctaggcatccagctgaacttgctatggagccgaccccagagctgcccgcggaggtgctgatggtggaagttgaaaatgtcgtgcacgaggatttccaagtcaccgaagaggtcaaggctctgaccgccgaaatcgtgaagactattagagacatcatcgccttgaaccctctctacagggaatctgttctgcaaatgatgcaggcaggccaaagagtggtcgacaatcctatctacctgagcgatatgggggccgctctcactggagctgaatcacatgagctccaagatgtgttggaggagacaaatatccccaaaaggctctataaagctctgagcctcctgaaaaaagaattcgaactgtcgaagctacagcagagactaggacgtgaagttgaggaaaaaataaagcagacacacaggaaatatctactgcaggaacagctcaaaataattaagaaagaattaggcctagagaaagacgacaaagacgccatagaagaaaagttcagagaacgcttgaaagaactcgttgtgccgaaacatgtcatggatgtggtggatgaagagcttagcaaacttggcctcctggataatcatagcagcgagtttaatgttacccgcaactaccttgactggctgactagtattccatggggaaaatactcaaacgagaatctggacttagcaagagctcaggccgtcctcgaggaggatcactacggcatggaggatgtcaaaaaaaggatcttggagtttatagcagtgtcccagctgaggggatcaactcaggggaagatcctgtgtttttatggcccccccggggttgggaaaacgtctatagctaggtccatagcacgagctctgaatagggagtatttccgattttcagtggggggcatgaccgacgtggccgaaataaagggacatcggagaacatatgtgggtgccatgcctggcaagattattcaatgcctaaaaaaaactaaaacagagaatccactgattttgatagacgaggtagataaaatcgggagggggtaccaaggcgacccttcaagcgccctgctggaactcctggatcctgaacagaacgcgaactttctggaccattacctggacgtgcccgtggacttatctaaggtgctgtttatttgcacagctaatgtgaccgatacaatcccggaaccgcttcgtgacaggatggaaatgattaacgtttccggttacgtggcccaagagaaactagcgatcgccgagcgctatctagttccccaggcacgggcactgtgcggactggatgagtctaaagcaaagctgagcagcgacgtgctgacgctgctcatcaagcagtattgtcgggaaagcggcgtgaggaatctgcaaaagcaagtggaaaaggtgctgagaaagagcgcctacaaaatcgtctcaggggaagcagagagtgtagaagtaaccccagagaacctgcaagactttgtgggcaaacctgtctttacagttgagcggatgtatgacgttacgccccccggtgtggtgatggggttagcatggaccgcaatgggaggatccactctcttcgtagaaacttcgttgagaagaccacaggataaggatgcaaagggagacaaggatggtagtctggaagtgaccggccaactcggtgaggtcatgaaggaaagcgcacgcatcgcttatacattcgccagagctttcctgatgcagcatgctccagccaacgactatttggtgactagccatatccacttgcatgtgccagaaggggctacaccaaaggacgggccctctgccggctgtactattgtgacagcactgctgagcctggctatggggagacccgtgaggcagaacctggctatgactggagaggtctctcttaccggcaaaatactgcccgtgggcggtatcaaggagaagactattgctgccaagcgcgcgggggtcacttgcatcgttcttccagctgaaaataagaaagacttctatgacctcgccgcctttatcacagaaggcctggaagtgcacttcgtcgagcactatcgcgagatttttgatattgcgtttccagacgaacaggctgaggccctagctgtcgagcggtag

SEQ ID NO: 149621 - DNA, 3111 bp, Artificial Sequence
  derived and/or modified sequence
gcgagttgtgtgagccgccagtatggccgggctatggcggcgagcactggctacgtgcgactgtggggagcggcgcggtgctgggtgctgcggcggccgatgctggccgccgccggggggcgggttcccactgcagcaggagcgtggttgctccgaggccagcggacctgcgacgcctctcctccttgggcactgtggggccgaggcccggcaattgggggccaatggcgggggttttgggaagcgagcagccgcggcggaggcgcattctcggggggcgaggacgcctccgagggcggcgcggaggaaggagccggcggcgcggggggcagcgcgggcgccggggaaggcccggtcataacggcgctcacgcccatgacgatccccgatgtgtttccgcacctgccgctcatcgccatcacccgcaacccggtgttcccgcgctttatcaagattatcgaggttaaaaataagaagttggttgagctgctgagaaggaaagttcgtctcgcccagccttatgtcggcgtctttctaaagagagatgacagcaatgagtcggatgtggtcgagagcctggatgaaatctaccacacggggacgtttgcccagatccatgagatgcaggaccttggggacaagctgcgcatgatcgtcatgggacacagaagagtccatatcagcagacagctggaggtggagcccgaggagccggaggcggagaacaagcacaagccccgcaggaagtcaaagcggggcaagaaggaggcggaggacgagctgagcgccaggcacccggcggagctggcgatggagcccacccctgagctcccggctgaggtgctcatggtggaggtagagaacgttgtccacgaggacttccaggtcacggaggaggtgaaagccctgactgcagagatcgtgaagaccatccgggacatcattgccttgaaccctctctacagggagtcagtgctgcagatgatgcaggctggccagcgggtggtggacaaccccatctacctgagcgacatgggcgccgcgctcaccggggccgagtcccatgagctgcaggacgtcctggaagagaccaatattcctaagcggctgtacaaggccctctccctgctgaagaaggaatttgaactgagcaagctgcagcagcgcctggggcgggaggtggaggagaagatcaagcagacccaccgtaagtacctgctgcaggagcagctaaagatcatcaagaaggagctgggcctggagaaggacgacaaggatgccatcgaggagaagttccgggagcgcctgaaggagctcgtggtccccaagcacgtcatggatgttgtggacgaggagctgagcaagctgggcctgctggacaaccactcctcggagttcaatgtcacccgcaactacctagactggctcacgtccatcccttggggcaagtacagcaacgagaacctggacctggcgcgggcacaggcagtgctggaggaagaccactacggcatggaggacgtcaagaaacgcatcctggagttcattgccgttagccagctccgcggctccacccagggcaagatcctctgcttctatggcccccctggcgtgggtaagaccagcattgctcgctccatcgcccgcgccctgaaccgagagtacttccgcttcagcgtcgggggcatgactgacgtggctgagatcaagggccacaggcggacctacgtgggcgccatgcccgggaagatcatccagtgtttgaagaagaccaagacggagaaccccctgatcctcatcgacgaggtggacaagatcggccgaggctaccagggggacccgtcgtcggcactgctggagctgctggacccagagcagaatgccaacttcctggaccactacctggacgtgcccgtggacttgtccaaggtgctgttcatctgcacggccaacgtcacggacaccatccccgagccgctgcgagaccgtatggagatgatcaacgtgtcgggctacgtggcccaggagaagctggccattgcggagcgctacctggtgccccaggctcgcgccctgtgtggcttggatgagagcaaggccaagctgtcatcggacgtgctgacgctgctcatcaagcagtactgccgcgagagcggtgtccgcaacctgcagaagcaagtggagaaggtgttacggaaatcggcctacaagattgtcagcggcgaggccgagtccgtggaggtgacgcccgagaacctgcaggacttcgtggggaagcccgtgttcaccgtggagcgcatgtatgacgtgacaccgcccggcgtggtcatggggctggcctggaccgcaatgggaggctccacgctgtttgtggagacatccctgagacggccacaggacaaggatgccaagggtgacaaggatggcagcctggaggtgacaggccagctgggggaggtgatgaaggagagcgcccgcatagcctacaccttcgccagagccttcctcatgcagcacgcccccgccaatgactacctggtgacctcacacatccacctgcatgtgcccgagggcgccacccccaaggacggcccaagcgcaggctgcaccatcgtcacggccctgctgtccctggccatgggcaggcctgtccggcagaatctggccatgactggcgaagtctccctcacgggcaagatcctgcctgttggtggcatcaaggagaagaccattgcggccaagcgcgcaggggtgacgtgcatcgtcctgccagccgagaacaagaaggacttctacgacctggcagccttcatcaccgagggcctggaggtgcacttcgtggaacactaccgggagatcttcgacatcgccttcccggacgagcaggcagaggcgctggccgtggaacggtgacggccaccccgggactgcaggcggcggatgtcaggccctgtctgggccagaactgagcgctgtggggagcgcgcccggacctggcagtggagccaccgagcgagcagctcggtccagtgacccagatcccagggacctcagtcggcttaatcagagtgtggcatagaagctatttaatgattaaagtcatttgcagta

SEQ ID NO: 149622 - DNA, 2880 bp, Artificial Sequence
  derived and/or modified sequence
atggccgcctctacaggctacgtgaggctctggggcgcggcccggtgctgggttctgaggagaccaatgctagccgccgccgggggccgggtacccacagccgctggcgcctggctgctcagaggccagcggacatgcgacgcctcacctccgtgggccttatggggtagagggcctgctatcggcggccagtggcgcggattctgggaggcgtcgtcacgaggcggtggcgcattttcagggggagaggatgcaagtgaaggtggggcggaggagggcgccggtggagccggtggctcggcaggggccggggagggcccagttataaccgcgctcactccgatgaccataccagacgtgtttccccatctgcctctcattgcaatcacccggaacccagtcttccctagattcattaagatcatcgaggtgaaaaacaaaaagctggtggaactcctcaggcgtaaagttaggttagctcagccgtatgtgggcgtttttctgaagcgcgatgattccaacgagtctgatgtggtggaaagcctggacgagatttaccatacgggcaccttcgctcaaatccacgaaatgcaagatctgggagacaagttgaggatgatcgttatgggccatagacgcgtacacatctcgcgacagcttgaggttgaaccagaagagcctgaggccgagaataaacataagcctcggaggaaatcaaagcgcgggaagaaggaggcggaagatgagctgagcgcccgtcacccagctgagttggcaatggagcccacccccgagttacccgccgaagtcctgatggtggaggtggaaaatgttgttcacgaagatttccaagtgacagaggaggtgaaagcattaacagccgagattgtcaagaccatccgcgatatcatcgccctgaaccctctctatcgggagtcagtgctgcagatgatgcaggctggccagcgtgtggtggacaacccaatctacctaagtgatatgggagctgctctgactggagccgaatcgcacgagttacaggatgtcctggaggagactaacattcctaaacggctgtataaagctttgagtctactgaaaaaagagtttgagctatcgaaactgcagcaacgtctaggacgcgaagtggaggagaaaatcaaacagacacacagaaagtatttgctgcaagaacagcttaagatcataaaaaaggaattgggcctcgagaaagatgacaaagatgccatagaggaaaaatttcgagaaagactgaaggaactggtagtgcctaaacacgttatggacgtagtcgacgaggagcttagtaagctgggcctccttgacaatcactcaagcgaatttaacgtcacccgtaactacctcgactggctcacctccatcccatggggtaaatactccaatgagaacctagacctagctagagcacaggccgttctggaggaagatcactatgggatggaggatgtcaaaaagagaatcctggagttcattgcggttagtcaactccgcggtagcactcagggcaaaattctgtgcttctacggtcccccaggcgtgggcaagactagcattgcacgcagcatcgcaagggccctgaaccgcgaatatttccgcttctcagtcgggggaatgactgacgtcgcggaaattaaaggccacaggagaacttatgttggagccatgcctggaaaaatcatacagtgtctcaagaaaaccaagacggagaatccactcattcttatagatgaggtcgataagatcggacggggttatcagggagacccttccagtgctttgctagagcttctagaccccgagcagaatgccaatttcctggatcattacctcgacgtgcccgtagacctgagcaaggtcctgttcatatgtaccgccaatgtaacagataccattcctgagcctctgcgagaccggatggagatgattaatgtgagtggctatgtggcacaggaaaagctggccattgcagagcggtacctggttccacaagccagggcactttgcggactggacgagagcaaggcgaaactatccagcgacgtccttacattgttaatcaagcagtattgcagggaaagcggggtcagaaacttgcaaaagcaggtggaaaaggtgcttcgcaagagtgcttacaaaattgtgtctggcgaagcggagagtgtagaggtcacgcccgaaaacctccaggattttgtcggcaaacccgtgtttactgtggagcgtatgtacgatgtgaccccaccaggcgtcgtaatgggccttgcatggactgccatgggggggtcaactttattcgtggaaacttccctacgacggcctcaggacaaggacgctaagggtgacaaggatggatccctggaggtgaccggccagctcggcgaggtcatgaaagagtcagcgcgaatcgcttacactttcgcccgagcttttttgatgcaacacgcgccggccaatgactacttggtgacaagccacatccatctgcacgtgccggaaggcgccacaccaaaggacggaccctcagcggggtgtacgatcgtcacagcccttttatctctcgccatgggccgccctgtccgtcagaatctcgccatgacgggagaagtgtcactgaccggtaagatactgcctgttgggggtatcaaagaaaagacaattgccgctaagagagccggcgtgacttgcatagtgttgcccgccgagaacaagaaggatttttacgatcttgccgccttcatcactgagggcctcgaggtgcatttcgtggagcattaccgggagatctttgacattgccttcccagacgagcaggccgaggctctcgcagtagaacggtag

SEQ ID NO: 149623 - DNA, 2772 bp, Artificial Sequence
  derived and/or modified sequence
atggccgccagcacaggctacgtgcggctgtggggcgccgcccgctgctgggtgctgcggcggcccatgctggccgctgctgggggccgggtgcccacagctgctggggcctggctgctgcggggccagaggacctgtgatgccagccccccctgggccctgtggggccggggccctgccatcggcggcagcgctggagctggggagggccctgtgatcacagccctgacccccatgaccatcccagatgtgttcccccacctgcccctgattgccatcaccagaaatcctgtgttcccccgcttcatcaagatcatcgaggtgaagaacaagaagctggtggagctgctgcggaggaaggtgcggctggcccagccctacgtgggcgtcttcctgaagagagatgacagcaatgaaagtgatgtggtggagagcctggatgagatctaccacacaggcacctttgcccagatccacgagatgcaggacctgggggacaagctgaggatgattgtgatgggccaccggcgggtgcacatcagccggcagctggaggtggagcctgaggagcctgaggccgagaacaagcacaagcccaggaggaagagcaagaggggcaagaaggaggctgaagatgagctgagcgcccggcaccctgctgagctggccatggagcccaccccagagctgcctgctgaggtgctgatggtggaggtggagaatgtggtgcatgaggacttccaggtgacagaggaggtgaaggccctgacagctgagatcgtgaagaccatccgggacatcatcgccctgaaccccctgtaccgggagagcgtgctgcagatgatgcaggccggccagagggtggtggacaaccccatctacctgagtgacatgggcgccgccctgactggagctgagagccatgagctgcaggatgtgctggaggagaccaacatccccaagaggctgtacaaggccctgagcctgctgaagaaggagtttgagctgagcaagctgcagcagaggctgggccgggaggtggaggagaagatcaagcagacccacaggaagtacctgctgcaggagcagctgaagatcatcaagaaggagctgggcctggagaaggatgacaaggatgccatcgaggagaagttccgggagcggctgaaggagctggtggtgcccaagcacgtgatggatgtggtggatgaggagctgagcaagctgggcctgctggacaaccacagcagcgagttcaacgtgaccaggaactacctggactggctgaccagcatcccctggggcaagtacagcaatgaaaacctggacctggcccgggcccaggccgtgctggaggaggaccactacggcatggaggatgtgaagaagaggatcctggagttcatcgctgtgtcccagctgcggggcagcacccagggcaagatcctgtgcttctacggccccccaggagtgggcaagaccagcatcgcccggagcatcgcccgggccctgaaccgggagtacttccgcttctctgtgggcggcatgacagatgtggccgagatcaagggccacaggaggacctacgtgggcgccatgcctgggaagatcatccagtgcctgaagaagaccaagacagagaaccccctcatcctgattgatgaggtggacaagattggccggggctaccagggcgaccccagcagcgccctgctggagctgctggaccctgagcagaatgccaacttcctggaccactacctggatgtgcctgtggacctgagcaaggtgctcttcatctgcacagccaacgtgacagacaccatccctgagcccctgcgggacaggatggagatgatcaacgtgtctggctacgtggcccaggagaagctggccatcgccgagcgctacctggtgccccaggcccgggccctgtgtggcctggatgagagcaaggccaagctgagcagtgatgtgctgaccctgctgatcaagcagtactgccgggagagcggcgtgaggaacctgcagaagcaggtggagaaggtgctgaggaagagcgcctacaagatcgtgtctggagaggccgagagcgtggaggtgaccccagagaacctgcaggactttgtgggcaagcctgtgttcaccgtggagaggatgtatgatgtgaccccacctggggtggtgatgggcctggcctggacagccatgggcggcagcaccctgtttgtggagaccagcctgcggcggccccaggacaaggatgccaagggggacaaggatggcagcctggaggtgacaggccagctgggggaggtgatgaaggagagcgcccgcatcgcctacacctttgcccgggccttcctgatgcagcacgccccagccaatgactacctggtgaccagccacatccacctgcacgtgcctgagggcgccacccccaaggatggccccagcgctggctgcaccatcgtgacagccctgctgagcctggccatgggccggcctgtgcggcagaacctggccatgaccggggaggtgtccctgaccgggaagatcctgcctgtgggcggcatcaaggagaagaccatcgccgccaagagagctggggtgacctgcatcgtgctgcctgctgagaacaagaaggacttctatgacctggccgccttcatcacagagggcctggaggtgcactttgtggagcactaccgggagatctttgatattgccttcccagatgagcaggccgaggccctggccgtggagaggtag

SEQ ID NO: 149624 - DNA, 2880 bp, Artificial Sequence
  derived and/or modified sequence
atggccgccagcacaggctacgtgcggctgtggggcgccgcccgctgctgggtgctgcggcggcccatgctggccgctgctgggggccgggtgcccacagctgctggggcctggctgctgcggggccagaggacctgtgatgccagccccccctgggccctgtggggccggggccctgccatcggcggccagtggaggggcttctgggaggccagcagcagaggaggaggagccttctctggaggagaagatgccagcgagggcggcgctgaggagggcgctgggggcgccggcggcagcgctggagctggggagggccctgtgatcacagccctgacccccatgaccatcccagatgtgttcccccacctgcccctgattgccatcaccagaaatcctgtgttcccccgcttcatcaagatcatcgaggtgaagaacaagaagctggtggagctgctgcggaggaaggtgcggctggcccagccctacgtgggcgtcttcctgaagagagatgacagcaatgaaagtgatgtggtggagagcctggatgagatctaccacacaggcacctttgcccagatccacgagatgcaggacctgggggacaagctgaggatgattgtgatgggccaccggcgggtgcacatcagccggcagctggaggtggagcctgaggagcctgaggccgagaacaagcacaagcccaggaggaagagcaagaggggcaagaaggaggctgaagatgagctgagcgcccggcaccctgctgagctggccatggagcccaccccagagctgcctgctgaggtgctgatggtggaggtggagaatgtggtgcatgaggacttccaggtgacagaggaggtgaaggccctgacagctgagatcgtgaagaccatccgggacatcatcgccctgaaccccctgtaccgggagagcgtgctgcagatgatgcaggccggccagagggtggtggacaaccccatctacctgagtgacatgggcgccgccctgactggagctgagagccatgagctgcaggatgtgctggaggagaccaacatccccaagaggctgtacaaggccctgagcctgctgaagaaggagtttgagctgagcaagctgcagcagaggctgggccgggaggtggaggagaagatcaagcagacccacaggaagtacctgctgcaggagcagctgaagatcatcaagaaggagctgggcctggagaaggatgacaaggatgccatcgaggagaagttccgggagcggctgaaggagctggtggtgcccaagcacgtgatggatgtggtggatgaggagctgagcaagctgggcctgctggacaaccacagcagcgagttcaacgtgaccaggaactacctggactggctgaccagcatcccctggggcaagtacagcaatgaaaacctggacctggcccgggcccaggccgtgctggaggaggaccactacggcatggaggatgtgaagaagaggatcctggagttcatcgctgtgtcccagctgcggggcagcacccagggcaagatcctgtgcttctacggccccccaggagtgggcaagaccagcatcgcccggagcatcgcccgggccctgaaccgggagtacttccgcttctctgtgggcggcatgacagatgtggccgagatcaagggccacaggaggacctacgtgggcgccatgcctgggaagatcatccagtgcctgaagaagaccaagacagagaaccccctcatcctgattgatgaggtggacaagattggccggggctaccagggcgaccccagcagcgccctgctggagctgctggaccctgagcagaatgccaacttcctggaccactacctggatgtgcctgtggacctgagcaaggtgctcttcatctgcacagccaacgtgacagacaccatccctgagcccctgcgggacaggatggagatgatcaacgtgtctggctacgtggcccaggagaagctggccatcgccgagcgctacctggtgccccaggcccgggccctgtgtggcctggatgagagcaaggccaagctgagcagtgatgtgctgaccctgctgatcaagcagtactgccgggagagcggcgtgaggaacctgcagaagcaggtggagaaggtgctgaggaagagcgcctacaagatcgtgtctggagaggccgagagcgtggaggtgaccccagagaacctgcaggactttgtgggcaagcctgtgttcaccgtggagaggatgtatgatgtgaccccacctggggtggtgatgggcctggcctggacagccatgggcggcagcaccctgtttgtggagaccagcctgcggcggccccaggacaaggatgccaagggggacaaggatggcagcctggaggtgacaggccagctgggggaggtgatgaaggagagcgcccgcatcgcctacacctttgcccgggccttcctgatgcagcacgccccagccaatgactacctggtgaccagccacatccacctgcacgtgcctgagggcgccacccccaaggatggccccagcgctggctgcaccatcgtgacagccctgctgagcctggccatgggccggcctgtgcggcagaacctggccatgaccggggaggtgtccctgaccgggaagatcctgcctgtgggcggcatcaaggagaagaccatcgccgccaagagagctggggtgacctgcatcgtgctgcctgctgagaacaagaaggacttctatgacctggccgccttcatcacagagggcctggaggtgcactttgtggagcactaccgggagatctttgatattgccttcccagatgagcaggccgaggccctggccgtggagaggtag

SEQ ID NO: 149625 - DNA, 2772 bp, Artificial Sequence
  derived and/or modified sequence
atggccgccagcaccggctacgtgcggctgtggggcgccgcccggtgttgggtgcttcgtcgaccaatgctggcggctgcgggcggccgtgtcccgaccgcagcgggagcttggctattgcgaggacagcgcacatgcgacgcttctcccccttgggccctctggggccgcggcccagctatcggcgggagcgctggtgctggagagggcccagtgatcaccgcacttacacccatgacaattccggacgtgtttccacacttaccgctgatcgctataacccggaaccctgtgttccccagatttatcaagataattgaagtaaagaacaagaaactggttgaattgttacgccggaaggtccggctcgcgcaaccctacgtgggcgtgtttctcaaacgcgatgactcgaacgaatcagatgtagtagagtctctggatgagatctaccacaccggtactttcgcccaaatccatgagatgcaggacctcggcgacaagttgcgaatgatcgtgatgggtcatcgccgagttcatatctcacgacaactggaagtggagcctgaagagccggaggcagaaaataagcacaagccaagaaggaagagtaagcgcggaaagaaggaggccgaggacgagctttctgctcgccatccagctgaattagccatggagcccacccctgagctcccagccgaggtgcttatggtcgaggtagaaaacgtcgtgcatgaggacttccaggtgacagaagaggtcaaggctctgactgccgagatcgtcaaaaccatccgcgatatcatagccctgaaccctctgtacagagaatctgtgctccagatgatgcaagccggccagcgcgttgtggacaatcctatctacctttccgacatgggcgcggctcttaccggcgctgagtcccacgagttacaggacgtattggaggagactaacatccctaaacgcctctataaagccctgagtctgctcaagaaagagttcgagcttagtaaacttcaacagagactaggtagggaggtggaggagaaaattaagcagacccatcggaaatacttactgcaagagcagctcaagatcatcaaaaaggagctcggcctggagaaggacgataaggatgctatcgaggaaaagtttcgtgaacggctgaaagaactggtcgttccaaagcatgtgatggatgtggtggatgaggagctgagcaagcttggattgctggacaaccactcatccgagtttaacgtaacccggaactacctggactggctaactagtataccctggggtaagtatagtaacgagaacttggacctggccagagcccaggcagttctggaagaggaccattacggcatggaggacgtaaagaaaagaatcttagagtttatcgcggtgtctcagctgcgggggtcaactcagggcaaaatcctatgcttctacggtccccccggcgtaggcaagacctcgatcgccaggagcattgcgcgtgccctgaatcgtgaatacttcaggttttcagtaggagggatgactgacgtggcagagataaaggggcaccgacgcacctacgttggtgccatgcctgggaaaattatccagtgccttaagaagaccaagactgagaatccactgattttgatcgacgaggtcgacaaaatcgggaggggctaccagggtgacccctcttctgctctccttgaactgctggaccctgagcagaatgccaatttcctcgaccattacctggacgtgcctgtggacctgagcaaggtcttgttcatttgcacggccaatgtgactgataccatccccgagcctctaagggatcgaatggaaatgatcaacgtttctggttatgtggcccaggaaaaactggccatagccgaaaggtacctggtgcctcaagcccgggctctgtgtggcctggacgagagcaaagccaagctctcctccgacgtgctgaccctgcttatcaagcaatactgccgagagagtggggttcggaatctgcagaaacaggtcgagaaggtactgcggaaaagcgcgtacaagatagtgtcgggtgaggccgagagcgttgaagtaactccagaaaacctccaggattttgtgggcaagcccgtatttactgttgagcgcatgtatgacgttactcctccaggcgtggtcatgggactggcttggacagccatgggagggtctacattattcgtcgagacaagcctgcgaaggccccaggataaggatgccaagggcgacaaagacggtagtctcgaagttactggacagctcggtgaggtgatgaaggaatctgcaaggatcgcctatacctttgcccgcgcattcctcatgcagcacgctccggccaatgattaccttgtcacttcgcacatccacctgcatgttccagagggtgcgactcccaaggatggaccttctgccggatgtacgattgttactgcattgctaagccttgcaatgggccgaccagtaaggcagaacctggctatgacaggtgaggtttccctgaccggaaagatcctccccgtcggagggattaaagagaagaccatagctgctaaaagggcaggcgtcacgtgcattgtcctcccagcagagaataaaaaggacttttacgatctggctgctttcattacggaaggacttgaggtccactttgtcgaacattaccgggaaattttcgacatcgccttcccggatgagcaggcagaggccctggctgttgaaaggtag

SEQ ID NO: 149626 - DNA, 2880 bp, Artificial Sequence
  derived and/or modified sequence
atggccgccagcaccggctacgtgcggctgtggggcgccgcccggtgctgggtgctgcggagacctatgctggccgccgccgggggacgtgtgccaaccgcggccggcgcctggctcttgcggggccagcggacctgcgatgccagtccaccttgggccctttggggcagggggcctgctatcggcggccagtggaggggattttgggaggccagttcacgcggagggggggccttctcgggaggcgaagatgcatctgagggcggcgctgaagaaggggcgggtggagctgggggttcagccggggcaggcgaaggccccgtcatcacagccctaactccaatgacaattccagacgttttcccccatctcccacttatcgctattactcgaaatccagtcttcccccggttcattaagatcatcgaggtaaaaaataagaagctggttgaacttctaagacgcaaggtgaggctcgcccagccatatgtgggagttttcctgaagcgtgacgactccaatgaaagcgatgtggtcgagagtctggacgaaatataccacaccgggacctttgcacagatccatgagatgcaggatcttggcgacaaactgcgcatgatcgtgatgggccaccgacgggtgcatatatccaggcaactcgaagtggaaccagaggagccggaggcagagaacaagcacaaaccacgtaggaagagtaagcgcggtaagaaagaggccgaggacgagctgtccgcacgacacccagcagagctcgccatggagcctacaccagagttgccagcggaagttctcatggtggaagtcgagaatgtggtccatgaagactttcaggtgacggaggaggtcaaagcccttactgccgagattgtcaagacaatcagggatatcatcgcactgaatccactttatagagaatctgtgttgcagatgatgcaggctggccagcgggtggtggacaaccctatatacctaagcgatatgggagcagctttaaccggagctgaatctcacgagctgcaggatgtgctcgaagaaacaaatatcccgaaaaggctgtacaaggcactcagcttgttgaagaaagagtttgaactttctaagctgcagcaaagactggggcgagaagtggaggagaagattaagcagacacatcggaaatacctacttcaggagcaactgaagatcattaagaaggaacttggactggaaaaggacgataaggatgccatcgaggaaaagttccgggagcgcttgaaggaactcgttgtccccaagcatgtgatggatgtcgtagacgaagagctatccaagctaggtctgctagacaatcactccagtgaatttaatgttactcggaattatctggattggctgacctcaatcccatgggggaaatacagtaacgagaatctggacctcgccagggcgcaggcggtattggaggaggatcactatgggatggaggacgtgaagaagcgcatcctcgaattcatcgcagtgtctcagcttcggggatcgacccagggtaaaattctgtgcttttatggaccccctggcgttggcaagaccagcatcgcgcgcagtatcgctagagcgctgaatcgagagtactttcgattcagtgtcggtggcatgactgacgtcgctgaaatcaagggccaccggagaacttacgtgggagccatgccaggtaaaattatccagtgtctaaaaaaaacaaaaaccgagaacccactgatcctcattgacgaagtggataagatcggaaggggttatcaaggagatccttcaagcgcccttctcgaacttctggatcccgagcagaacgccaacttcctggatcattacttggacgtgcccgtggatctgtcgaaagtgcttttcatatgtaccgcgaatgtgacagataccattccagaacctctgcgtgatcggatggagatgattaacgtgagtggatatgtggcccaggaaaagctggccatcgctgagagatatttggtgcctcaggcaagagcgctctgcggcctggacgagtcaaaggccaaactctcttccgacgtgcttacgctcctgattaagcagtactgtcgggagtctggagtgaggaatctccagaagcaggtggagaaggtactcaggaaatctgcctacaagatcgtctcaggcgaagcagagtccgttgaggtgaccccagaaaatctgcaggatttcgttggcaagcccgtctttactgtggagaggatgtatgatgtgaccccgcccggtgtggtcatggggctcgcctggacagctatggggggaagcactttgttcgtggaaacctcattgcgtagaccccaggataaggatgctaaaggcgacaaagatggatccctggaggttacaggacagctgggtgaagtcatgaaggaatccgcccgaatagcatatacattcgcacgtgcattccttatgcagcacgcgccagcaaacgactacctcgttactagtcacattcacctgcacgttcccgagggtgccactcccaaagatggaccaagtgctgggtgcacaattgttacggcgctgctgtctcttgccatgggcaggcccgtacggcagaaccttgcgatgacaggagaagtttcactgaccggcaaaattcttcctgtaggcggcattaaggaaaaaaccattgcagctaaacgggcaggcgtgacttgtatcgttctcccagctgagaataagaaagacttttacgacctcgctgcgtttatcactgagggattggaggtgcacttcgtcgaacactacagagagattttcgacatagcgttccccgacgagcaggctgaggctctagcagtggaaagatag

SEQ ID NO: 149627 - DNA, 2772 bp, Artificial Sequence
  derived and/or modified sequence
atggccgcttctacggggtatgttagattgtggggagccgcacgatgctgggtgctgagacggcctatgctggcagccgcaggaggccgagtaccgacggccgctggcgcttggcttcttagagggcaaagaacctgtgacgccagtccaccatgggctttgtggggacggggtccagccattgggggaagtgccggagccggtgaggggcctgtgattacggctctgactcctatgacaatcccagacgtctttccgcacttacccttgatcgccatcacccgcaatcctgtctttccccgttttattaaaataattgaagtgaagaataagaaactcgtagaacttctgcggcgtaaggtccggttagcccaaccttacgtgggggtattcctgaagagggacgacagcaatgagtccgacgttgttgagagcctagatgagatttatcacacaggaacatttgcccagatacacgaaatgcaagatctcggagataaacttcgaatgatcgtgatgggacataggagagtgcatattagtcggcaattggaagtcgaacctgaggagccagaagctgaaaacaaacacaagcccaggcgaaagtccaagagaggaaagaaagaagcggaggatgaactatccgccaggcatccagccgagctggccatggagcccacgcccgagctgccggctgaagtgctgatggtggaggtcgaaaacgtggttcatgaggatttccaagttactgaagaagttaaggcgctgaccgctgaaattgtgaaaacaattcgcgatattattgcactgaatccactatacagagagtctgtgctgcagatgatgcaagcaggacagcgtgtcgtggataaccctatctatctgtcagacatgggtgcagccctaacgggtgccgaatctcacgaactacaggacgtcctcgaagagactaacatcccgaagagattgtacaaggcactgtccctgctcaagaaggaatttgagcttagtaagcttcagcagagactagggcgagaggtcgaagaaaagatcaaacagacgcatcggaagtacctcctgcaggagcagttgaagattatcaaaaaggagctgggcttggagaaagacgataaagacgcgatcgaggaaaagttcagggagagactaaaagagctggttgtgcctaaacacgtgatggatgtggtcgacgaagaactgtctaagcttggcttactggataaccacagttctgagttcaatgtgactcggaactatttagattggctgacaagtataccttggggtaagtattccaatgagaatctcgacctggcccgagctcaggccgtgcttgaggaagatcactacggtatggaagacgtgaagaaacgtatcctggagtttatcgccgtgtcacagctgagggggagcacacagggaaagatactctgtttttacgggccacctggtgtaggaaaaacctccatagcaaggtctattgccagagcactcaatagagagtattttcgattttcagtcggcggtatgactgacgtggcggaaattaaggggcatcggaggacatatgtcggtgcgatgcccggtaagatcatccagtgcttaaagaaaaccaagacagagaatcccttaatactgatagacgaggttgacaagatcgggaggggctaccagggcgaccccagcagtgccctcctcgagcttctcgatcctgagcagaacgccaactttcttgatcattatttggatgtgccagtagacctgagcaaggtgctatttatctgcactgctaacgtgaccgacacgatccctgagcccctgcgcgatcggatggagatgataaacgtttccggctacgtggcccaagaaaagctggccattgccgagagatacctggtcccacaggccagagctctctgtggattggatgaatctaaagcaaagttgtcgtcagatgtgctaacattgctgatcaagcagtactgtagggagtctggcgtacggaatctgcaaaaacaggtcgagaaagtgttgaggaaaagtgcttataagatcgtttcaggagaagccgagtctgtcgaagtgacccccgaaaacttacaagattttgtggggaagcccgtgttcacggttgaacgtatgtacgatgtgactcctcccggagtggttatgggactcgcttggacggctatgggcggtagcactttgttcgtagaaacaagcctgagaaggccacaggacaaagacgctaagggcgataaggatggttctctcgaagtgacaggccagctgggagaagtaatgaaggagagcgccaggattgcttatacctttgcgcgtgcgtttctgatgcagcacgcacccgctaatgactatcttgttaccagccacatccacttgcacgtgcctgagggcgctacaccgaaagacggcccttcggccggatgtaccatagtgacggcgctactgagcctagcaatgggtaggccagtccggcagaatctggccatgaccggggaagtgtcactgaccggaaagatcctgccagtgggcggaattaaggaaaagacgatcgcagccaaacgagccggagtcacttgtatagtcctgcccgcagagaacaagaaagacttttacgacttggcagcctttataacagaagggcttgaggtgcattttgtggagcactaccgggagatttttgacatcgcttttccagacgaacaagccgaggccctggctgtggagaggtag

SEQ ID NO: 149628 - DNA, 2880 bp, Artificial Sequence
  derived and/or modified sequence
atggccgctagcacaggatatgtcagactttggggggcagccagatgctgggtgttgcgtcgcccaatgctagccgctgctggtggaagggtgcctaccgcagccggagcatggctactgcggggacagcggacctgtgatgccagcccgccatgggcactgtgggggcgaggccctgctataggcggtcaatggcgcggtttttgggaagcgagttccaggggcggaggtgccttttctggtggggaggacgccagcgaaggcggagccgaagaaggtgccggaggcgcaggaggttccgccggagccggtgaagggcctgtcataaccgcgctcactcccatgaccatacccgatgtgtttccgcacctgcccctcatagcgatcacccggaatccagtgtttcccaggtttatcaaaattattgaggtaaaaaataaaaaacttgtggagctgcttcgaagaaaagtcagattagcccagccttatgttggcgtgtttttaaaacgggacgactccaatgagtctgatgtggtggagtccctcgacgagatttatcacacgggcacattcgcccaaattcacgaaatgcaggacttgggtgataaactgcgcatgatcgtgatgggccatcggagggtacatatctctcggcagctggaggttgagcccgaggagccggaggccgaaaacaagcacaagccaagacgcaaatccaagcggggaaagaaagaggccgaagatgagttgagcgctcgtcatcccgcagagctggcgatggagcccacacccgaactgcccgcagaggttctgatggtggaagtggaaaacgtggtccacgaggatttccaggtgacagaggaggttaaagccctcacagctgagatcgtaaaaaccatccgcgatataatagctctcaacccactgtacagggagtctgtgctgcaaatgatgcaggcaggtcagcgtgtggtggacaatcctatttatcttagtgatatgggggcagcccttacaggggcagaaagccacgaacttcaggatgtgctcgaagagactaacattcccaagaggttatacaaagcattgtccctgttgaagaaggagtttgagctgtccaagctgcaacagcgtctggggagggaagtggaggagaaaatcaagcagacgcatagaaaatacctcttgcaggagcagctgaaaatcataaaaaaggaactggggttagagaaggatgataaggacgccatcgaggagaaattccgggaacggcttaaagagcttgtggtgcccaagcacgtgatggacgtagtcgacgaagagctgagtaaactgggcctgctggacaaccattcgtctgagtttaatgttacgagaaattatttggattggctcacttccattccctggggtaaatattcaaacgaaaaccttgacctcgcaagagctcaagctgtgctggaagaagatcactatggcatggaggatgtgaagaagcgtatacttgagttcatcgcagtttcacagctgaggggctctacacagggcaagatcctttgcttctatgggccaccaggggtgggcaagacttccatcgctcgttccattgccagggcgctgaatcgggaatattttcgatttagtgtggggggaatgacagatgtagcggagatcaaagggcaccggaggacgtacgtcggcgcaatgccgggaaagattatccagtgtctgaagaagactaagacagaaaatcctctaattcttattgacgaagtcgataaaattggcagaggctaccagggtgatccctcgtctgccttactggagcttcttgatcctgagcagaatgccaactttcttgatcactatctagatgtgcctgtggatctcagcaaggtcctttttatctgcacagcgaatgtgacagacacaatccccgagccactccgcgacaggatggagatgatcaatgtatcaggctatgtagcccaggagaaactggccatcgctgaacgctatcttgtgcctcaggccagagccctgtgcggcctggacgagtcaaaggccaaactctcctccgacgttctgacgctcctgatcaagcagtactgcagagaaagtggagtgcggaacttgcaaaagcaggttgaaaaagtgttgagaaagagtgcttataagatcgtgagtggcgaggccgaatctgtcgaggtgactcccgagaatctccaggactttgttggaaagcccgtgttcaccgtggaacgtatgtacgacgtgaccccacccggagtagtcatgggtctcgcatggaccgctatgggcggttccactctcttcgtagaaacatcattgcggcgaccccaggataaagacgctaaaggagataaggatgggtctcttgaggttaccggccagctcggggaggttatgaaagagagcgctcgtatcgcctacacctttgcccgagcgttccttatgcagcatgcccctgctaacgattatctggtaacctcgcatatccatctacatgttcccgagggcgcaacacctaaagatgggccaagtgctgggtgtactatcgtgaccgcccttctgagcttggccatgggccgacctgtgaggcagaacctggccatgacaggggaggtttccctcaccggtaagattctgcctgtcggtggtataaaggagaaaaccatcgccgctaaacgggctggagttacctgtatcgtgctgcctgctgaaaacaagaaagacttttatgaccttgcagcctttattactgagggcctcgaggtgcactttgttgaacactatagagaaatctttgacatcgcctttccagacgaacaggccgaggcccttgccgtggaaagatag

SEQ ID NO: 149629 - protein, 1012 aa, Artificial Sequence
  derived and/or modified sequence
MPASAPPRRPRPPPPSLSLLLVLLGLGGRRLRAEPGDGAQTWARFSRPPAPEAAGLFQGTFPDGFLWAVGSAAYQTEGGWQQHGKGASIWDTFTHHPLAPPGDSRNASLPLGAPSPLQPATGDVASDSYNNVFRDTEALRELGVTHYRFSISWARVLPNGSAGVPNREGLRYYRRLLERLRELGVQPVVTLYHWDLPQRLQDAYGGWANRALADHFRDYAELCFRHFGGQVKYWITIDNPYVVAWHGYATGRLAPGIRGSPRLGYLVAHNLLLAHAKVWHLYNTSFRPTQGGQVSIALSSHWINPRRMTDHSIKECQKSLDFVLGWFAKPVFIDGDYPESMKNNLSSILPDFTESEKKFIKGTADFFALCFGPTLSFQLLDPHMKFRQLESPNLRQLLSWIDLEFNHPQIFIVENGWFVSGTTKRDDAKYMYYLKKFIMETLKAIKLDGVDVIGYTAWSLMDGFEWHRGYSIRRGLFYVDFLSQDKMLLPKSSALFYQKLIEKNGFPPLPENQPLEGTFPCDFAWGVVDNYIQVDTTLSQFTDLNVYLWDVHHSKRLIKVDGVVTKKRKSYCVDFAAIQPQIALLQEMHVTHFRFSLDWALILPLGNQSQVNHTILQYYRCMASELVRVNITPVVALWQPMAPNQGLPRLLARQGAWENPYTALAFAEYARLCFQELGHHVKLWITMNEPYTRNMTYSAGHNLLKAHALAWHVYNEKFRHAQNGKISIALQADWIEPACPFSQKDKEVAERVLEFDIGWLAEPIFGSGDYPWVMRDWLNQRNNFLLPYFTEDEKKLIQGTFDFLALSHYTTILVDSEKEDPIKYNDYLEVQEMTDITWLNSPSQVAVVPWGLRKVLNWLKFKYGDLPMYIISNGIDDGLHAEDDQLRVYYMQNYINEALKAHILDGINLCGYFAYSFNDRTAPRFGLYRYAADQFEPKASMKHYRKIIDSNGFPGPETLERFCPEEFTVCTECSFFHTRKSLLAFIAFLFFASIISLSLIFYYSKKGRRSYK

SEQ ID NO: 149630 - DNA, 3036 bp, Artificial Sequence
  derived and/or modified sequence
atgcccgccagcgcccccccccgccgcccccgcccccccccccccagcctgagcctgctgctggtgctgctgggcctgggcggccgccgcctgcgcgccgagcccggcgacggcgcccagacctgggcccgcttcagccgcccccccgcccccgaggccgccggcctgttccagggcaccttccccgacggcttcctgtgggccgtgggcagcgccgcctaccagaccgagggcggctggcagcagcacggcaagggcgccagcatctgggacaccttcacccaccaccccctggccccccccggcgacagccgcaacgccagcctgcccctgggcgcccccagccccctgcagcccgccaccggcgacgtggccagcgacagctacaacaacgtgttccgcgacaccgaggccctgcgcgagctgggcgtgacccactaccgcttcagcatcagctgggcccgcgtgctgcccaacggcagcgccggcgtgcccaaccgcgagggcctgcgctactaccgccgcctgctggagcgcctgcgcgagctgggcgtgcagcccgtggtgaccctgtaccactgggacctgccccagcgcctgcaggacgcctacggcggctgggccaaccgcgccctggccgaccacttccgcgactacgccgagctgtgcttccgccacttcggcggccaggtgaagtactggatcaccatcgacaacccctacgtggtggcctggcacggctacgccaccggccgcctggcccccggcatccgcggcagcccccgcctgggctacctggtggcccacaacctgctgctggcccacgccaaggtgtggcacctgtacaacaccagcttccgccccacccagggcggccaggtgagcatcgccctgagcagccactggatcaacccccgccgcatgaccgaccacagcatcaaggagtgccagaagagcctggacttcgtgctgggctggttcgccaagcccgtgttcatcgacggcgactaccccgagagcatgaagaacaacctgagcagcatcctgcccgacttcaccgagagcgagaagaagttcatcaagggcaccgccgacttcttcgccctgtgcttcggccccaccctgagcttccagctgctggacccccacatgaagttccgccagctggagagccccaacctgcgccagctgctgagctggatcgacctggagttcaaccacccccagatcttcatcgtggagaacggctggttcgtgagcggcaccaccaagcgcgacgacgccaagtacatgtactacctgaagaagttcatcatggagaccctgaaggccatcaagctggacggcgtggacgtgatcggctacaccgcctggagcctgatggacggcttcgagtggcaccgcggctacagcatccgccgcggcctgttctacgtggacttcctgagccaggacaagatgctgctgcccaagagcagcgccctgttctaccagaagctgatcgagaagaacggcttcccccccctgcccgagaaccagcccctggagggcaccttcccctgcgacttcgcctggggcgtggtggacaactacatccaggtggacaccaccctgagccagttcaccgacctgaacgtgtacctgtgggacgtgcaccacagcaagcgcctgatcaaggtggacggcgtggtgaccaagaagcgcaagagctactgcgtggacttcgccgccatccagccccagatcgccctgctgcaggagatgcacgtgacccacttccgcttcagcctggactgggccctgatcctgcccctgggcaaccagagccaggtgaaccacaccatcctgcagtactaccgctgcatggccagcgagctggtgcgcgtgaacatcacccccgtggtggccctgtggcagcccatggcccccaaccagggcctgccccgcctgctggcccgccagggcgcctgggagaacccctacaccgccctggccttcgccgagtacgcccgcctgtgcttccaggagctgggccaccacgtgaagctgtggatcaccatgaacgagccctacacccgcaacatgacctacagcgccggccacaacctgctgaaggcccacgccctggcctggcacgtgtacaacgagaagttccgccacgcccagaacggcaagatcagcatcgccctgcaggccgactggatcgagcccgcctgccccttcagccagaaggacaaggaggtggccgagcgcgtgctggagttcgacatcggctggctggccgagcccatcttcggcagcggcgactacccctgggtgatgcgcgactggctgaaccagcgcaacaacttcctgctgccctacttcaccgaggacgagaagaagctgatccagggcaccttcgacttcctggccctgagccactacaccaccatcctggtggacagcgagaaggaggaccccatcaagtacaacgactacctggaggtgcaggagatgaccgacatcacctggctgaacagccccagccaggtggccgtggtgccctggggcctgcgcaaggtgctgaactggctgaagttcaagtacggcgacctgcccatgtacatcatcagcaacggcatcgacgacggcctgcacgccgaggacgaccagctgcgcgtgtactacatgcagaactacatcaacgaggccctgaaggcccacatcctggacggcatcaacctgtgcggctacttcgcctacagcttcaacgaccgcaccgccccccgcttcggcctgtaccgctacgccgccgaccagttcgagcccaaggccagcatgaagcactaccgcaagatcatcgacagcaacggcttccccggccccgagaccctggagcgcttctgccccgaggagttcaccgtgtgcaccgagtgcagcttcttccacacccgcaagagcctgctggccttcatcgccttcctgttcttcgccagcatcatcagcctgagcctgatcttctactacagcaagaagggccgccgcagctacaag

SEQ ID NO: 149631 - DNA, 3036 bp, Artificial Sequence
  derived and/or modified sequence
atgccggcgtcggcgccgccgcgtcgaccgcgtccgccgccgccgtcgctatcgctattattagtactactaggtctaggtggtcgtcgtctacgtgcggaaccgggtgatggtgcgcaaacgtgggcgcgattttcgcgaccgccggcgccggaagcggcgggtttatttcaaggtacgtttccggatggttttttatgggcggtaggttcggcggcgtatcaaacggaaggtggttggcaacaacatggtaaaggtgcgtcgatatgggatacgtttacgcatcatccgttagcgccgccgggtgattcgcgaaatgcgtcgctaccgctaggtgcgccgtcgccgttacaaccggcgacgggtgatgttgcgtcggattcgtataataatgtatttcgtgatacggaagcgctacgtgaactaggtgttacgcattatcgtttttcgatatcgtgggcgcgtgtattaccgaatggttcggcgggtgtaccgaatcgtgaaggtttacgatattatcgacgtttattagaacgtctacgtgaactaggtgttcaaccggtagttacgctatatcattgggatctaccgcaacgtttacaagatgcgtatggtggttgggcgaatcgagcgctagcggatcattttcgtgattatgcggaactatgttttcgacattttggtggtcaagtaaaatattggataacgatagataatccgtatgttgtagcgtggcatggttatgcgacgggtcgtctagcgccgggtatacgtggttcgccgcgattaggttatttagtagcgcataatctattattagcgcatgcgaaagtttggcatctatataatacgtcgtttcgtccgacgcaaggtggtcaagtttcgatagcgttatcgtcgcattggataaatccgcgtcgtatgacggatcattcgataaaagaatgtcaaaaatcgctagattttgtactaggttggtttgcgaaaccggtttttatagatggtgattatccggaatcgatgaaaaataatctatcgtcgatattaccggattttacggaatcggaaaaaaaatttataaaaggtacggcggatttttttgcgttatgttttggtccgacgttatcgtttcaactattagatccgcatatgaaatttcgacaattagaatcgccgaatttacgtcaactattatcgtggatagatttagaatttaatcatccgcaaatatttatagtagaaaatggttggtttgtttcgggtacgacgaaacgtgatgatgcgaaatatatgtattatttaaaaaaatttataatggaaacgttaaaagcgataaaattagatggtgtagatgtaataggttatacggcgtggtcgttaatggatggttttgaatggcatcgaggttattcgatacgtcgtggtctattttatgttgattttctatcgcaagataaaatgttattaccgaaatcgtcggcgttattttatcaaaaattaatagaaaaaaatggttttccgccgctaccggaaaatcaaccgttagaaggtacgtttccgtgtgattttgcgtggggtgtagtagataattatatacaagtagatacgacgttatcgcaatttacggatctaaatgtatatctatgggatgttcatcattcgaaacgtttaataaaagtagatggtgttgtaacgaaaaaacgtaaatcgtattgtgtagattttgcggcgatacaaccgcaaatagcgctattacaagaaatgcatgtaacgcattttcgtttttcgttagattgggcgttaatactaccgttaggtaatcaatcgcaagttaatcatacgatattacaatattatcgttgtatggcgtcggaattagttcgagttaatataacgccggtagttgcgttatggcaaccgatggcgccgaatcaaggtttaccgcgattactagcgcgacaaggtgcgtgggaaaatccgtatacggcgttagcgtttgcggaatatgcgcgattatgttttcaagaattaggtcatcatgtaaaattatggataacgatgaatgaaccgtatacgcgaaatatgacgtattcggcgggtcataatctattaaaagcgcatgcgctagcgtggcatgtatataatgaaaaatttcgacatgcgcaaaatggtaaaatatcgatagcgttacaagcggattggatagaaccggcgtgtccgttttcgcaaaaagataaagaagtagcggaacgtgtattagaatttgatataggttggctagcggaaccgatatttggttcgggtgattatccgtgggtaatgcgtgattggttaaatcaacgtaataattttttattaccgtattttacggaagatgaaaaaaaattaatacaaggtacgtttgattttctagcgttatcgcattatacgacgatactagttgattcggaaaaagaagatccgataaaatataatgattatttagaagtacaagaaatgacggatataacgtggctaaattcgccgtcgcaagtagcggttgttccgtggggtttacgaaaagtattaaattggctaaaatttaaatatggtgatttaccgatgtatataatatcgaatggtatagatgatggtttacatgcggaagatgatcaattacgagtatattatatgcaaaattatataaatgaagcgctaaaagcgcatatattagatggtataaatctatgtggttattttgcgtattcgtttaatgatcgaacggcgccgcgttttggtttatatcgatatgcggcggatcaatttgaaccgaaagcgtcgatgaaacattatcgaaaaataatagattcgaatggttttccgggtccggaaacgttagaacgtttttgtccggaagaatttacggtatgtacggaatgttcgttttttcatacgcgaaaatcgctattagcgtttatagcgtttttattttttgcgtcgataatatcgttatcgttaatattttattattcgaaaaaaggtcgtcgatcgtataaa

SEQ ID NO: 149632 - DNA, 3036 bp, Artificial Sequence
  derived and/or modified sequence
atgcccgcctcagcgccacccaggcggccacggcccccaccacctagtctctccctcctgttagtgttactcgggcttgggggacggcgccttagagccgaacctggagatggggctcagacttgggctaggtttagtcggccccctgctcccgaagcagccggactcttccagggaacttttcccgatgggttcctttgggccgttgggtctgccgcctaccagacagagggagggtggcagcagcatgggaagggggcctctatctgggatactttcactcatcatcccctggccccacccggagattctcggaacgcatcactgccactcggagccccctcaccattgcagcctgccacaggagatgtggcatcagacagttataacaacgtattccgcgatacagaagccctccgagagctgggagttacacattaccgcttcagtataagttgggcccgagtactccctaatgggtccgccggagtacccaaccgagagggactgcgatattatcggcgcctgctcgaaagacttcgggaactcggggtccagcctgtggtcacactttatcactgggatctgcctcagaggctccaagacgcatatggagggtgggcgaatcgagctttagccgatcactttcgcgattacgcagaactatgttttcggcacttcgggggacaggttaaatattggattactatcgataacccttatgtcgtggcctggcacggatacgccacaggaaggctcgctcctgggatccgggggtccccaaggttagggtatctggtggcacacaatctgcttcttgcgcatgctaaagtctggcatttatataacacatcattccgaccaacacaagggggacaggtgtctatagctctcagttcccactggataaatcctcgccgaatgactgatcactctataaaagagtgccagaaatctctagactttgtgcttggatggtttgctaaacccgttttcatagatggagactaccctgaaagtatgaaaaataacctgagttctatactaccagatttcacggaatcagaaaagaagttcatcaaagggactgctgatttctttgctctttgtttcgggcctacgctttcttttcagctactagatcctcatatgaagtttcgacagttggaatctcccaacttgagacagctcctcagttggatcgatcttgaattcaaccaccctcagatttttatagtggaaaacggatggttcgtttctggaacaactaaaagagatgatgctaaatacatgtattacctcaaaaaattcatcatggaaactctgaaggccatcaaactggatggggtggatgtgatcgggtacacggcatggtcacttatggatggattcgaatggcaccgagggtactcaatccgcagagggcttttttacgtcgacttcctaagtcaggacaagatgctcctaccaaaaagttctgcacttttttatcagaaactcattgaaaaaaacggattccctccactgcccgaaaaccagccattggaggggacatttccatgtgactttgcatggggggtcgtagataattatatacaggtagatactactctatctcagtttacagatcttaacgtgtatctttgggatgtccatcatagtaagagactgataaaggtggatggagtcgtaacaaaaaaaagaaaatcctactgtgtagattttgccgcaatccagcctcagatagccctgctgcaggaaatgcatgtaacacattttcggttctcactcgattgggccttaatactgcccttagggaatcagtctcaagtcaatcacactattcttcagtactaccgatgcatggccagtgagcttgtacgggtgaacatcacaccagtggtcgccctatggcagccaatggcacccaatcagggactaccaagacttttggcaaggcagggggcatgggagaacccctatacagcactagctttcgccgaatacgctcgactttgtttccaggaacttggacatcatgttaaattgtggattacaatgaatgaaccatatacacggaatatgacatattccgctggacacaacttgctaaaggcacacgcactagcatggcacgtatacaatgaaaagtttaggcatgctcagaacgggaaaatctcaatcgctctccaagctgattggatcgagcctgcttgtcctttttctcagaaagataaagaagtggccgaacgggtacttgagttcgatattgggtggcttgccgaacccattttcggatctggggattatccatgggttatgagagattggctcaatcagcggaacaactttctcttaccctatttcactgaggatgaaaaaaaattaatacagggaacatttgacttcctagcacttagtcactacacaactatcctcgtggattctgaaaaagaagaccctataaaatataatgactatctagaagtccaggaaatgacagatatcacatggctgaattcaccatcacaggttgccgttgtgccatggggactaagaaaagtactgaactggcttaaattcaaatatggggacctccctatgtacataatatcgaacggaatcgatgatgggttacatgcagaagatgaccagctaagagtgtactacatgcagaactacatcaatgaagccctgaaagcccacattctagatggaatcaacttgtgtggatacttcgcatatagttttaacgatcgtacagcccctaggttcggactttaccggtatgcagctgatcagttcgaacccaaagcctccatgaaacattataggaagatcatcgactccaacgggtttcccgggcccgagactctcgaaaggttttgccctgaagagtttacagtgtgcacagaatgctccttcttccatactagaaaatcacttctggctttcatagctttccttttcttcgcttccatcatcagtcttagtttgattttttattattctaaaaaaggacgccggtcttataag

SEQ ID NO: 149633 - DNA, 3036 bp, Artificial Sequence
  derived and/or modified sequence
atgccagcgtctgcaccccctaggcgccctcgtcctccacctccctcgctgtccctcctccttgtccttttgggacttggaggacggagactgcgggcagagcccggtgatggagcgcagacctgggcccgcttttcaagaccaccagcccctgaggcagccggtctgtttcaaggaaccttccccgatggattcctctgggcagtcggatccgctgcctaccaaaccgaaggggggtggcagcaacacggaaaaggtgcttcaatttgggacacttttacccatcacccgctcgcacctcctggagattcccgtaatgcctcgctgcctcttggtgcgccgtcgcctcttcagcctgcgaccggagatgtggcgagcgattcgtacaataacgtgtttagagatactgaagcactccgagagcttggcgtcacccattacagattttccatctcatgggcacgggtgttgccaaatggatccgcaggagttcctaaccgtgaagggctgagatactaccgaaggctcttggaaagactccgcgaactgggagtgcaaccagtggtcaccctgtatcactgggatctgcctcagagactgcaagacgcttacgggggttgggcaaatagagcactggccgatcactttcgagattatgcagaactctgttttcgacatttcggaggccaggtgaagtactggatcactattgataacccctacgtggtggcatggcacggttatgcaactggtagactcgcacccggaattcggggatcgccaaggcttggttacttggtcgcacataacctcctgcttgcacatgccaaggtgtggcatctgtacaacacctcgtttcgacctacccaaggtggacaagtgtcgatcgcgctctcctcacattggattaacccacggaggatgaccgatcatagcattaaggaatgtcagaaatcgcttgattttgtgctgggatggttcgccaaacctgtctttatagacggggattaccccgagtccatgaaaaacaacctgagcagcatcctgcccgattttaccgagagcgagaaaaagttcattaagggaacggcagactttttcgcgctctgtttcggccctacgctttcattccagctgcttgaccctcatatgaagttccgccaactggaaagccctaatctgcgtcaattgctgagctggatagacctggaattcaaccatccacagatattcattgtggaaaatggttggtttgtctcaggcacgaccaagcgcgatgatgcaaagtatatgtattacctcaagaagttcattatggagacgctgaaggccattaagctggatggggtcgatgtcataggttacaccgcctggtcgctgatggacgggttcgaatggcaccggggttactcaattcggaggggcctgttttacgtggactttctgagccaagacaagatgctgcttccaaagtctagcgcactgttctaccagaaactgattgagaagaatggttttccgcctctcccagagaaccagcccctggaaggtactttcccttgtgatttcgcatggggtgtggtggataactacatccaagtcgatactaccctctctcaattcacggatttgaacgtgtacctgtgggatgtccaccactcgaagagactcatcaaggtggatggagtggtgaccaaaaagaggaaatcgtactgcgtcgattttgcagccatccaaccacaaatcgccctccttcaagaaatgcatgtcacccattttaggttctcgctcgattgggcgttgatccttcctctggggaaccagtcgcaagtgaatcataccatccttcagtactacagatgcatggcaagcgagctcgtgagagtgaatatcaccccagtggttgcactctggcagccaatggcgcccaatcaaggccttccacgccttttggcaaggcaaggggcctgggaaaacccatacaccgctcttgctttcgcagagtacgcaaggttgtgctttcaggagctggggcaccatgtgaaactttggatcaccatgaacgaaccatacactcgcaatatgacttactcggcaggtcataatctgctgaaagcacacgcgttggcgtggcatgtgtacaatgaaaagtttagacatgcacaaaacggcaagatttcaattgcgcttcaagcagactggatcgaacccgcatgcccattctctcagaaagataaggaggtcgcagaacgcgtgctggaatttgacattggatggctggcagaaccgattttcggatccggcgattacccttgggtgatgagagactggttgaaccagcgcaacaacttcctgctcccctacttcaccgaagatgaaaagaagctgatacaaggcactttcgatttcctcgcgctgtcccattacaccaccatcctggtcgattcggaaaaagaggaccctattaagtacaacgattacttggaggtgcaggagatgactgacatcacctggctcaattcgccttcccaagtcgccgtcgtgccgtggggacttagaaaggtgctgaattggctgaagttcaagtacggtgacctgcccatgtacattatctcgaacggaattgacgacgggcttcacgcggaagatgaccagcttagagtctactacatgcaaaactacattaatgaggctttgaaggcacacatcctggatggaatcaacctctgtggttactttgcgtattcctttaacgatcgcaccgcgcctcgttttggactctaccgctatgctgcggaccaatttgagccaaaagccagtatgaagcactaccgcaagatcattgacagcaatggcttcccaggaccggagactttggaacgcttttgtccggaagaattcaccgtgtgtactgaatgctcattctttcacactagaaagtcccttctcgcgtttatagcttttctgttctttgcatcgatcatctcgctgtccttgattttctattactcgaagaaagggcgaaggtcatacaag

SEQ ID NO: 149634 - DNA, 3036 bp, Artificial Sequence
  derived and/or modified sequence
atgccagcctcagcaccaccgagacgcccacgaccgccacctccctcgctctccctgcttctggtcctcctgggacttgggggacggcgactgcgagctgagccaggtgatggagcacagacctgggcaagattctcaagaccacctgcaccggaggccgccgggttgtttcaaggcaccttccctgatggtttcctttgggcagtgggaagcgcagcttatcaaactgaaggaggatggcagcagcacggtaagggcgcatccatttgggatacctttacccatcatcccctcgcacctcccggtgattccagaaacgcaagcctcccactgggcgcaccaagccctcttcagcccgccactggggatgtcgcatcggactcgtacaataatgtttttcgcgacaccgaggcattgcgtgaactcggtgtcactcactacagatttagcatctcctgggcccgcgtgctcccaaatggtagcgcaggagttcccaaccgggaggggctgcgctactacaggaggcttcttgagcgtctccgcgaactcggggtgcagccagtggtcactctgtaccattgggatctgccccagcgacttcaagatgcatacggcgggtgggcgaatagggccctggccgatcatttcagggattacgccgaattgtgctttaggcacttcggcggacaagtaaagtactggataaccattgataatccctatgtggttgcatggcacggttacgcaaccggacggctcgcccctggcataaggggatcccccagacttggttacctggtggcgcataatctgcttcttgcgcatgccaaggtgtggcacctctacaatactagctttcgtcctacccagggaggacaggtgtcgatcgctctttcatcccactggatcaaccccagacgcatgaccgaccattccattaaggaatgtcagaagtcccttgactttgtgctgggatggttcgcaaagccggtctttatagatggagactaccctgagtcaatgaaaaacaatttgtcctcaatactccctgattttactgaatccgaaaagaagttcatcaaagggaccgcggactttttcgcactgtgctttggacccaccctgtcctttcagctgctggatccccatatgaaattccgccaactcgaatcgccaaatctgagacagcttctgtcctggatagaccttgaattcaaccatcctcagattttcatcgtggaaaatggatggttcgtgagcggcaccactaaaagagacgatgccaagtacatgtattatctgaagaagttcattatggaaactctgaaggccatcaagctcgacggtgtggacgtcattgggtacaccgcatggtcgctcatggatggattcgagtggcatagggggtacagcattcgacggggcctgttctacgttgatttcctctcacaggacaagatgcttcttcctaaatcatcagccctgttttaccagaagctcattgaaaagaacggattccctccactcccagagaaccagccactcgagggaacctttccctgtgactttgcctggggagtggtggacaattacatccaagtcgataccactctgtcacaattcaccgatctcaacgtgtacctttgggatgtccatcattcgaagcgcttgattaaggtggatggcgttgtgaccaagaagagaaagtcgtactgtgtggatttcgccgcaatacaaccacaaatcgcactcctgcaggaaatgcatgtgacccatttccgattttcactggactgggctcttattcttccgttgggcaaccagtcccaagtgaaccataccattctgcaatactaccgctgtatggcatcggagctcgtcagagtgaacattactcctgtggtcgcgctctggcaaccaatggcaccaaatcaaggcctgccgaggctgcttgcgagacaaggagcatgggaaaatccttacactgctctggcatttgccgagtacgcaagactttgctttcaggagctgggacatcacgtcaaactttggattactatgaacgagccatatactcgcaacatgacttactccgcaggacacaatcttctgaaagcgcatgccctggcatggcatgtgtacaatgagaagtttagacatgcgcaaaacggcaagatcagcattgccctgcaagcagattggattgagccggcgtgtcctttctcgcagaaggataaggaagtggcagagcgagtcctcgagttcgatatcgggtggctggccgaaccgatatttggttcgggtgactacccatgggtgatgagggattggcttaatcaacgcaacaactttttgctgccatacttcactgaggatgagaaaaaactgattcagggaacttttgattttctcgcactgtcccactataccaccatacttgtggacagcgaaaaagaggacccaatcaagtacaacgattacctggaagtgcaagaaatgactgatatcacgtggctgaactccccatcccaagtggcagtggtgccttggggtctgcggaaagtccttaactggctgaaattcaagtatggagatctgccaatgtacattatctctaatggtatcgatgatggactgcatgctgaggatgatcaactccgcgtgtactatatgcaaaactacattaatgaagcgctgaaggcccatattcttgacggaataaacctctgtggctactttgcctattcgttcaatgatagaacggcgcctagatttggcctttaccggtacgcggctgatcagtttgagccgaaggcctccatgaagcactacagaaagattatagatagcaatggattcccaggccctgagactcttgaacggttctgccctgaagagtttaccgtgtgtactgaatgctcctttttccatacccgaaaatcgctgctcgcattcattgcatttcttttcttcgcatccataatcagtcttagcctgattttctactactcaaagaaagggcggaggtcatacaag

SEQ ID NO: 149635 - DNA, 3036 bp, Artificial Sequence
  derived and/or modified sequence
atgccggcttctgccccgccacgccggcctagacctccccccccttcactatccctgctgctggtattgttgggactgggtggcagacgactcagagcagaaccaggcgatggagcgcaaacctgggcccgtttctctagaccacctgcccccgaagccgccggcctgtttcagggaacattccccgacggcttcttgtgggccgtagggtcagctgcctatcaaactgaagggggctggcaacaacacgggaagggcgcctctatctgggataccttcactcaccatccactcgcgcctcccggtgactctcgaaatgcgtccctgccactgggtgccccctcccccttgcagcctgctactggcgatgtggccagcgatagctacaacaatgtcttccgcgacaccgaagctctgcgagagctcggggtgacccactatcgtttttcgatcagctgggcacgcgtgctgccaaatggttcagcgggcgtgcctaatcgggagggattgcggtactacagacggcttttagaaagactgcgagagctgggcgttcagcccgtggtgaccctttaccactgggatttgccacagaggctgcaagacgcttatggaggctgggctaaccgcgcgctcgctgaccattttcgcgattatgccgaattgtgcttcaggcactttggaggacaggtcaagtattggattactatcgataacccgtatgtggtggcatggcatggctatgccacagggcggcttgcccctggcatcaggggctccccgcggctaggctacttagtcgcccataacctgctcctagcacacgccaaggtttggcatttgtataatacctccttcaggcctacacagggcgggcaggtctcaatcgctctctctagccattggatcaatcctaggagaatgacagaccactcaattaaagagtgtcagaagtctttggatttcgttctaggatggtttgcgaaacctgtgttcatcgatggcgactatcccgaatccatgaagaacaatctctcatctatactcccagattttaccgaatccgaaaaaaagttcatcaaggggaccgccgacttttttgccctgtgtttcggcccaaccctgtcattccagcttctggaccctcatatgaagtttagacaactcgaaagtcctaaccttaggcagctactttcatggatcgacttggagttcaatcacccgcaaattttcattgtggagaatggctggttcgtatccgggaccaccaaaagagacgacgccaaatatatgtactatttaaagaagttcattatggagacactgaaggccatcaagctggatggcgttgacgttatcggttacactgcctggtcactcatggatggtttcgagtggcataggggatacagtatcaggcgcggtctgttctacgtggactttttaagtcaggataagatgctcttgccgaagtcgagcgccctattttaccagaaactgattgagaaaaacgggtttccaccacttcccgagaatcagcccctggagggtacattcccttgcgatttcgcctggggcgtcgtggacaattacattcaggttgacactacgctttcacagtttactgaccttaacgtgtatttgtgggacgtccatcattctaaacggctgatcaaggttgacggagtcgttacgaagaagaggaagagctattgtgtggatttcgcagcaatccagccccagatagctctattgcaggagatgcacgtgacccactttcgattctcattggactgggcgctgatattgccgcttgggaaccagtcccaggtgaatcatacaatccttcagtattatcggtgcatggcctcagaactcgtgcgcgtgaacatcactcctgtggtggcgctatggcagccaatggccccaaaccaaggactccctcgtctcctggccagacagggagcctgggagaacccttataccgctctagccttcgcagaatacgctaggctatgctttcaggagctcggccatcatgtcaagctgtggatcactatgaacgaaccttacacccggaatatgacctacagtgcaggccacaatctgctgaaggcgcacgcgctcgcgtggcatgtgtacaatgaaaaattcagacatgcccagaacggcaaaatttcaatcgccctccaggcagactggatagagcctgcttgtcccttctctcagaaagataaagaagttgctgaaagggttttggagttcgacatagggtggctcgccgaacccatttttggaagcggcgactacccctgggttatgagggactggctgaaccagaggaataacttcctcctcccctattttacggaggacgaaaaaaaattgattcaaggtacattcgatttcttggccctttcccactatacaacaattctggtggactccgaaaaagaggatccaattaagtacaacgattatctggaggtacaggagatgactgacatcacgtggctcaacagcccttcccaagtggcggtggtgccatggggtctgagaaaggtgctcaactggctgaagttcaagtacggagacctgccaatgtacattattagcaatggaatcgacgacggtctgcatgccgaagatgaccagctgagagtgtattacatgcagaattacatcaacgaggcgttaaaggcacacattctcgacgggataaatctgtgtgggtattttgcatactcttttaacgaccggacggcccctaggtttggcctgtaccgatacgccgctgatcagtttgagcccaaagcctcgatgaagcattaccgcaagattatcgatagtaacggcttcccaggacccgaaacccttgaacgtttctgtcctgaggaatttacagtgtgtaccgagtgttcattcttccacacgcgaaaatcgctactcgcattcattgctttcctattttttgcttccatcatctctctgtctttgatattttattattccaagaagggccggcgttcgtacaag

SEQ ID NO: 149636 - DNA, 3036 bp, Artificial Sequence
  derived and/or modified sequence
atgcctgcctcggcaccacctcggcgcccacggcctcccccgccatcgctctcgctgcttcttgtgctcctggggcttggtggaagaagattgcgtgccgaaccgggagatggagcacagacctgggcccgcttcagcagacctcctgccccagaagcagcaggactgtttcagggcacttttcccgatggatttctgtgggccgtgggatcggcagcatatcagactgaagggggttggcaacaacatggcaagggcgcatccatttgggatacgttcacccaccacccccttgctccccctggcgattcgaggaacgcctcgctgcctctgggagcaccttcccccctgcaacctgccactggggacgttgcatcagatagctacaataacgtgttcagagatactgaagctctgcgcgagctgggtgtgactcactaccgattctcgatcagctgggcccgtgtccttcccaatggctcggcaggtgtgcctaatagggagggtcttaggtactaccgccgactgctggaaagattgcgggaattgggggtgcagccagtggtgaccctctaccactgggatcttcctcagaggcttcaagatgcatacggaggttgggctaaccgggcccttgcagatcactttagagactacgccgaactttgttttcgtcactttggaggacaagtcaaatactggattactattgataacccctacgtggtcgcatggcacggctacgccactggtcgccttgcacccggaatccgaggatcacctcggctcggctacctcgtcgcacataatcttctcttggcccatgcaaaggtctggcacctttacaacacctccttccgaccaactcaaggcggacaggtgtcaatcgccctgtcatcgcactggattaaccccaggagaatgaccgatcattccatcaaggaatgtcaaaaaagccttgacttcgtgctcggttggttcgcgaagcctgtctttattgatggagattacccagaatcgatgaagaataacttgtcgtcgatcttgccagattttactgaatcggaaaagaagtttatcaaaggaaccgccgatttctttgccctgtgcttcgggccaaccctttcgtttcaactcttggaccctcacatgaaattccggcagctggagtcccctaaccttagacaactgctgtcctggatcgacctcgaattcaaccatccccagatctttattgtggaaaacggctggtttgtgtcggggaccactaagagagatgacgccaagtatatgtactacctgaaaaagttcattatggaaaccctgaaggcaattaagctggacggagtggatgtcattggttacactgcatggagcctgatggatggctttgaatggcacagaggctattccataagaaggggtctgttttacgtcgattttctctcacaagataagatgctccttccaaagagcagcgctctcttctaccaaaaacttattgaaaagaacggatttccaccactccctgaaaaccagcctctggaaggaacttttccatgcgactttgcgtggggagtggtcgataactacatccaagtggacaccaccctctcgcaattcactgatctcaacgtgtacctttgggatgtgcatcattccaagaggctgattaaggtggatggcgtggtgactaaaaagcgcaaatcgtactgtgtggattttgccgcaattcagcctcaaattgcacttctgcaggaaatgcacgtgactcattttcggttcagcctggactgggcacttatactgcctcttggaaatcagtctcaagtgaaccacaccatcctccagtactaccggtgtatggcaagcgaacttgtgagagtgaacattaccccggtcgtggccctgtggcagccaatggcaccaaatcagggactccctagactccttgcaaggcagggtgcatgggagaacccatacacggcacttgcatttgcagagtatgcaaggctgtgcttccaagagctggggcatcacgtgaagctgtggattactatgaatgaaccttacactcgcaacatgacctactcagcaggacacaatcttctgaaggcacacgccctcgcgtggcatgtctataacgaaaagttccgtcatgctcaaaatggaaagattagcattgcacttcaggccgattggattgaaccagcatgtcccttctcacaaaaagataaggaagtggcggagcgcgtcctggaattcgacattggttggttggcagagccgatttttgggtcgggagattacccttgggtcatgagagactggctgaaccaaagaaacaacttcctcctgccatactttactgaggacgaaaagaagctcattcaaggaacgtttgactttcttgcactgtcgcattacactactattctcgtcgactcggaaaaggaggatccaatcaaatacaacgattatcttgaagtgcaagaaatgactgatatcacgtggctgaattcgccgtcccaagttgcggtggtgccttggggtcttagaaaagtgctgaactggctgaagttcaaatacggtgacctgccaatgtacattatctccaacggaattgatgacggcttgcatgcggaagatgatcaactccgagtctactacatgcaaaactacataaatgaggcccttaaggcccacattcttgatgggattaatctttgtggatacttcgcctactcgtttaatgataggactgcacctcgctttggactgtacagatatgctgcagaccaatttgaaccaaaagcatctatgaagcactaccgtaagattattgacagcaacgggtttcctggacccgagactttggaaagattttgtcctgaagaatttaccgtgtgtactgaatgttcttttttccatacccgaaagtcgctccttgcattcattgccttcctgttctttgcatctattatctcactgtccctcatattctactacagcaaaaagggccggcgctcgtacaaa

SEQ ID NO: 149637 - DNA, 3036 bp, Artificial Sequence
  derived and/or modified sequence
atgccagccagcgctccaccgagacggccaagaccaccgccgccatctcttagtcttctcctcgttctgctgggcctgggcggtcgtcgtctgcgcgcggaaccgggtgatggggcgcaaacatgggcacgtttctctagaccgccagctcccgaagcggctggactttttcaaggaacgttcccggacggatttctttgggctgtcggctcagccgcctatcaaacggaaggcgggtggcagcagcatggtaaaggcgcgtcgatctgggatacatttacgcatcatcctcttgcgccgccaggggatagcaggaacgcaagtctacctttgggcgcgccaagcccgctacaaccggccactggcgatgtagctagcgattcttacaataacgtgttcagggatactgaagccctgcgcgagttaggagtgacgcattatcgtttttccatttcatgggccagagtactgccgaatggcagcgctggagtcccgaacagagaaggcctgcgttactatagacggctgcttgaacgccttagagaactgggcgtccagccggttgtcacgttgtatcattgggaccttcctcaacgtcttcaggacgcgtacggaggttgggcgaatcgagcactcgctgatcattttcgagattatgcggaactttgttttcgccatttcgggggccaggtcaaatattggattacgatcgacaatccatatgtagtcgcttggcatggctacgctacaggacgtttagcgccgggcatccggggatcgccacgactgggctatcttgtagcgcataatctgctgctcgcccatgcaaaagtctggcacctctacaacacatctttcagacctacccagggtggacaagttagtattgcgctttcctcacattggataaatccccggcgcatgacagatcactcaattaaagagtgccagaaatccctcgattttgtcctgggatggttcgctaaaccagttttcattgacggggattatccggagagcatgaagaacaatttaagctctattttgcctgacttcacggaatctgagaagaaattcatcaaaggaacggcagatttttttgcgttatgtttcggtcctacattgtcttttcagctgctggacccacacatgaaatttagacaattggaaagccccaaccttcgtcaactactttcgtggattgacctggaatttaaccatcctcagatctttatcgtggaaaatggctggtttgtgtcaggcacgacgaaacgcgatgatgccaaatatatgtattatctcaaaaagtttattatggaaacgttgaaagcgatcaaactggacggagtggacgtgattggttatacagcgtggtccttaatggacggctttgaatggcatcggggttactccattcgaaggggcttattttatgtggatttcctgtctcaggataaaatgctccttccaaaatctagcgctttattttaccagaaattgattgaaaagaacgggttcccgccccttccggagaaccaaccgttagaggggacatttccttgtgacttcgcgtggggggtcgtcgataactacatccaagtggacacgacgctgagtcaatttactgatcttaacgtgtatctgtgggacgtacatcatagtaagagattgattaaagttgacggagtagtgacaaagaaaaggaaaagttattgcgttgattttgctgcaattcaaccacaaatcgctctgctccaagaaatgcatgtgacacattttcgtttctctttagattgggcccttattctgccccttggtaatcagtctcaggtaaatcacactattttacaatactatcgctgcatggctagcgaactggtgcgggtcaatattacaccggtagtcgccctttggcaaccgatggcacctaatcaggggttaccgcggctgctggcacgccaaggtgcttgggaaaatccttatacggcacttgcttttgctgagtacgcccgtttatgctttcaggagctgggacaccacgtaaaactttggattacgatgaatgaaccttatacaaggaatatgacatatagcgctggccataatctgttaaaagcacacgctttggcctggcatgtttataatgaaaagtttaggcatgcacaaaatggtaagatttcaatcgcgttacaagctgattggattgaaccagcttgcccgtttagccagaaggataaagaagtcgcggaaagggtcctggagtttgacataggctggctggcggaacccatctttggatctggggactatccgtgggtcatgcgggattggcttaaccagagaaacaactttctgctgccgtatttcaccgaagatgaaaaaaaattaatacagggcactttcgattttctcgcgctgtcccactatacaacaattttggttgactcagagaaggaagacccgattaaatataatgattatcttgaagtacaggaaatgactgatatcacatggttgaactccccaagccaggtggccgtggtgccttggggccttcggaaagtgcttaattggctgaaatttaagtatggcgatctgccgatgtatattatcagcaatggaattgatgacggactgcatgctgaggatgaccaactaagagtttactacatgcagaactatataaacgaagctctaaaagcccatatccttgacggaatcaatctctgcggctactttgcatactcattcaatgataggactgctcccaggtttggactgtaccggtatgcggccgatcaatttgaaccaaaagcctctatgaaacactatagaaaaatcatcgatagcaatggcttccctggaccggaaacacttgaacgcttttgcccagaagaattcacagtatgcacggagtgcagtttttttcacactagaaaatcccttcttgcgttcattgcgtttctgtttttcgcgtctattatttcactgtctttgatcttctattactctaaaaaaggcagacggagctataaa

SEQ ID NO: 149638 - DNA, 3036 bp, Artificial Sequence
  derived and/or modified sequence
atgccagcctcggcacctcctcggcgccctcgtcctccacccccttcgttgtcactgcttcttgtcctgctgggactgggagggagacggctccgggccgaacctggggacggcgcacaaacctgggccagattttccagaccacccgcacccgaggccgctggattgtttcaaggcacttttcccgatggatttctgtgggcagtgggttcggcagcttaccaaaccgaaggggggtggcagcaacacgggaaaggagccagcatctgggatacgtttactcaccacccgcttgccccgccgggggattcaagaaacgcctcgcttcccctgggtgccccctcacctcttcagccagccaccggagatgtggcctccgattcgtacaacaacgtctttagggataccgaggcgcttcgagaactgggcgtgacccactacagattttcaatttcgtgggcccgagtgctccctaatgggtcggccggggtgcccaaccgcgagggactcagatactaccgaaggcttcttgaacgcctccgcgagctgggagtccagcctgtggtgaccctgtaccactgggaccttcctcaaaggctgcaggatgcatacggcgggtgggccaacagagcacttgcagaccatttccgagattacgcagaactgtgttttcggcattttggtggccaagttaagtattggatcaccatcgataacccatacgtggtggcctggcatggttacgcaaccggcagacttgcaccaggtatacgaggatcgccgcgacttgggtacctggtggcccacaatctcctcctggcccatgctaaggtttggcatctgtacaacacgagctttagaccgacccagggaggtcaggtgagcattgcgctgtcctcgcattggattaatccccgcagaatgaccgatcactccattaaggaatgccagaaatcgctggatttcgtgcttggatggttcgcgaagcctgtctttattgacggagactacccagagtcaatgaaaaacaacctttcgtccattcttccagacttcactgagtcggaaaagaagtttatcaagggtaccgcagatttctttgccctgtgttttgggccgactctcagcttccaacttctcgatccacacatgaagtttaggcaactcgaatcgcctaacctgagacagcttctgtcctggattgacctcgagtttaatcatcctcagatctttatagtggaaaatggatggtttgtctccggtactactaagagagatgatgccaaatacatgtactacttgaagaagttcatcatggaaactctgaaggctataaagctcgatggcgttgatgtgatagggtatacggcatggagtttgatggatggctttgagtggcatcggggttactccattcgaagaggtttgttttacgtggactttctctcgcaggacaagatgcttctgccaaaaagctccgcccttttctaccaaaaacttatcgaaaagaacggatttcctccgcttcctgagaatcaaccacttgagggtacttttccatgtgattttgcttggggagtggtcgacaattacatccaggtggatactactctttcacaatttaccgatctgaatgtgtacctctgggatgttcaccactcgaaaagactcatcaaggtagacggcgtggtgactaagaagcggaaatcctactgcgtcgactttgccgcaattcaaccccagattgcacttctccaggagatgcatgtgactcatttcagattctccctggattgggcacttatacttccacttggaaatcagtcgcaagtgaaccacaccatacttcagtactatcggtgtatggcatcggaactcgtccgcgtgaacattactccggtggtggccctctggcaacccatggcacctaaccaaggcctgcctagactgctggcaagacagggtgcgtgggaaaacccgtacacggctctggcatttgccgaatacgcacgactgtgtttccaagaacttggtcatcacgtgaagctgtggatcacgatgaatgaaccgtatactaggaacatgacctactcagcaggacataacctgctcaaagcgcatgcccttgcctggcatgtctacaacgagaagtttcggcatgcacaaaacgggaagatttccattgctctgcaagcagattggattgaacccgcatgtccattctcccagaaggataaagaagtcgcagaaagagtgcttgagttcgacatcggatggttggccgaaccaatattcggaagcggagattacccttgggtgatgagggactggcttaatcaaagaaacaactttctgctgccatactttactgaagatgagaagaagctgatccagggaacctttgactttctcgcgctgtcacattacaccaccatactcgtggattcggagaaggaggacccaatcaaatacaacgactacctggaggtgcaagagatgacggacatcacctggctgaactcacccagccaagtggctgtggtgccttggggactcagaaaggtcctcaactggctgaagtttaagtacggagatctgccaatgtacattatctcaaatggtatcgatgacggcctgcacgccgaagatgaccagttgcgcgtgtactacatgcagaattacattaacgaggcccttaaggctcatatcctggatggaatcaatctgtgcggatatttcgcgtactcatttaacgatagaacggcacctcgcttcgggctttacagatatgcagcagatcaattcgaaccaaaagcatcgatgaaacattacagaaaaatcatcgactccaacgggtttccaggacctgaaacccttgagagattctgtccagaagaatttaccgtctgcactgagtgttcattctttcatactagaaagtccctgctggcgtttatcgcatttctgttttttgcaagcattatctccctttcactgattttctactactcgaaaaagggccgcagaagctacaag

SEQ ID NO: 149639 - DNA, 3036 bp, Artificial Sequence
  derived and/or modified sequence
atgccagcatctgccccgcccaggcgcccgcggcccccaccaccgtcgctgtcactgctcctcgtgttgttgggactcggtggacggagactgcgggccgagccaggggatggagcccaaacttgggctcggttcagccggcctcctgcgccggaagcggcaggcttgtttcaggggaccttccctgacggatttctgtgggcggtgggcagcgctgcataccaaaccgaaggcggatggcagcaacacggcaagggagcttcgatctgggataccttcactcaccatccactggctccgccaggggactccagaaacgcgtctctcccgctcggagcaccttcccctctccagccggcaaccggagacgtcgcttcggattcgtataacaacgttttccgcgacactgaggcgctccgcgaacttggagtgacccactacagattctcgatctcgtgggccagagtgctcccgaatggatccgctggagtgccgaaccgcgaagggcttcgctactacaggaggctgctggagcggctcagggaactgggagtgcaacctgttgtgaccttgtatcactgggatctcccacagcgcctccaggacgcgtacggaggttgggcgaatcgtgccctcgctgaccattttagagactacgctgaactttgcttccgccacttcggaggccaagtgaagtactggatcactattgacaacccttacgtcgtggcctggcatggctacgccactggacgcctcgctcctggcatccgcggatccccacgcctgggctacctcgtggctcacaacctgctcctggctcacgcgaaggtgtggcacctgtacaacacctcgttcagaccgactcagggaggacaagtgtccatcgcgttgagcagccactggatcaatccgagacggatgaccgatcacagcattaaagagtgccagaagagcctggacttcgtgcttggttggtttgccaagccggtctttatcgatggagactacccggagtcgatgaaaaacaacttgtcgtcgatcctgccggatttcaccgagagcgagaaaaagttcattaagggaacggcggactttttcgcactgtgcttcggcccaactctgagcttccagctgctcgatccacacatgaagttcaggcagctcgaatccccgaacctgcgccagctgctctcctggatcgacctggaattcaatcacccgcagatcttcatcgtggaaaatgggtggttcgtctcaggaacgactaaacgcgatgatgcgaagtacatgtattacctcaagaagtttatcatggagactctgaaggcgattaagctggacggggtcgacgtgatcggctacactgcttggtctttgatggatgggttcgagtggcaccgtggatactcgatccggcggggactcttttacgtggacttcttgtcgcaagataagatgctcctgccgaaaagctccgccctgttttaccagaagctcatcgaaaagaacggattcccaccgctgccagaaaatcagccgctggaggggacctttccgtgcgactttgcatggggcgtcgtggacaactacatccaggtggacaccactctctcgcagtttactgacctcaacgtgtacttgtgggacgtgcaccatagcaagcggctgatcaaggtcgacggagtcgtgaccaaaaagagaaagagctactgtgtggattttgcagcaatccagccccagatcgctcttctgcaggagatgcacgtgactcacttcaggttttccctggactgggcactgatcctgcctctgggtaaccagtcccaagtgaaccacactatcctccagtattaccgctgcatggcctctgaactggtgagagtgaacatcacgccggtcgtcgcgctgtggcagccgatggcaccaaaccagggactgcctagattgcttgctaggcagggtgcctgggaaaacccttataccgctttggccttcgcagagtatgcaagactctgcttccaggagctcggacatcacgtcaaactttggatcacgatgaacgagccttacactaggaacatgacctactcagccggacataacctgctgaaggcacatgcactcgcctggcatgtgtataacgaaaagttccgccatgctcagaacggcaagattagcatcgcactgcaggccgactggattgaacctgcctgtcccttctcccagaaggataaagaagtagcggagagagtcttggaatttgatatcggctggttggcggaacctatattcgggtccggagactacccctgggtgatgagagactggttgaaccagcgcaacaatttcctgctgccatacttcaccgaggacgaaaagaaactgatccaggggactttcgacttccttgcactttcacactacactaccatcctggtggattcagaaaaggaggacccaattaagtacaacgattacctggaggtgcaagagatgacggacatcacctggctgaactcaccgtcgcaggttgccgtggtgccgtggggactcaggaaggtgctgaactggctgaagttcaagtacggagatctgccgatgtacatcatcagcaatggaatcgatgatggcctgcatgccgaggatgatcagcttcgggtgtactacatgcaaaactacatcaacgaagcattgaaggcccatatcttggacggaattaacctctgtggatatttcgcctactccttcaatgatcggactgcacccagattcggactttaccgatacgccgctgatcagttcgaaccaaaggcaagcatgaaacattacagaaaaatcattgattcaaacggattcccgggacctgaaaccctggagagattctgtcccgaagagttcactgtgtgcaccgaatgctcatttttccacaccaggaagtcgcttttggccttcatcgcctttcttttctttgcgtccatcatttccctgtctctgatattctactactccaagaagggacgccgctcctacaag

SEQ ID NO: 149640 - DNA, 3036 bp, Artificial Sequence
  derived and/or modified sequence
atgccagctagtgcaccaccaagaagaccaagaccacctccaccttctttgtctttgcttttagtattacttggattaggaggaaggcgattgagagctgaaccaggagatggagcccaaacttgggctagattttcaagaccaccagctccagaagcagcaggtctttttcaaggtacttttccagatgggtttttatgggctgttggttcagcagcatatcaaactgaaggaggatggcaacaacacggaaagggagcatcaatatgggatacatttacacatcatcctttagcacctcctggtgattctagaaatgcatcacttccattaggtgcaccttcaccacttcaaccagctactggagatgtcgcatctgattcatataataatgtttttagagatactgaagctcttcgagaattgggagttactcattatagattctcaatttcatgggcaagagttttacctaatggatcagcaggtgttccaaatagagaaggattaagatattatcgaagattattagaaagattaagagaattaggagttcaaccagttgtcacactttatcattgggaccttcctcaacgattacaagatgcatatggaggatgggcaaatagggcattagctgatcattttagggattatgcagagctttgtttcagacatttcggtggtcaagttaagtattggattacaattgataatccttatgtagttgcatggcatggatatgctacaggaagacttgcaccaggaattcgtggatcaccaagattaggatatttagttgcacataatcttttacttgctcatgcaaaggtatggcatctttataatacaagttttagaccaactcaaggaggacaagtatcaatcgcattatcatcgcattggattaatcctagaagaatgactgaccattctattaaggaatgtcaaaaatcattagattttgttttaggatggtttgccaagcctgtttttattgatggagattatcctgagtcaatgaaaaataatttaagtagcatcttaccagactttactgaatctgaaaaaaaatttataaaaggtacagcagattttttcgctctttgttttggtccaacgttaagttttcaattattagatccacacatgaaatttagacaattagaaagtccaaacttacgtcaattactttcttggattgatcttgaattcaatcatccacaaatcttcatagttgaaaatggatggtttgtatctggaacaactaaaagagatgatgcaaaatatatgtattatttaaaaaagttcattatggagactcttaaggcaattaagcttgatggagttgatgttattggatatacagcatggagtcttatggatggatttgagtggcatagaggatattctataagaagaggtttattttatgttgattttttatcacaagataaaatgcttcttccaaaatcatcagcattattttatcaaaaattaatagaaaagaatggatttccaccacttccagaaaaccaaccattagagggaactttcccatgtgattttgcatggggtgttgttgataactatattcaagtagatactacattatcacaatttacagatcttaatgtttatctttgggatgtccatcattctaaaagacttattaaagttgatggagttgtaactaaaaaaagaaaatcttattgtgtggactttgctgcaatacaaccacaaatagctttacttcaagaaatgcatgttacacattttcgtttttccttagattgggcattaattcttcctttaggaaaccaatcacaagttaatcatactattttgcaatattatcgttgtatggcatcagaattagttagagtaaatattacaccagttgttgctttatggcaaccaatggctccaaatcaaggtttaccaagattattagcacgacaaggtgcatgggaaaacccatatacagctttagcttttgctgaatatgcaagattgtgttttcaagaattaggtcatcatgtaaagctttggattactatgaatgaaccatatactaggaatatgacctatagtgcaggtcataatcttttgaaagcacatgcattggcttggcatgtttataatgagaaattcagacacgcacaaaatggaaaaattagcattgcccttcaagctgattggatagaaccagcatgtccattttcacaaaaagataaggaagttgcagaaagagtattagaatttgatattggatggcttgcagaaccaattttcggatcaggtgattatccatgggtaatgagagattggttaaatcaaagaaataattttttacttccatatttcacagaagatgaaaaaaaattaattcaaggtacatttgattttttagcattaagtcattatactacaattttggtagattctgaaaaagaagatccaataaaatataatgattatcttgaagttcaagaaatgacagatattacttggctcaattctccatcacaagttgctgttgttccttggggtttgagaaaagttttaaattggttaaaatttaaatatggagatttaccaatgtacattatttctaatggaattgatgatggattacatgcagaagatgaccaattgagagtttattatatgcaaaattatattaatgaagcattaaaggctcatattttagatggaattaatctttgtggatattttgcatattcttttaatgatagaacagcaccaagatttggactttatagatatgcagctgaccaatttgaaccaaaggctagtatgaaacactatagaaagattattgattcaaatggatttccaggtcctgaaacacttgaacgattttgtccagaagaatttacagtttgtacagaatgttctttctttcatactagaaaatcattgttagcttttattgcatttttattcttcgcatcaattatttcattatcattaattttttattactcaaagaaaggaagaagatcatacaaa

SEQ ID NO: 149641 - DNA, 3036 bp, Artificial Sequence
  derived and/or modified sequence
atgccagcaagcgcaccccccaggcgtcctcgcccacccccaccctctctttcgcttctcctggtgctgctgggtctgggcggccggcgtctcagagcagaacctggagatggagcacagacctgggcgaggttttcaagacctcctgcgcctgaagcagctggtctttttcagggtacttttccggacggatttctgtgggcggtcgggtccgcggcataccaaactgaaggaggatggcaacaacacgggaaaggcgcctcgatctgggacacctttactcatcatcccctggcaccaccaggagattcccggaatgcctcgctccctctcggagcccctagcccactccagcctgcgactggggatgtggcaagcgattcatacaacaacgtgttccgtgacactgaagcactccgcgaattgggagtgacccattaccgtttcagcattagctgggcccgtgtgcttcccaacggatcggcaggagtgcctaaccgggaaggtctgaggtactacagacggcttctggaacgcctccgggaactcggcgtgcaacctgtggttacgctttaccattgggatctgccacaacgactccaagatgcttatggaggatgggccaatcgcgcacttgcagatcacttccgagattacgcagagctgtgttttcgtcatttcgggggacaggtgaagtactggattaccatcgacaatccatacgtggtggcgtggcacggttacgcaaccggccgccttgcacccggaattcgcggctccccccgcctgggctacctggtggcacacaatttgttgcttgcgcatgcaaaggtgtggcacctttacaataccagctttcgccctacccagggaggacaagtctcaatcgccctgtcgtcacattggattaatccgcgacggatgaccgatcattccattaaggagtgtcaaaagtccctggacttcgtcctcggttggtttgcgaagcctgtctttattgatggtgattacccagagtcgatgaaaaacaacctctctagcattctgcctgacttcaccgaatctgaaaagaagttcataaagggcaccgctgacttttttgcgctctgctttggtccgaccctctcctttcagctcctcgatcctcatatgaagtttagacagctcgagagccctaacctgagacagctgctttcatggattgatctggagtttaaccacccacagattttcattgtggaaaacggatggtttgtctcaggtactaccaagagagatgatgcaaaatacatgtactatctcaagaagttcattatggagactctgaaggcaatcaagctcgacggcgtggacgtgatcggttacactgcctggtcgctcatggacggcttcgaatggcacagagggtacagcattagacgaggactgttttacgttgacttcctctcccaagacaagatgcttctgcctaagtcgtcagcactcttttaccagaagctcatagaaaagaacggctttccacctcttcctgaaaaccaacccttggaagggaccttcccctgtgactttgcctggggcgtggtcgataactacattcaggtcgatactacgctctcacaatttactgatttgaatgtctacctgtgggatgtgcaccactcgaagaggctgatcaaggtggatggggtcgtcactaagaagagaaagtcgtactgtgtggattttgcagcaatccagccacagattgcgctcctgcaagagatgcatgtgacgcattttagatttagccttgattgggcactcatcctccccctcggtaatcaaagccaagtgaaccacacgatcctccagtactacagatgtatggcatcggagcttgtgcgtgtcaacattactccagtggtcgcactttggcaaccaatggcaccaaaccagggccttcctagactgctggcccggcaaggagcctgggaaaacccttacaccgcccttgctttcgcagaatacgcaagactgtgttttcaagaattgggtcatcacgtcaaactgtggatcactatgaatgagccttacactcgcaacatgacctactctgcaggtcataatcttcttaaagcgcacgcacttgcatggcacgtgtacaacgagaaattcagacatgcacagaatggaaagatctcaattgccctgcaggcagactggatcgaacctgcatgcccgttttcgcagaaggacaaggaagtcgcagaacgagtgctggaatttgatataggttggttggccgagccaatctttggatcaggagattacccttgggtgatgagagactggctgaatcaaaggaacaactttcttctcccatacttcaccgaggatgagaagaagctgatccaaggaacctttgactttctcgcacttagccactacactactatcctggtggactctgaaaaggaggatccaattaagtacaatgactacttggaagtgcaagaaatgactgacattacttggctgaactcgccctcccaagtcgccgtggtgccgtggggactgcggaaggtgttgaattggttgaaattcaagtacggcgatctgcctatgtacatcatttccaatggaatagatgacggacttcatgcagaggatgaccaactgcgcgtgtattacatgcagaattacattaacgaagcactcaaagcacatatcttggacgggataaacctctgtggttacttcgcttactccttcaacgatagaactgcccctcgctttggactttatcgatacgcagcagaccaattcgaacctaaggcatcgatgaaacattacagaaaaatcattgacagcaatggattccccggacctgaaaccttggaacgattctgccctgaagaattcaccgtgtgtactgaatgtagcttctttcatactcgcaagtcgctcctggcctttattgcctttctgttttttgcttcaattatctcgctcagcctgattttctactactccaaaaaaggtcgacgctcctacaag

SEQ ID NO: 149642 - DNA, 3036 bp, Artificial Sequence
  derived and/or modified sequence
atgccggcatcagcaccacctagaaggccaagacctccccctcctagcctgtccttgctcttggtcctgttggggctgggaggacggcgcctgcgcgcagaacccggtgatggagcacagacttgggcaagattctcaagaccaccagcgccggaagctgccggactttttcagggtacctttcccgacggctttctctgggcagtgggatccgcagcgtatcagactgaaggtggttggcagcagcacggcaagggagcatctatatgggacacttttacgcaccatcctcttgcccctccaggagatagccggaacgcatccctcccacttggggcaccttcccctctgcaaccagcaaccggcgatgtggcatcggactcatacaataacgtctttcgtgacacggaggccctgcgagaacttggagtgacccattacagattttcaatctcctgggcgcgggtgctcccaaatggctcagcaggcgtgccgaacagagaaggccttcgctactaccgacgactgcttgaacgactgcgggaattgggggttcaacccgtggtgaccctttaccactgggacctgcctcagcgactccaggacgcgtacggaggttgggccaaccgagcgctggccgatcatttccgcgactacgcagaactgtgcttcagacatttcggtggacaagttaagtactggataactatcgacaatccatatgtggtcgcatggcatgggtacgcgactggtcggcttgcgcctggaatacgaggttcgccccgtctcgggtacctggtggcacacaaccttctcctggcacacgcaaaggtctggcatctttacaacacttcgtttcgacctacccaaggtggacaagtctcgattgcgctgagctcgcattggattaatcccagaagaatgacggaccatagcattaaggaatgtcaaaagtccctcgactttgtgctgggatggtttgctaaaccggttttcattgacggtgattacccagaatcgatgaagaacaatcttagcagcatcctgcctgactttaccgagtcagaaaagaagttcataaaagggaccgcagatttctttgcactgtgtttcggtcccacgctttcctttcaactgttggatccacacatgaagtttagacaacttgaaagcccgaatcttcggcagctgttgtcctggatcgatctcgaattcaatcacccgcagatattcatcgtggaaaatggatggttcgtctcaggtacgactaaacgggacgatgcaaaatacatgtactatctcaagaaattcatcatggaaacgctgaaggcaataaagctggatggcgtggacgtgatcggctacaccgcctggtcactgatggatggctttgaatggcacagaggatactcgatacgcagaggactcttttacgtggattttctttcgcaggataagatgctcctccctaagagttcggccctcttttaccagaaacttatcgagaagaatgggtttccgccactgcctgagaaccagcctctcgaggggacctttccttgtgattttgcctggggcgtggttgacaactacatacaggtcgacactaccctgagccaatttaccgaccttaacgtgtacctttgggatgtgcatcattcgaaaagactgattaaagttgatggagtcgtgaccaaaaagagaaagtcctactgtgttgatttcgccgctattcaaccacaaattgcacttctgcaagagatgcacgtgacccatttccgtttctctcttgactgggccctcattctccccctgggcaaccagagccaagtgaatcacactatcctgcagtactacagatgcatggcaagcgagctggttagggtcaacattacccctgtcgtcgccctttggcagcctatggcacccaaccaagggttgcctcgcctgcttgcacggcagggagcctgggagaacccttacaccgcgcttgcattcgccgagtacgcgagactttgcttccaggagttggggcatcatgtgaagctgtggattactatgaatgaaccttacactagaaacatgacctatagcgcaggtcataacctgttgaaggcgcacgcattggcatggcacgtgtataatgagaagttccgccatgctcagaacggaaagatatcaatagcactgcaagctgattggatcgagccagcatgtcccttttcgcagaaagataaggaagtcgcagagagagttctcgagtttgatattgggtggctggcggaaccaattttcgggtccggggattacccttgggtgatgagagattggctgaaccaaagaaacaacttcctgctgccgtactttaccgaagatgaaaagaagctgattcaaggaacctttgattttctcgccttgtctcattacactacgatcctcgtggactccgaaaaggaagatcccatcaagtataatgattacctggaggtgcaagaaatgactgacataacttggctcaactcgccctcccaagtcgcagtggtgccttggggacttcgcaaggtcctcaactggctgaagttcaagtacggtgatctcccgatgtacattatctcgaatggaattgatgatgggctgcacgcagaggatgatcaattgcgagtatactacatgcagaactacattaatgaggcactgaaggcacatatactggacggtattaacctgtgtggatactttgcatactcgtttaatgacagaactgcgccgagattcggtctgtataggtacgcagcagatcaattcgaacctaaggcctccatgaaacattataggaagattattgattctaacggatttccaggacccgagactcttgaaaggttttgcccggaagagttcaccgtgtgtactgaatgctcattctttcacaccaggaagtcacttctggcattcattgcctttcttttctttgcatcaattatctcgctttccctgatcttttactactcaaaaaagggtcggagaagctacaag

SEQ ID NO: 149643 - DNA, 3036 bp, Artificial Sequence
  derived and/or modified sequence
atgcccgcaagcgcgcccccgagacgcccacggccaccgccgccaagcctctccctcctgctcgtgctcttgggtctggggggacggagactgagagctgaacctggagacggagcgcagacttgggcacgcttttcgaggccaccagcgccggaggcggcaggactgtttcagggcaccttcccggacggattcctgtgggccgttggatcggccgcctaccaaactgaaggaggctggcagcagcacggaaagggggcctccatctgggacacttttactcatcatcctctcgcgccaccaggcgactcacggaacgcttccctgccgctcggtgccccgtcccctctgcaaccagcgaccggagacgtcgcctctgactcatacaataacgtgttccgggatactgaggcgttgcgagaactgggagtgacccattaccgcttctcgatctcgtgggcgagggtcctgccaaacggatccgccggcgtcccaaaccgcgagggactccgttactaccgcagactgcttgaacggctcagagaactcggagtgcagccggtcgtgacgttgtatcattgggacctcccgcagcggctccaggacgcctacggtgggtgggctaaccgggcgctggccgatcatttcagggactacgcagaactgtgtttccgccacttcggcgggcaggtgaaatactggatcaccatcgataacccctacgtggtcgcttggcacggttacgcaacgggcagactggccccgggcatcagaggatccccgcgcctgggataccttgtcgcccataacctcctgctggcccacgcgaaggtctggcacctgtacaacactagcttcagaccgacccaaggtggtcaggtgtccatcgcactgtcgtcgcattggattaacccccggaggatgactgaccatagcattaaggagtgtcagaaatcactggatttcgtgttgggctggtttgccaaaccggtgttcatcgacggagattaccccgaatcaatgaagaacaacctctcgtccatcctcccggacttcactgagtccgaaaagaagttcataaaggggaccgcggacttctttgctctctgctttgggccgaccctgtcttttcagctcctggatccgcacatgaaattccggcagctcgagtccccgaacctgaggcagttgctgagttggatcgacctggagttcaatcacccacagattttcatcgtggaaaacggatggttcgtgtcgggcaccactaaaagggacgacgccaagtacatgtattacctgaagaaattcatcatggaaactctgaaggccatcaaactggacggcgtggacgtgattggctacactgcatggtcactgatggacggattcgaatggcaccgggggtactccatccggcgagggctgttctatgtggacttcctttcccaggacaagatgctcctccctaaatcgtcggcgctgttctaccagaagctgatcgaaaagaacgggttccctccattgccggagaaccagcccctggaaggaactttcccatgcgattttgcatggggagtggtggacaactacatacaggtcgacaccaccctctcccaatttaccgatttgaacgtgtacctgtgggatgtgcatcattccaagcgcctcatcaaagtggacggagtcgtgaccaaaaagaggaaatcatactgcgttgacttcgctgccattcagccgcagatcgcactgttgcaagaaatgcacgtgactcatttccggttcagccttgattgggccctcatcctgccgttgggaaaccagtcgcaagtgaaccatactatcctgcagtactacagatgtatggcgtccgagctcgtccgtgtgaatatcaccccggtggtggcattgtggcaacctatggcaccgaaccagggactgcctaggttgctggccagacagggtgcttgggagaatccgtacaccgcattggccttcgccgaatacgcacgcctgtgctttcaggaactgggccaccatgtcaaactgtggattaccatgaacgagccgtacactcgcaatatgacttactcagcaggacacaatctgctgaaagcccatgcactggcatggcacgtctacaatgagaaattcaggcacgctcaaaacgggaagatctccatcgcgttgcaggccgactggatcgaacccgcatgtccgttctcgcagaaagacaaggaggtggcagaacgcgtgctggaattcgacattggctggctggcggaacctatcttcggatctggagattatccctgggtcatgagggattggcttaaccaacgcaataactttctgctgccttactttacggaggacgaaaagaaactcatccagggaaccttcgacttcttggccctgagccactacactaccattctggtggactcggagaaggaggaccctatcaaatacaatgactacctggaagtgcaagagatgactgacatcacttggctgaactctccttcccaggtggccgtggtgccttggggtctgcgcaaagtgttgaattggctcaaattcaaatacggagatctcccgatgtacatcatcagcaatgggatcgacgacggcctccacgcggaagatgatcaactgagagtctattacatgcagaactacatcaacgaagcgctcaaggcccacattctcgacggcatcaatctgtgcggatacttcgcttactcgttcaacgaccggacggcaccaagatttggtttgtacagatacgcggctgaccagttcgaaccaaaggcaagcatgaagcattacaggaagatcatcgactcaaacggattcccaggaccagagacgctcgagcgcttttgtcccgaagaattcaccgtgtgtaccgagtgcagcttcttccacaccagaaagtcgctgctggccttcatagccttcctgttttttgctagcattatctccctgtcgctcatcttttactactcaaaaaagggccggcggtcatacaag

SEQ ID NO: 149644 - DNA, 3036 bp, Artificial Sequence
  derived and/or modified sequence
atgcctgcatccgcacctcctaggcgcccccggccgccgccaccgtccctttccctgcttcttgtgcttcttggtctgggaggacggaggctgcgggcagaacctggagatggagcgcaaacgtgggccagatttagccgccctcctgcccctgaggcagcaggtcttttccaaggaacctttccggatggatttctttgggcggtcggaagcgcagcataccagaccgaaggaggctggcagcagcacggcaagggagcgtccatttgggacacttttactcatcacccacttgcaccccccggagattcccgaaatgcaagccttccgctgggagcaccttcgccacttcaacccgcaactggtgatgttgcatccgattcttacaacaacgtctttcgcgatactgaagctcttcgggaactgggtgttacccactacaggtttagcatctcgtgggcacgtgtgcttccaaacggttcggccggagtgccaaatcgagagggtctgcgatactaccgacgtctgctggaacggctgagagaacttggtgtccagcccgtagtgactttgtaccactgggatctcccgcaaagacttcaagacgcatacggtgggtgggcaaatcgggcactcgcggatcacttcagggattacgcagaactttgttttcgacacttcggaggtcaagtcaaatactggattaccattgataacccgtatgtggtggcttggcatggctacgcaaccggacgcctggcccccggtatccgtggatccccacgacttggttaccttgtcgcacataaccttctgcttgcgcatgcgaaagtgtggcatctgtacaacacttcctttcggcctactcagggaggacaggtttcgattgcgttgtcatcacattggattaaccctagaagaatgaccgatcacagcattaaggaatgtcaaaaaagcctcgactttgttcttggctggttcgcaaagccagtgtttatcgatggagactaccctgagagcatgaagaataacctgtcatccatcctgccggattttactgaatccgagaagaaattcattaagggaacggccgacttttttgcattgtgttttggaccaactcttagttttcaactgctcgacccccacatgaaattcagacagctggagtcccccaacctgagacagctgctttcctggatcgacctcgagtttaatcaccctcagatattcatagtcgaaaatggctggttcgtcagcggaaccactaaaagggatgatgcaaagtatatgtactatcttaagaagttcattatggaaaccctcaaggcaatcaaacttgacggagtggatgttataggctacaccgcttggagcctcatggatggattcgaatggcaccggggatactccatacgccgggggcttttctatgtagactttctgtcacaagacaaaatgctgcttccaaaatcgtcggccctgttttaccaaaagttgatagagaaaaacggattccctccactcccagaaaatcagcctctcgagggaaccttcccttgtgatttcgcatggggtgtggtggacaattacattcaggtcgacaccactctttcgcagttcactgatctcaacgtgtacctttgggatgtccatcattccaagagactcattaaggtggacggagtggtcaccaagaagagaaagtcgtactgtgtcgactttgcagcgattcaaccacaaattgcactgctccaagagatgcacgtgacgcattttcgattcagccttgattgggccctgattttgccgctcggcaaccagtcgcaggtgaatcatactatactgcaatactaccgctgtatggcaagtgaactggtgcgggtgaacatcacccctgtggtggccctgtggcagcctatggcccctaatcaaggactcccgcgtctgctggcacggcaaggtgcatgggagaacccatacaccgcccttgcatttgcagagtacgcccgcctttgctttcaagagctgggacatcacgtgaaactgtggattaccatgaatgaaccatatactcgcaacatgacttactccgcaggacataacctgcttaaggcacacgcgctggcatggcatgtgtacaatgagaagtttagacatgcgcagaacggcaagatttcgatcgcactccaagcggattggattgaacccgcatgccccttcagccaaaaggataaggaggtcgcggagagagtgcttgaatttgatattggatggctggcagagccaatattcggttctggcgactacccttgggtgatgagagactggcttaaccagcgtaacaattttctgttgccctatttcaccgaggatgaaaagaagctgattcaaggtaccttcgattttctggccctctcccattacactaccatccttgtggatagcgaaaaagaagatcctattaagtacaatgattaccttgaagtgcaagaaatgaccgatattacctggcttaactcccctagccaggtggcagtcgtcccttggggtctgcgcaaggtgctgaattggctcaagtttaagtacggggacctcccaatgtacatcatttcaaacggaatagatgacggccttcacgcagaggatgaccagttgagagtctactacatgcagaactatatcaacgaagcacttaaggcgcatatcctggatgggataaacttgtgtggttactttgcatactcatttaacgacaggactgcaccaaggttcggactttacaggtacgctgcagaccagtttgagccgaaagcctcaatgaaacattaccgaaagattatcgactccaacggcttccccggaccagaaactcttgaacgattttgtccagaagaattcacggtgtgcaccgaatgctccttctttcatactcgaaagtcacttctggcattcattgcatttctgtttttcgcatccatcatttcacttagcctgattttctactactcaaagaaaggtcgcagatcctacaag

SEQ ID NO: 149645 - DNA, 3036 bp, Artificial Sequence
  derived and/or modified sequence
atgcctgcttccgccccccctagacggcctcgcccccccccaccgagtttgtctctcctgcttgtgcttttgggactcggaggaaggcggctgagggcagagcccggggatggcgcacagacatgggccagatttagccggccccctgctcccgaagcagcggggctgtttcagggcactttccctgatggctttctctgggccgtgggatctgctgcctatcagaccgaagggggctggcagcaacacgggaagggggccagcatatgggacacattcacccaccatccgctggccccacctggtgacagccgaaacgcaagcctgcctctcggtgccccgagccccctgcaacctgccactggtgacgtggcttccgacagctataacaatgtttttagagacacagaggccctgagagagcttggcgtcactcactaccgattttccatctcatgggcacgggtcctccctaatgggtctgctggagtccccaacagagaaggacttagatattatcgcagactgctcgaacgcctgagagagttgggagttcagccagtcgtgaccctgtatcattgggatttgcctcagaggctgcaggatgcatacggagggtgggcaaaccgggcactcgctgatcacttccgcgattacgcagaactgtgttttagacactttggaggtcaagtaaaatactggataacaatcgacaacccatacgttgttgcctggcacggatacgctactggtcgccttgccccgggaattcgggggtctccccgactgggttacttggtggcacacaacctgctgttggcccatgccaaggtgtggcacctgtataatacctctttcagacccacccagggtggtcaggtctctatcgccctgtcttctcattggatcaaccctaggcgaatgacggaccattctatcaaggagtgccagaagtcacttgacttcgtcctcgggtggttcgccaagcctgtttttatcgacggcgactatcccgaaagcatgaagaataatttgagcagtatcctccccgactttactgagagcgagaaaaaatttatcaaggggacggcagatttctttgccctttgttttggcccaaccttgtccttccagctgctggatccccatatgaagtttagacagcttgagagccccaacctgaggcagctcctgtcatggattgacctggagtttaaccatccccagatctttattgtggagaatggatggttcgtctcaggcaccacaaaacgcgatgatgctaaatatatgtactatttgaagaagttcattatggagaccctgaaggccattaagctggatggcgttgatgtgattggatatacggcctggagcttgatggacggattcgaatggcatcgcggttactcaattcgccggggcctcttttatgtggacttcttgtcacaggataagatgctcctgccaaagtctagtgcactgttctatcagaaactcatcgaaaagaacgggttcccccccctccccgagaaccagcctctggagggaaccttcccttgcgatttcgcttggggcgtggtggacaactacatccaggtggatactacactctctcagtttacagaccttaatgtgtatctgtgggacgtacatcatagcaagaggctcatcaaagtggacggcgttgttactaagaaaagaaaatcatattgtgtggactttgccgcgattcagccacagattgcccttctgcaagagatgcacgttacgcatttcagattctctctcgattgggccctgatccttcctctggggaaccagtcacaggtcaatcacaccatactgcagtattatcgatgcatggcaagcgagttggtccgggtgaatataacacctgtggtggcgctgtggcagcctatggcgccaaaccagggactccccagactgctggctaggcagggtgcgtgggaaaatccttacactgccctggcattcgccgagtacgcacgcctttgttttcaagaactgggacaccacgtaaagctctggatcactatgaacgagccttacacccgcaatatgacctacagtgcaggacataatcttttgaaggctcatgcactcgcctggcatgtgtataacgagaagtttcgacatgcccagaacggcaaaatttccatcgcccttcaggccgactggattgagcctgcatgtcctttttcccaaaaggacaaggaggttgcggaaagggtcctggaattcgatattggatggctcgctgagcctatttttggttctggggactacccctgggtgatgcgcgattggctgaaccagagaaacaacttcttgttgccctattttactgaggacgagaaaaagctgattcaagggacatttgactttctggcactgtcccattatacaaccatcctggtagattccgaaaaagaggacccaattaaatacaacgactatctggaagtacaagagatgactgatataacatggctgaactctccatcccaggtggctgtggtaccatggggattgcggaaggtgctcaactggttgaagttcaaatatggagacctgcctatgtatattatcagtaatggaattgatgacggcctgcacgctgaggacgaccagttgcgagtatactacatgcaaaactatatcaatgaggcactgaaggcccacatactcgatgggataaacctgtgtggttattttgcgtactcctttaacgaccgaacagcccccagatttggactctaccggtacgcagccgatcagtttgagccgaaggcctcaatgaagcactacaggaaaataatcgactccaacgggttccctgggcctgaaacgctcgagcggttctgtccagaggagttcactgtttgcaccgagtgctctttctttcacactagaaagagcctcctggcgtttatcgcttttctgttttttgctagcatcatcagcctgagcttgatcttctactattccaaaaagggaaggcgaagttacaag

SEQ ID NO: 149646 - DNA, 3036 bp, Artificial Sequence
  derived and/or modified sequence
atgccggctagcgcgcctcctcgcagaccacgcccgcctccaccgtcattgtccctgctgcttgttctgctggggctgggagggaggcggctgcgggccgagccgggcgatggtgcccagacatgggcccgcttctcacgaccgccagccccagaggctgcaggcttattccagggaacttttccggatggctttctgtgggctgtaggtagcgccgcctaccagaccgagggtggctggcaacaacatgggaaaggtgctagcatttgggacaccttcactcaccacccactggcgccaccaggagactctcgcaatgcaagtctgccgttgggggcgccatcacctttgcagccagccaccggcgacgtagcctccgacagctacaataatgtatttagagatacagaagccctgcgggagctgggcgtaacacactacaggttttcaattagttgggcacgcgttctgcccaacggaagtgctggtgtaccgaaccgcgagggattacgttactaccgtcgcttgctcgagagattgcgcgagttaggggtgcaacccgtggtgaccttgtatcattgggatctgccacaacgattgcaagacgcatacggcgggtgggcaaacagggcgctggcagatcatttcagagattatgcggaactctgcttcaggcacttcggaggccaggtaaagtactggatcacaatcgacaacccttatgtggtggcatggcatggatacgccactggaaggctggcacctggtataagaggcagtccaagactgggctacctcgtggcccataatctgctgcttgctcacgccaaagtctggcacctgtacaacactagctttcgcccaacccagggagggcaagttagcattgcgttatccagccactggatcaatccaaggagaatgaccgaccatagtataaaagagtgtcagaaaagcctggacttcgttctggggtggttcgccaagcctgtgttcatagacggagattatcctgagtctatgaagaacaatctgtcttccatcttgccggacttcacggaatctgagaaaaaattcatcaagggaactgccgatttttttgctttatgctttggtccaacactttcttttcagcttctcgacccccacatgaagtttagacagttggagagtccaaacctgcgccaacttctcagctggatcgatttagagttcaatcacccccagatcttcatagttgaaaacggttggtttgtaagtggtacaaccaagcgcgacgatgccaagtatatgtattaccttaagaagttcattatggagaccttgaaagctattaagctcgatggggtggacgtcatcggctacacagcatggtcattaatggacggctttgaatggcatcggggatacagtatccgaagggggttattctatgtcgatttcctttctcaggacaaaatgctcttgcccaagtcttctgccctcttctaccagaagctgatagaaaagaacggatttccccctctccctgaaaatcagccattggaagggacgtttccctgcgatttcgcctggggagtggtcgataactacattcaagtcgataccacactgagtcagttcacagacctgaatgtgtatctgtgggacgtacaccattctaagcgactcatcaaagtggacggcgttgtgactaagaaaaggaaatcctactgcgtcgacttcgccgcgatccagcctcagattgctttgctgcaagagatgcatgttacgcacttccgctttagcctagattgggcactgatcctacccctggggaatcagagtcaagtgaatcatacaatattacagtactatcgatgcatggcctccgaactcgtgagagtgaacatcacccctgtcgtagccctgtggcagccaatggcacccaaccaaggcctcccacgcctcctcgcacgacaaggtgcctgggagaatccttacacagcactggccttcgcagaatacgctaggctctgctttcaagaattaggccatcacgtcaagctctggattaccatgaatgagccttataccagaaacatgacctactccgccggacacaatttattgaaggcacacgccttggcatggcatgtgtacaatgaaaagttcagacatgcccagaatgggaagatctctatcgcccttcaggctgattggattgagccagcctgtcctttttcccagaaagataaagaggtggcagaacgcgtactggagttcgatataggctggctggccgaaccgatttttgggtcaggtgactatccatgggtcatgagggattggctgaaccagcggaacaatttcctgctgccttatttcactgaagatgagaaaaagctgatccaaggtactttcgactttctggccttgtctcactacaccacaatcctggtggacagcgagaaggaggaccctatcaaatacaatgattatttggaagttcaagagatgactgacattacctggttgaatagcccgtctcaggtggccgtggtaccgtggggtttgcgcaaggtattaaactggcttaaattcaagtatggagacctcccaatgtacataatttccaacggcatcgatgatggactgcacgccgaggacgatcagctgcgggtgtattatatgcaaaactacatcaacgaagctcttaaggctcacattctggacgggatcaatctgtgtggatacttcgcttatagctttaatgacagaaccgccccacggttcggactctatcggtatgcagctgaccaattcgagccaaaggctagcatgaagcattatcgtaaaatcatcgattcaaatggtttcccaggacccgaaacactggaacggttctgccccgaggaatttacagtctgcaccgagtgtagcttctttcacactagaaagtcgcttctggcgttcattgcgttcctgttcttcgccagtattatttccttatcactcatcttttactactccaagaagggtcgtcgcagttataaa

SEQ ID NO: 149647 - DNA, 3036 bp, Artificial Sequence
  derived and/or modified sequence
atgccagcctcggcgccacctaggcggcctcggccacctccaccttcgctgagccttctgctcgtgctgctggggctcggagggcggagactgcgagctgaacctggagatggtgcccaaacgtgggcacgcttttcccggccacccgcccccgaggccgcagggctttttcagggcacgtttcccgatggttttttgtgggcggtgggttcagcggcctaccaaaccgaaggaggttggcagcaacacggtaagggggcaagcatttgggatactttcacgcatcacccgttggcacctccgggtgactccaggaacgcatcgcttccactgggagcacctagcccccttcagcctgccaccggtgatgtggcctcggatagctataacaatgtgttccgagatactgaggcccttagggaactcggtgtgacccactaccggttttcaatttcgtgggctagggtgctcccaaatggttccgcgggagtgcccaatagagaaggactccggtactaccgcagattgcttgagaggcttagagagctgggagtccaacctgtggtgacgttgtaccattgggaccttcctcaacgcctgcaggatgcatacggtgggtgggcaaaccgcgctcttgcagaccacttccgggattacgccgaactttgcttcaggcatttcggaggtcaggtgaagtactggattactattgacaacccctacgtggtggcctggcatgggtacgcgaccggtcgactcgcccctggaatacgagggagccctcggctggggtacttggtggcccataatcttcttctggcgcatgccaaggtgtggcacctctacaacactagctttaggccaacccagggaggacaggtttccatcgcactttcgtctcattggattaatcctcgccgtatgactgatcactcaattaaggaatgccagaagagcttggactttgttctgggctggttcgctaagcctgtgtttattgacggagattaccctgagtctatgaaaaacaacctgtcgtcaatactcccagactttactgagtcggaaaagaaattcataaagggaacggctgacttttttgcactttgtttcggccccaccctgtcgtttcagttgcttgatcctcacatgaagtttcggcaactcgaatccccaaacctccgccaactgctttcctggatcgatctggaattcaaccatccacagatattcatcgtggaaaatgggtggtttgtgagtggcactactaagcgtgacgacgcaaagtacatgtattacttgaaaaagttcataatggaaactcttaaggcaattaagctcgacggagtcgacgtgatcggatacacggcttggtcccttatggacggttttgagtggcatcgaggttacagcatcagacggggccttttctatgtggattttctttcccaggataagatgctgttgcccaagagctccgcactgttctaccaaaagctgattgagaagaatggatttccacccttgcccgagaatcagcctctcgaaggaaccttcccttgcgactttgcgtggggcgtcgtggataactacattcaagtggataccactttgtcccaatttaccgaccttaacgtctacctttgggacgttcatcattccaaacggttgatcaaagtcgacggagtggtgactaagaaacgaaagtcgtactgcgtggattttgcagcaatccaaccacaaattgcgcttctccaagagatgcacgtgactcatttccggttttctctggattgggcacttatcttgcctctgggcaaccaaagccaagtcaatcatacgatccttcaatactaccgctgcatggcttccgaactggtgcgtgtgaacataaccccagtcgtggctctgtggcagccaatggcacccaatcagggacttccacggcttttggccaggcaaggagcttgggagaatccatacaccgcactcgcctttgccgaatacgcaagactctgttttcaagagctgggccatcatgtgaagctgtggatcactatgaatgagccatacactcgtaatatgacctactcggctggccataacctcctgaaggcacatgcattggcgtggcacgtttacaatgagaaatttcgccacgcccaaaatgggaaaatctcaattgcacttcaggctgattggattgaacctgcatgtccgttctcacaaaaagacaaggaggtggcagaacgcgtccttgagtttgacatcggctggctggcggaacccatttttggttcgggcgattacccttgggtcatgcgagactggcttaatcaacgcaataactttctcctgccatacttcactgaggatgagaagaagttgattcagggtaccttcgatttcctcgcactttcgcactacactactattctggtggactcagaaaaagaggaccccatcaaatacaacgattacctcgaagtccaggaaatgactgatatcacttggctgaattccccaagccaagtggcagtcgtgccttggggtttgcgtaaagtgttgaactggctgaagtttaagtatggagatctgccaatgtacattatctcaaacggaatagatgatggacttcacgcagaggacgatcagctgcgggtgtactacatgcagaattacatcaatgaagcccttaaagcacatatcctggacggaattaacctgtgtggatactttgcatattcgttcaacgatcgtaccgcgcccaggttcgggctttatagatacgcagcagatcaatttgaaccgaaggcatcaatgaaacactacaggaagattattgattcaaacggatttccaggacccgagactctggaacgattttgccctgaagagtttaccgtctgcaccgaatgctcctttttccataccagaaagagccttctggcctttatcgcatttctcttctttgcctcgatcatttcactttcgcttatcttttactatagcaagaaaggcagacgttcgtacaag

SEQ ID NO: 149648 - DNA, 3036 bp, Artificial Sequence
  derived and/or modified sequence
atgcctgcatccgcaccaccaagacggccccgcccaccacctccttccttgagcctgctcctggtgcttctcggcctgggtggtcggcgactgagagccgaaccaggtgacggtgcacaaacctgggcgaggttttctaggcctccagcccctgaagcagcaggactcttccaaggcaccttcccagacggatttctgtgggcagtcggatcagcagcctaccaaaccgagggaggatggcagcaacacggtaagggcgcatcaatttgggacacctttacccaccacccactggcccctccaggtgattcccggaatgcatcgctcccactcggcgcaccttcgcctctgcagccggcaacgggagatgtggcatctgatagttacaataacgtgtttagagatactgaagctctgcgggaactcggtgtgacccattacaggttctctattagctgggcaagagtgctgccaaatggatccgcaggagtccccaacagggaaggtctgcgctactatcgccgcctgctggagagattgcgcgaacttggcgttcagcctgtcgtgactttgtaccattgggaccttccacagagactccaggatgcctacggcggatgggcaaacagagcactggcagatcatttcagggactacgcagaactctgttttagacatttcggcggacaagtgaagtattggatcactattgacaacccttacgtggtggcttggcatggatacgcaacgggacggctggcgcccggaatcagaggttcgcctaggcttggataccttgtggcacataacttgctgctggcccacgccaaagtgtggcatctgtacaatacttcatttcgtccgacccaaggtggacaagtgtcgatcgctctctcctcacattggattaacccacggaggatgactgaccactcaatcaaggagtgtcagaaatcgctggattttgtgcttggttggtttgcaaagcctgtgttcatcgacggggactaccccgagtcgatgaagaacaacctgtcgtcaatccttcctgatttcaccgaaagcgaaaagaaattcatcaagggaactgcagacttcttcgcgttgtgtttcggccctaccctttcattccagcttcttgaccctcacatgaagtttcggcaactggaatcccccaacctgaggcagcttctgtcgtggattgacctcgaattcaatcacccacaaatctttattgtggagaatggatggttcgtctctggaaccactaagcgcgatgacgcaaaatacatgtactacctgaagaagttcatcatggaaactttgaaggccattaaacttgatggagtggatgtgattggctacaccgcatggtcactgatggatggatttgaatggcacagaggctactcgattaggcgcggccttttctatgtggattttctctcccaagataagatgctcctgccgaagtcgtcggcactcttctaccaaaagctcatcgaaaagaacgggttccctccacttcctgaaaaccagcctctggagggaacttttccttgtgatttcgcctggggagtcgtggataactatattcaggtggatacgaccctctcccagtttacggatttgaacgtgtacctttgggatgtccatcacagcaagagacttatcaaggtcgacggagtggtgaccaagaaaagaaagtcgtattgcgtggactttgcagcaattcaacctcaaatagcacttctgcaagaaatgcacgtgacccactttaggttttcgctggattgggcgctgatcctgcctttgggtaaccaatctcaggttaatcacacgattctgcaatactaccgttgtatggcatcagaactcgtcagggtcaacatcactcctgtggtggccctttggcaacctatggctccaaaccagggtttgccgcggctcctcgcccgccagggtgcctgggaaaacccatacactgcactcgcgtttgcagagtacgcacgtctgtgttttcaagaactgggacatcatgtgaaactttggataactatgaacgagccctacacgcgcaacatgacctattcggcgggacataacctgctgaaggcacatgctctggcctggcatgtctacaatgagaaattcagacatgcacagaacggaaagatcagcatcgcactgcaggccgactggattgagccggcctgccctttttcgcagaaggataaagaagtcgcagagagagtcttggagtttgatataggttggctggcagaacccatatttggctcgggcgactacccttgggtgatgcgagattggctgaatcagcgcaacaactttcttctcccttactttaccgaggatgaaaagaaacttattcagggcacttttgacttccttgcgctttcccactacaccactatactggtggattccgaaaaagaagatccgataaagtacaatgattacttggaagtgcaggagatgacggatatcacttggctgaactctccttcacaggtggctgtcgtgccttggggactccgcaaggtcctgaattggctcaaattcaagtacggagatcttccgatgtacattatcagcaatggaatcgacgacggacttcatgcagaagatgatcagttgagagtgtactacatgcaaaactacataaatgaagccctcaaggcgcacatactggatggaattaacctttgcgggtactttgcatactcatttaacgacagaactgcaccaagatttgggctctacaggtatgcggccgatcaattcgaacccaaagcaagcatgaagcactaccggaagataattgactcgaacggcttcccggggcctgagactctcgagcgattctgtccagaagagtttacggtgtgtactgagtgcagcttttttcacaccagaaaatctctgctggcatttatcgctttcctcttcttcgcctcgattatctcacttagccttatcttttactacagcaagaagggtcggcgctcatacaag

SEQ ID NO: 149649 - DNA, 3036 bp, Artificial Sequence
  derived and/or modified sequence
atgcccgcatctgccccccccagacgcccccgtccccctcccccatcgctgagtctcctacttgtcttattgggcctggggggtcgtcgcctgcgagctgagccaggagacggagcccagacttgggccagattcagtcgaccccctgcgccagaggctgccggcctcttccaggggacctttcccgacggcttcctttgggccgtaggttcagcagcataccagacagagggcggatggcaacagcatgggaagggagcctctatttgggatacattcacacaccaccctttggccccccctggcgacagtcgaaatgcatcactgccattaggggccccttctcccctacagcctgctacgggcgacgttgcatccgattcctacaacaacgtgtttcgagataccgaggcgctcagagagctgggggttacacattatcgcttttccatctcgtgggctcgcgtgctgcccaacggctcagccggagtgcccaatcgcgaggggttgaggtactaccggaggctgctcgagcggctgcgcgagctcggagttcagccagtggtgacactctaccactgggacctgccgcagcgtctgcaggacgcatacggagggtgggccaaccgggcactagcggatcatttccgagactatgcagaactgtgttttaggcactttggagggcaagtgaagtactggattaccatcgataatccgtatgtagtggcatggcatggctatgctactggtagactggccccagggatcagggggtctcctaggctaggttatttggtcgcacacaacttgctgttagcccacgctaaggtgtggcacttatataatacctcattccggcccacgcagggcgggcaggtgagcatcgccctttcttctcactggattaacccacgccgaatgaccgatcatagcattaaagagtgccagaagtcactggactttgtgctgggatggtttgcaaaacccgtatttatagacggtgactatcctgaatctatgaagaacaatttgtcatctatattacctgactttactgagagcgagaaaaagttcatcaaaggaactgcagacttcttcgctctgtgttttggccccacacttagttttcagctgcttgatccacacatgaagttccgccagctggaatcccctaacctgcgacagctgctcagctggatcgacctggagtttaatcatccacagatctttatcgttgagaatgggtggtttgtgtcaggtacaacgaaacgcgatgacgcgaagtatatgtattacctgaaaaaatttattatggagacgctcaaggcaataaaactggacggcgttgatgtgatcggctacacagcctggtcgttaatggacggcttcgaatggcacaggggctattccataaggcggggactgttttacgtggatttcctttcacaggataagatgctgctgcctaagagctccgctctgttctaccagaaactcattgaaaagaatggcttcccacctctgccagagaatcagcccctggaggggaccttcccatgcgactttgcctggggcgtggtggataactacattcaggtcgacactactttgagccagttcaccgatctgaatgtgtacctctgggacgtccaccacagcaagcggttaatcaaggtggacggtgtggttacaaagaagcggaaaagctactgtgtggactttgcagccattcagccccaaatcgccctccttcaggagatgcacgttacacacttccggtttagtctggattgggcgcttatcttgcccctagggaatcagtcgcaagtgaaccatacgatccttcaatactatagatgcatggcctctgagctcgttcgagtgaacatcacgccagtcgtggcactttggcagccaatggcccccaatcaagggctcccaaggctgctcgctagacagggggcttgggaaaatccttatacagctctagcattcgcggaatatgcaaggctgtgcttccaagagctcggccaccatgtcaaactgtggattaccatgaatgaaccttacacacgaaacatgacatacagcgccggtcacaatttgcttaaagcgcacgccctggcctggcacgtctacaatgaaaaattccgccatgcacaaaacggcaagataagcatagctctgcaggcagattggatcgagccggcttgcccgtttagccagaaggacaaagaagtagcagaacgggtgcttgagttcgacataggctggctggccgaacccatttttgggtccggcgattatccatgggtgatgagggattggctgaaccaacggaataattttctgttaccgtatttcaccgaagacgagaagaaactgatacaagggacatttgactttctggccctctctcactacaccaccattctggtggattccgagaaggaagatccaattaagtacaacgattatcttgaagtccaggagatgacagacatcacttggttaaactccccatcacaggtggctgtggtcccctggggacttcgcaaagtactgaactggcttaaatttaagtacggagatctccccatgtacatcataagtaacggaattgacgacgggctgcacgctgaagatgaccagttaagagtgtactatatgcagaactacataaatgaggctcttaaggcccacatcttagatggaattaatctgtgcggctacttcgcttattcctttaatgacaggactgcacctaggtttggtctgtataggtatgccgccgatcagtttgaacccaaagcttccatgaagcattatagaaaaatcattgatagtaacgggttcccaggccccgagacactggaacggttctgcccagaggagttcaccgtgtgcacggagtgcagctttttccacacaaggaaatcattgttggcattcatcgccttcctattcttcgcctctatcatcagcctgagtcttatcttctactacagcaagaagggaaggcgatcgtacaaa

SEQ ID NO: 149650 - DNA, 3036 bp, Artificial Sequence
  derived and/or modified sequence
atgcctgcaagcgcgccacctcgccgcccgcggcctccaccacctagcctgtccctgctgctcgtgctcctcgggctggggggacgcagactgagggcggaacctggggatggtgcgcagacttgggcacgcttttctcggccgccggctcctgaggccgcagggctgttccagggtaccttcccggacggattcctgtgggccgtgggatcagccgcgtaccagactgaaggaggctggcagcagcacggcaagggcgcctcgatttgggacacttttactcaccacccactggccccaccaggagatagccggaatgccagcctgccactgggagccccaagcccgctccagccggccaccggcgacgtggcaagcgactcctacaataacgtgttccgcgatacggaagccttgcgcgagctcggagtcacgcattacagattctccataagctgggccagggtgctcccaaatggatccgctggcgtgcccaaccgcgagggcctccgctactaccggagactcctggagcgcctccgggaactgggagtccagccagtcgtgaccctttaccactgggacctgccgcagagactgcaagacgcctatggaggatgggcaaatagagcgctggcggatcatttcagagactacgctgagctgtgcttcagacacttcggaggacaggtgaagtactggatcaccatcgataatccgtacgtggtcgcgtggcacggatacgctaccggacgcctcgcaccgggcatccggggatcgccgaggctgggttacctggtggctcacaatctgctgctcgcccatgccaaggtgtggcatctttacaatacttcgtttaggccgactcaaggcggacaagtctccatcgctctcagctcacactggatcaacccacgccgtatgaccgatcattcgatcaaggaatgccaaaaatcgctggattttgtgcttggttggtttgccaagccagtgtttatcgacggcgattacccggaatccatgaagaacaatctctcatccatcttgccggattttactgagtcagaaaagaaattcatcaaaggaaccgccgactttttcgcgctgtgcttcggacctaccctgtcattccaactgctggatccacacatgaagttccgccagctggaatcgcctaatctcagacaacttctgtcttggatcgatctggaattcaaccatcctcaaatcttcatcgtcgagaatgggtggttcgtgagcggaactactaaacgtgatgatgcgaagtatatgtattacctgaagaagttcatcatggaaacccttaaggccatcaagctcgacggagtggatgtgatcggttacactgcttggtccttgatggacgggttcgaatggcacaggggatactcaattcgccggggactcttctacgtggatttcctttcgcaggataagatgctcttgccgaaaagctctgctctgttttaccaaaagctgatcgaaaagaatggattcccgcctctgcctgagaaccaaccactcgaaggcaccttcccgtgtgacttcgcgtggggagtggtggacaactacattcaggtcgacacgaccctcagccaatttactgaccttaacgtctacctgtgggacgtgcaccactccaagagactgatcaaagtggacggagtcgtcaccaaaaagaggaagtcctactgtgtggacttcgccgcgattcaaccgcagatcgccctgcttcaggaaatgcatgtgacccacttccggttctcccttgattgggcactcatcctcccactgggaaaccagtcgcaagtcaaccacactatcctgcagtactaccgctgcatggcatcagaactcgtccgcgtcaacatcactccggtggtggcgttgtggcagccgatggctcctaatcagggactcccaagactcctcgctcggcagggtgcctgggaaaatccgtacacggcgctcgcgttcgcggaatacgcgagactgtgcttccaggagctgggacaccacgtgaagctctggatcacgatgaatgagccctacacccgtaacatgacttacagcgccggccataacctgctgaaggcccacgccctggcctggcacgtgtacaatgaaaagttccgccacgcgcagaatggcaagatctcaatcgccttgcaggcggattggattgagcccgcctgcccgttttcccagaaggataaggaggtcgctgaacgggtgttggagttcgatatcggatggctggccgaaccaatcttcgggtcaggagactacccgtgggtgatgagagactggctcaaccagcgcaacaacttcctgctgccatacttcactgaagatgaaaagaagctcatccagggcacgttcgacttcttggcactgtcgcactacactactatcctggtggactccgagaaggaggaccccatcaaatacaacgactacctcgaagtgcaggaaatgactgacatcacttggctgaactccccgtcgcaggtggccgtagtgccatggggacttcggaaagtcctgaactggctcaagttcaagtacggcgatctgcctatgtacattatctcgaacggaatcgacgacggactccacgctgaggacgaccaactgcgggtgtactacatgcaaaactacataaacgaggcgttgaaggcccacatcttggacggtatcaatctttgcggctacttcgcttactcgttcaacgatcggactgcaccgagatttggcttgtaccggtatgccgccgatcagttcgagccaaaggctagcatgaagcactacagaaaaatcatcgactcgaacggatttcccggaccggaaaccttggagcgcttctgcccggaagaatttaccgtctgcactgaatgctcatttttccacactcgcaagtcactgctggctttcatcgccttcctcttcttcgcatccatcatctccctctcgctgatcttttactactcgaagaaggggcgccgcagctacaag

SEQ ID NO: 149651 - DNA, 3036 bp, Artificial Sequence
  derived and/or modified sequence
atgccagcctcggcaccgccacggcggccaagacctccaccaccaagcctgtcgcttctgttggtgctccttgggctcggcggaaggagacttcgggccgagccgggcgatggagctcaaacctgggctcggttctcacgtccccctgccccagaggccgccggtctttttcagggtaccttcccggacggttttctttgggcagtgggctcggcagcgtatcagacggaggggggctggcaacaacacggtaagggcgcctcaatctgggataccttcacccaccatccactggcaccaccaggagactccagaaacgcatcgcttccacttggagctccttcacccttgcaaccagcaactggggatgtcgccagcgactcgtacaacaatgtgtttcgcgataccgaagcactgcgcgagctcggagttactcattacaggttttcgatttcctgggcacgcgttctgccaaatgggtccgcgggagtccccaaccgagaagggcttcggtactacaggagactgcttgagaggctgcgagaactgggtgtgcagcctgtggtcaccctgtaccactgggacctgcctcagcgcctccaagatgcgtacggaggatgggctaatagagcacttgcagatcatttccgggattacgcggaactgtgcttcaggcatttcggaggacaagtgaagtactggatcactatcgacaacccttacgtggtggcatggcatggatacgcaaccggtaggctggcaccaggtattagaggaagcccgaggctcggatacctcgtcgcgcacaaccttttgctcgcacatgcaaaagtgtggcacctgtacaatacctcgtttaggccaacccaaggaggacaagtctcaattgctctgtcgtctcactggattaacccacggcgcatgactgatcattcgatcaaggaatgtcaaaagtcactcgactttgtgctcgggtggtttgctaagccagtgtttattgatggagattaccctgaatcgatgaagaataacttgtcctcgattctgcctgattttaccgaatcggagaagaaattcattaaaggcacggccgacttttttgcattgtgtttcggccccactctttcgtttcagcttcttgaccctcacatgaaattcagacagcttgagtctccaaaccttcgccagcttctgtcctggatcgacctggagtttaaccatcctcagatcttcatcgtggaaaacggctggttcgtctccgggaccaccaagagagatgatgcaaagtacatgtattacttgaagaagtttatcatggagactctcaaagccattaagctcgacggtgtcgatgtgattgggtatactgcatggtcgctgatggatggttttgagtggcatcggggctactcgatccgccgcggcctcttttacgttgattttctctcgcaagacaaaatgctgctgcccaagtctagcgctcttttctaccagaaacttatcgaaaagaacggatttccccctctccctgagaaccaaccacttgaagggacctttccttgtgattttgcatggggagtggtcgataactacattcaagtggataccaccctgtcgcaattcaccgatctcaatgtgtacctgtgggacgtgcatcatagcaagcggctcattaaagtggacggtgtggtgaccaaaaagagaaagtcatactgtgtggactttgctgcaatccaaccgcaaatcgcacttcttcaggagatgcatgtcactcactttaggttttcgcttgattgggctctgatccttcccctgggcaatcagtcccaagtgaatcatactatactccaatactaccgttgcatggcatccgaacttgtccgagtgaacattacccctgtcgtggccctttggcagccgatggcgcctaatcaaggactgccgcgcctgttggcacgacagggtgcctgggaaaatccctacaccgcacttgcatttgcagaatacgcccgcctctgctttcaggagcttggccatcatgtcaaactgtggattactatgaatgaaccatacacccgaaacatgacgtacagcgctggtcacaacctcctcaaggcgcacgccctggcctggcatgtctacaacgaaaagttccggcatgctcagaacggaaagataagtattgcactgcaagctgattggattgagcccgcatgtccctttagccagaaggataaggaagtggctgaacgcgtgctggagttcgacataggatggctggcggagcctatctttggatcaggagactatccttgggtgatgcgagattggctgaaccagcggaacaacttccttctgccctactttaccgaagatgaaaagaagctcattcaaggaacgtttgattttcttgcactgagccattacacgactattctggtggattcggagaaagaagatccgattaagtacaacgattacctggaagttcaagagatgaccgatattacctggcttaattcgccttcgcaagtcgcagtggtcccatggggattgcgaaaggtgctgaactggcttaagttcaaatacggcgaccttccaatgtacatcatttccaatggaattgatgacggacttcatgcggaggatgaccagctgcgcgtgtattacatgcagaattacatcaatgaggcactgaaagcccacattctggacggtattaacctttgcggctacttcgcatactcctttaatgatagaaccgccccccgttttggcctgtaccggtacgctgctgatcaattcgaaccaaaggccagcatgaagcactaccgtaaaatcatcgattccaatggatttcctggaccagaaacccttgaacgtttctgccccgaagaatttaccgtctgtaccgaatgtagcttttttcataccagaaagtcccttcttgcgttcattgcatttctcttttttgccagcatcatcagcctttccctcattttctactattcgaagaagggtcggcgatcgtacaag

SEQ ID NO: 149652 - DNA, 3036 bp, Artificial Sequence
  derived and/or modified sequence
atgcccgcgtcggcaccgccacggcggcctcgtccacctcccccctcactctccctgctgctcgtgttgctgggactcggaggccggcggctgagggctgagccaggcgacggcgcacagacctgggcaagattctcccggcctcctgcgccagaagcggctgggctctttcagggtaccttcccggatggattcctctgggccgtgggcagcgcagcataccagactgagggaggatggcagcaacacggcaaaggcgcctcgatctgggacaccttcacccatcatccgttggcgccgcccggagattcccggaatgcgtctcttccgttgggggccccgtcgccgctgcagccagccactggagatgtggcctccgactcctacaataacgtcttcagagacacggaggccctgagggaattgggagtcacccattaccgcttttctatcagctgggcacgagtgctgcctaacggatcagcgggagtcccgaacagagaagggctcagatactaccgcagactcctggaacgactgcgagaactgggtgttcaaccggtggtcacgttgtaccactgggacttgccgcagcgacttcaggacgcatacggaggctgggcgaaccgcgccctcgcagatcacttcagggactatgctgaactgtgctttagacactttggtggacaggtgaaatactggattactatcgacaacccttacgtggtggcgtggcacggctacgcgactggcagactggcacccggcatccggggatccccaaggctgggatatctggtggcccataatctgctcctggcccatgcgaaggtttggcacctttacaacacctcgtttcgcccaacgcaaggaggacaagtctcgattgccctcagctcccactggattaacccccgccgtatgactgatcacagcattaaggaatgccaaaagtcccttgatttcgtgctcggttggttcgccaagcccgtctttatcgacggcgactaccctgaatcgatgaagaacaatctcagcagcatccttccggactttaccgagtccgaaaagaagtttatcaagggcaccgccgacttctttgcgctttgcttcgggcccactctgagcttccaactcctggaccctcacatgaagttcagacaacttgagtcgcctaatctgcggcaactcctcagctggatcgacctggaattcaatcatccacaaattttcattgtggaaaacggttggttcgtctcagggaccactaagcgggatgacgctaaatacatgtactatctgaagaagttcatcatggaaacgttgaaagccatcaagctggatggtgtggatgttatcggatacaccgcctggagcctcatggacggtttcgaatggcatcggggatactccatccggcggggattgttctacgtggatttcctttcccaagataagatgctgcttcctaaatccagcgccctgttctaccagaaactgatcgaaaagaacggatttcctccactcccggaaaaccagccgcttgagggaaccttcccgtgcgacttcgcatggggcgtggtcgacaactacatccaggtggataccactctgtcccagtttactgatctcaacgtttacttgtgggacgtgcaccactccaagcgcctgatcaaagtggacggagtcgtcaccaagaaacggaagagctactgcgtggacttcgccgctatacagccgcagatcgcactgttgcaggagatgcacgtgactcacttcagattctccctggattgggccctgatcttgccactcggtaatcagtcccaagttaaccatactatcctgcagtactaccgttgtatggcctcggagttggtgagggtcaacatcaccccagtggtggccctgtggcaaccgatggctccaaatcaaggcctcccccgccttctcgcgagacaaggtgcctgggaaaatccgtacaccgccctggcgttcgccgagtacgcccgtctgtgcttccaggagctggggcaccacgtcaaactgtggataactatgaatgagccgtacactcggaacatgacgtactctgcgggccataacctgctgaaggcccacgctctggcttggcatgtgtataacgaaaagttccggcacgcccagaacggtaagatctcaatcgccctgcaggcggactggatcgaaccagcctgtccgttctcccaaaaggataaagaggtggccgaacgcgtgctggaatttgatatcgggtggctggccgagccgatcttcggtagcggagattacccgtgggtgatgcgggactggctcaatcaacgcaacaactttctcctgccgtacttcaccgaggacgaaaagaaacttatccagggaacttttgacttcctggccctgtcgcactacactactatactggtcgattcggaaaaagaagatccgatcaagtataacgactacctggaagttcaggagatgaccgacatcacttggctgaactccccttcacaggtggcagtcgtgccttggggtctgcgcaaggtgcttaattggctcaagttcaaatacggagatctgcccatgtacatcatctcgaatggaatcgacgacggcctgcacgcagaggatgatcagctccgcgtgtactacatgcagaattacattaatgaggcactgaaggcgcatatcctggacggtataaacctctgtggttactttgcgtactcatttaacgatcgcaccgcccctcgattcggactctaccggtacgctgctgaccagttcgagccgaaagcgagcatgaagcactaccgcaagatcatcgacagtaatggcttcccgggaccggaaacgctggaacgcttctgcccggaggagttcaccgtttgtaccgaatgttcgttcttccatactcggaagtcgctcctggcctttatcgcgttcctcttcttcgcctcgattatttcgctgtccctgatcttttactattcgaagaaaggtcggaggagctataag

SEQ ID NO: 149653 - DNA, 3036 bp, Artificial Sequence
  derived and/or modified sequence
atgccagcttccgccccgcccagacgacctcgaccccctcccccatctttatcactgctcctggtgctgctcgggctgggaggtcgacgattacgggccgagcctggagatggagcccagacatgggcaaggttctcacgaccccctgccccggaagcagcaggccttttccaaggaacatttccagacgggttcttgtgggccgtggggtcggctgcctaccagacagagggaggctggcagcagcatggtaaaggcgcgagtatttgggacactttcacccatcatcctctggctccgcctggcgacagcaggaacgcgtccctacccctgggcgccccatctccccttcaacccgccacgggtgatgtggcgagtgactcttataataacgttttccgtgatacagaagccctgagggaactcggcgtgacacattacaggttttcgatcagctgggcacgagtactccctaacggtagcgccggcgttccaaacagagagggtcttcgatactatagaaggctgttggaacggttgcgggagctcggagtccagcctgtcgtaaccctgtatcattgggatctgccccagcggctccaggatgcgtatgggggttgggctaatagggcgctggccgaccattttcgggattacgcagagctgtgcttccgacactttggcggacaggttaagtattggatcaccatcgataacccatatgttgttgcctggcatgggtacgccaccggaagactcgcacctgggattcgaggatccccaagactggggtatttggttgcccacaatctgctccttgcacacgctaaggtgtggcatctctataatacatccttcagacctacacagggtggtcaggtgagcattgccctgtcctcacactggatcaatcctaggcgaatgaccgaccacagcatcaaggaatgtcagaagtcactggattttgtgctgggttggtttgctaaaccggtgttcattgacggagattatcctgaatccatgaagaataatttgtctagcatcctgcctgattttacagaatcggaaaagaaattcatcaagggaaccgccgactttttcgccttgtgcttcgggcctacgctcagttttcagttattggacccgcacatgaagttcagacagctggaaagtcccaacttgcgacagcttctgtcctggatcgacctggagtttaaccacccgcaaatctttatagtggaaaatggctggttcgtgagcgggactacaaaacgcgatgatgctaaatatatgtattacctaaagaaatttattatggaaacactcaaagccattaaacttgacggagtggatgtgatcggctatacagcatggtcactgatggacgggtttgaatggcataggggatacagcatacgaaggggccttttctacgtcgactttctttcgcaggacaagatgctactccctaagagctcagccctgttttaccagaaattaatcgaaaaaaacggattcccacctctgcccgagaatcagcccttagaaggtacgtttccctgcgacttcgcctggggagtcgtagacaattacatccaggtggacacgacactcagtcagttcaccgatctgaatgtgtatctttgggacgtccaccattctaagaggctgataaaagtggacggagtcgtcaccaaaaaacgaaaatcctattgcgtcgactttgcagccattcagcctcagattgccctcctgcaggagatgcacgtgacacacttcaggtttagcctcgactgggccctcatcctgccactggggaaccaatcccaggtgaatcacaccatcttacagtattaccggtgcatggcttcagaactggtgagagtcaatattacccctgtcgtggctctttggcagcccatggccccaaaccagggcctgccaagactgctggcccgacagggagcgtgggaaaacccttacaccgcactagctttcgctgaatacgccaggctttgtttccaagaactggggcatcatgtgaaactctggataacaatgaatgaaccctataccagaaatatgacttactctgccggccataacctccttaaagctcacgccttagcctggcacgtttataatgaaaaatttcgacacgcccagaacggaaagatcagcattgcactgcaggcagattggatcgagccggcctgtcccttctcacaaaaggacaaggaagtggctgagcgcgtgcttgagtttgatatcggctggctggcagaacccatctttggatcaggtgactacccatgggtcatgagagactggctgaatcagaggaacaactttttactgccatattttactgaggatgagaagaaattaatccagggaacgtttgatttcctcgcactctcccattacactacaatcctcgtggactcagaaaaagaagacccaattaagtacaacgattatctggaagtccaggagatgacggacatcacatggttgaactcaccatcccaggtagcggtggtcccatggggactgcgaaaggtgctgaactggcttaagttcaagtacggcgacctgccaatgtacatcatcagcaacggcattgatgatggcctgcacgctgaggacgatcagctcagggtttactacatgcagaattacataaacgaggccctgaaggctcatattctggatggaatcaacctatgcggctactttgcctactcttttaacgatagaactgctccccgatttggattgtatagatacgccgccgatcagttcgagcccaaggcaagtatgaagcattaccggaagataattgatagcaacggctttccaggccctgagaccctggagagattctgccccgaggagttcacagtgtgcacggagtgctccttcttccatactcgaaagagccttctagctttcatcgccttcctttttttcgcctcgattatctcactaagcctcatcttttactactccaaaaagggcagacgttcgtacaaa

SEQ ID NO: 149654 - DNA, 3036 bp, Artificial Sequence
  derived and/or modified sequence
atgccggcgtctgcaccgccacgaagacctaggccacccccgcctagcctttccttgctactagttctattgggcctcggaggtcgccgtctacgtgctgaacctggagacggtgctcagacttgggcccgtttcagcagacccccagccccagaagccgctggcctgttccagggcacctttccggacgggttcctgtgggcggtgggctccgccgcttatcaaacagaaggaggttggcaacagcacggaaagggcgcgagtatctgggatacttttacacaccatccactggccccacccggtgacagccgaaacgcgagcttacccctgggcgcacccagtccgctccagcccgccaccggtgatgtcgcctcggactcgtacaataacgtgttccgtgatactgaagccctgcgcgaactgggtgtgacacactaccgcttttcgatttcatgggccagagtgctgcccaatggctccgccggagtgccaaaccgagaaggcctccggtattataggagactgctcgagaggctgagagaactcggtgtccagccggtcgttacgctatatcattgggatctgcctcaacgtctgcaggatgcgtacggaggctgggccaatagggccttagccgaccactttcgcgactacgcagaactctgctttagacatttcggcggtcaggtcaagtactggataaccattgacaatccttatgtcgttgcctggcatggctacgccaccgggcgcctggctccgggaatacgtggtagcccgcgcttgggatacttagtggctcacaatctgctgttggctcatgccaaagtgtggcatctatacaatacatcctttcgtcctactcagggcggtcaggtgtcaattgccttgtcctcgcattggatcaacccccgtagaatgactgaccacagcatcaaagaatgtcagaagtccctagactttgtgctgggctggtttgccaaacccgttttcattgatggcgattatcctgagagcatgaagaacaacctgtcctctattcttcccgattttaccgaaagcgagaagaagttcatcaaaggtactgctgatttctttgccctatgctttggtcctactctgtccttccagctattggaccctcacatgaagtttcgtcagttagaatcgccaaacctgcgtcaactgttatcatggatcgatctggaattcaatcatccgcagatcttcatagtcgaaaatggatggttcgtgtcgggcaccaccaaacgagacgatgctaaatacatgtactacctcaaaaagttcataatggagacattaaaggcgataaagctggatggggttgacgttatcgggtacacggcatggagcctgatggatgggttcgagtggcatcgtggctacagcattcgccgtggccttttttatgttgattttctgagccaagataagatgcttctaccaaaatcgtcagccctgttctaccaaaagctaatcgagaagaacggcttcccccctttaccggagaaccagcctctcgaagggacctttccctgtgatttcgcgtggggagtggtggacaattacattcaggtggatacaacactgtcgcagttcacagacctgaatgtgtacctgtgggatgtgcaccactcgaagcgcttgattaaggttgatggcgtcgtcactaagaagaggaagtcgtattgcgtggattttgccgccattcaaccgcagatagccctgcttcaggagatgcatgtgacccatttcagattctctttggattgggccctgattttgcccctgggcaatcagtcccaggtgaatcataccatcctgcagtactataggtgcatggcatccgagctagtgagggtcaacattactcctgttgtcgccctctggcaacccatggcgcccaaccagggcctcccccgcctgctggcgaggcaaggtgcctgggaaaacccgtataccgccctggcctttgcggagtatgcgcggctgtgctttcaggaattgggccaccatgttaagctatggataaccatgaacgagccctacacccgcaatatgacgtatagtgccggtcacaaccttctaaaggcacacgctttggcgtggcatgtgtataatgaaaagtttagacacgcccagaacggaaagatttcaatagctctccaagccgactggatcgagcccgcctgcccgttctcgcagaaggacaaagaagtggccgagcgcgtcttggaattcgatataggctggttagctgaacccatcttcggtagtggcgattacccgtgggtaatgcgggattggctgaaccagcggaacaactttctactgccatacttcacggaggatgaaaaaaaactaattcaaggaaccttcgattttctggccctgtcgcattacacaacgatcttggtagatagcgaaaaggaggatcccatcaagtacaatgactatctggaagtgcaggaaatgactgatatcacgtggctgaacagcccctcgcaggtggctgttgtgccctggggcctgcgcaaggtgctgaattggttgaagttcaagtatggagatcttcctatgtacattatttccaacggaatagacgatggccttcacgccgaggacgatcaactgcgtgtctattacatgcagaactatattaacgaggccttgaaggcgcacattttggatggaatcaatctctgcggctacttcgcctacagtttcaacgatcgcacggctccacgcttcggactgtacaggtatgcggcagaccaatttgagccaaaggcgagtatgaaacactaccgaaaaataatcgactcaaacggatttcccggaccagagacgttggagcgtttctgtccggaggaatttaccgtctgcacggagtgcagttttttccacactcggaaaagcctgctggccttcatagccttcctgttcttcgcaagtataatctccctgtcgttgattttttactacagtaagaagggccgacgaagctacaag

SEQ ID NO: 149655 - DNA, 3036 bp, Artificial Sequence
  derived and/or modified sequence
atgcctgcctccgcacctccgcggcgccctagaccgccgccgccatctctgtcgctgctgctggtccttctgggacttggcgggcggcgtctgcgtgcggagccgggagacggcgcccaaacctgggcacggttctcacggcccccagcgccagaggctgccggcctcttccagggaactttcccagacggcttcctctgggcggtcggaagcgccgcgtaccagacggaggggggctggcagcaacatggcaagggagcctcgatctgggacactttcacccatcacccactcgccccaccgggcgattcgcggaatgcgtcgctcccgctcggagccccgtcacctctccagccagcaactggagacgtggcttcggactcctacaacaacgtattccgggacactgaggccctgcgcgagctcggagtgacccactaccgcttctccatttcctgggcacgggtgctgcccaatggaagcgcaggtgtgcctaaccgggagggtctgcgctactaccggcgcctgctggaacggctccgggagctgggggtccaaccggtggtgaccctgtatcactgggatctcccgcagcggcttcaggacgcctacgggggctgggcaaaccgcgcccttgccgaccatttcagagactacgcagaactctgctttcggcactttggaggccaagtgaaatactggatcaccatcgataacccatacgttgtggcatggcatggatacgcgaccggccggctcgcccctgggatccgcggaagcccgcggctggggtatctcgtggcccacaacctgctcctggcccacgcgaaggtgtggcacctgtacaacacgtcgttcagacctactcagggaggacaagtgtcaatcgcgctcagctcacactggatcaatccgcgaaggatgaccgaccactctattaaggaatgccaaaagtcgctcgactttgtgctgggatggttcgcaaagccagtgttcatcgacggagactacccggaatccatgaagaataatctgtcctcgattctgccggatttcacggagtcagaaaagaagttcattaagggaactgccgatttcttcgcgctgtgttttggaccaactttgtcgttccagctgctggacccgcacatgaagttcagacaactggaatccccaaatctccgtcagctgctcagctggattgaccttgaattcaaccatccacagatctttatcgtggaaaatggatggttcgtgagcggcaccaccaagagggacgacgctaagtatatgtattacctgaaaaagtttatcatggaaaccctgaaggccatcaagttggacggagtggatgtgatcggttacaccgcgtggtcactgatggacggatttgaatggcaccggggctactcgatccggaggggactgttctacgtggatttcctgtcgcaggataagatgctgctgcctaagtcaagcgcgctgttttaccagaaactgatcgagaaaaatggatttccgcctctgcccgaaaaccaaccgctggagggaacttttccatgtgatttcgcttggggcgtggtggacaactacattcaagtcgataccactctcagccagttcactgatctgaacgtgtacctttgggacgtgcatcattccaagcggctgattaaggtggacggcgtggtgactaagaagcgcaaaagctactgtgtggacttcgcggcgattcagccacaaatcgccttgctccaggagatgcatgttactcacttccggttctcgttggattgggccttgatattgccgctgggaaatcagtcccaagtgaaccacactattctgcaatactacagatgtatggcatccgaacttgtcagagtgaacatcacccctgtggtcgccttgtggcaaccgatggcccctaatcaagggctgccgagacttctggcaaggcaaggcgcgtgggagaacccgtacactgccctcgcgttcgcggagtacgcccggctctgcttccaggagctggggcatcatgtgaagctgtggatcaccatgaatgaaccgtacactcgcaacatgacgtacagcgctggccacaatctcttgaaagcccatgccctcgcctggcacgtctacaacgaaaagttcaggcacgctcagaacggtaagatctccatcgcactccaagctgattggatcgagccggcgtgcccgttctcacaaaaggataaagaggtcgcggagagggtcctggagttcgatatcggatggctggccgaaccgatcttcggatctggagattacccgtgggtcatgcgggactggttgaaccaacgcaacaattttctgctgccttacttcaccgaggacgagaagaagctgattcaagggacttttgacttcttggcgctgtcccactacaccaccatcctggtcgatagcgaaaaggaagatccgatcaagtacaacgactacttggaagtccaagaaatgactgacatcacctggctgaactcaccctcgcaggtcgccgtggtcccgtggggactgagaaaagtgctcaactggctcaaattcaagtacggagatttgccgatgtacatcatctccaatggaatcgacgacggactccatgctgaggacgaccaactgagagtctactacatgcagaactacattaacgaagccctgaaggcacacatcctggacgggatcaacctgtgtggatactttgcatacagcttcaatgaccgcaccgctccccgcttcggattgtaccggtacgccgctgaccagtttgagcctaaagcctcaatgaaacattaccggaagatcatcgactcgaacggattccctggacctgaaactctcgagcggttttgtccggaggaatttactgtgtgcaccgagtgttcatttttccatacccgcaagtccctgctcgctttcatcgctttcctgttcttcgcatcgatcatttcgctgtccctgatcttctactactctaagaagggaaggcggtcatataag

SEQ ID NO: 149656 - DNA, 3036 bp, Artificial Sequence
  derived and/or modified sequence
atgccggcttccgcccctcctcgccgcccaagacctccgccaccgtcgctgagcctgcttttggtgctgctgggactgggcggacgtcgcctccgagccgaaccgggagacggagcacagacttgggcgcgcttctcgcgaccgcctgcaccggaagcagccggactgtttcagggaactttcccagacggctttctctgggctgtgggatccgccgcataccagactgagggagggtggcagcagcacgggaagggcgcgtccatctgggacacttttacccaccacccacttgcaccacctggcgattcaaggaatgcctccctcccgctgggcgccccttccccgctgcaacctgccaccggggacgtcgccagcgatagctacaataacgtgttccgggacactgaagcactcagggaactgggggtcacccactaccgcttctcgatctcctgggctcgggtgttgccgaacggctcagccggagtgccgaatagagaaggtctgcgctattaccgccggctgctggagcgcttgcgcgaactgggagtccaaccggtcgtcacgctctatcattgggacctcccgcagcgcctccaggatgcttacggtggttgggccaaccgggccctcgctgatcactttcgcgattacgcggagctgtgcttccgccatttcggaggacaggtgaagtactggatcaccattgataacccgtacgtggtggcgtggcatgggtacgctaccgggcggctggcgccgggaatccgaggctcgccgagactgggctacctggtcgcccataatctgctgttggcacatgcaaaggtttggcatctgtataacacttccttccgcccgactcagggtggccaagtgagcatcgcactgtcatcacattggatcaacccgcggaggatgactgaccactcaataaaggagtgccagaaaagcctcgacttcgtgctgggatggttcgcaaagccggtattcattgatggagactacccggagagcatgaaaaacaatctctcatcaatcctgcccgattttactgagtcggaaaagaagttcatcaagggaacggcggatttcttcgcactttgttttggaccgactctgtcatttcagctgctggacccacatatgaaatttcgacaactcgaatcacctaatctgcgacagctgctctcatggatcgatctcgaattcaatcacccacagattttcattgtggaaaacggatggtttgtctccggcaccactaaacgcgacgacgcaaaatacatgtactacctgaagaagttcattatggaaaccctgaaggccatcaagttggacggtgtggatgtcattggatacaccgcctggagcctgatggacggtttcgagtggcacagagggtacagcatcaggcggggactgttttacgtggacttcctgagccaggataagatgctgctgccgaagtcgtcagcgctgttctaccaaaaactcatcgaaaagaacggatttcctccactgccagagaaccagccgcttgaaggcactttcccatgcgacttcgcctggggagtcgtggacaattacattcaggtcgataccaccctgtcgcagttcactgatcttaacgtgtacctctgggatgtccaccattccaagcggctcatcaaggtggatggtgtggtgaccaagaagcgaaaatcctactgtgtggattttgcagctatccaaccgcagatcgccctgctgcaggagatgcacgtgacgcacttccgcttctccctggactgggcgctgatcctgccactcggaaaccagagccaggtgaatcataccatcctgcaatactacaggtgcatggcgtcggaactggtgcgcgtgaacatcacccccgtggtggccctgtggcagccgatggcgcccaaccaagggttgccgcgcctgctggcaagacagggtgcgtgggagaatccttacactgctttggccttcgcggaatacgcccgcctgtgctttcaggagttgggacaccatgtgaagctctggattaccatgaacgagccatacacccgaaatatgacctactcggcgggtcataacctgctcaaggcccatgcactcgcgtggcacgtctacaacgagaaatttcggcacgcccagaatggcaagatctctatcgccctgcaggcagactggattgagccggcctgccccttctcacagaaggacaaggaggtcgctgaacgcgtcctcgagttcgacatcggttggctggccgaaccaatctttgggtcgggtgactatccgtgggtgatgcgggattggctgaatcagcgtaacaatttcctgttgccatacttcactgaagatgagaaaaagttgatccagggaaccttcgatttcctcgcgctttcgcattataccacgatccttgtggactcggaaaaggaggaccccattaagtacaacgactatctggaggtccaggaaatgacggacattacgtggctgaattctccatcgcaggtcgctgtcgtgccttgggggctgagaaaagtgctgaattggctgaagttcaagtacggagacttgccgatgtacatcatctccaacggaatagatgatggacttcatgccgaggacgatcaactgagggtgtactacatgcaaaactacatcaacgaagccctcaaagcacatatcctcgatggcatcaacctttgcggatacttcgcgtactcgttcaatgaccggaccgcaccacggtttggcctctaccgctacgcagcggatcaattcgagccgaaggcgagcatgaagcactacagaaaaatcatcgatagcaatggattccctggacctgaaacgctggaacgcttctgccccgaagaattcaccgtctgcacggagtgctccttctttcacacccggaagagcctgctggccttcatcgccttcctgtttttcgcaagcatcatctccctgtcactcatcttctactactctaaaaaggggagacgctcatacaag

SEQ ID NO: 149657 - DNA, 3036 bp, Artificial Sequence
  derived and/or modified sequence
atgccagccagtgcccctccccgaagacccagaccacccccaccgagcctgagcctcctgttggtactgcttggactcggtgggcgcagactgcgggccgagccaggtgatggcgcccaaacttgggcacgatttagtcgtccacccgccccagaggcagcgggcctgtttcagggcacgttccctgatggctttctatgggccgtggggtccgcagcataccagaccgagggtggttggcagcagcacgggaagggagcatcaatttgggatacatttacccaccacccactcgcgccgccaggggactcgagaaatgccagcctgcccctaggagctccctccccactgcaacccgctacaggcgatgtggctagtgatagctacaacaacgtctttcgggacacagaagctctgcgtgaactcggcgtgacccactaccggttcagcatctcctgggcccgtgtgctgcctaacggcagtgcgggggtgccaaaccgtgaaggattgcgctactatcgcaggctgctagagaggttacgagagttgggcgtgcagccagtcgtgacattgtaccactgggatctaccgcaacgtctgcaggacgcatatggcggatgggccaaccgagctctggctgaccacttccgggattacgctgaattgtgttttcgccacttcggcggacaggtaaaatactggataacaatcgacaacccttatgtagtggcttggcacggttatgccactggccgcttggccccgggaatcaggggttccccccgcctcgggtaccttgtcgcccataacctgctgctggcccacgccaaagtgtggcacctttataatacctcctttcggccaacgcaagggggccaagtgtccattgccctgagctcccactggatcaatcccaggaggatgacggaccattctattaaggagtgccagaagagcctcgacttcgtgctaggttggttcgctaagcccgttttcatcgacggtgattaccctgaaagcatgaagaacaatttgtcaagtatcttaccagacttcactgagtcagaaaaaaagttcattaaaggaacagccgactttttcgccttatgctttggccctaccttgtctttccagcttcttgatccccacatgaagttcagacaactggagtctccaaaccttcgacagctgctctcttggattgatcttgagtttaatcacccccagatctttatagtggaaaacggttggttcgtcagtggaaccacaaaacgtgacgacgctaagtatatgtattacctgaaaaaattcattatggagaccctgaaggctatcaagctagatggtgtggatgttatcggatacaccgcttggtccctcatggatggatttgagtggcaccgcggatatagcatacgacgtggccttttttatgtggattttttgtctcaagacaagatgcttctcccaaaatcctccgccctcttctatcagaagctcatcgaaaagaacgggttcccgccactcccagagaaccaacctctggagggtacattcccctgtgattttgcgtggggcgtcgtcgataattacattcaggttgacacgactctgagccagttcaccgacctcaatgtttatctctgggatgtccatcacagtaagcgattgatcaaggtagacggagtggttaccaaaaagcgcaagagttactgtgtggactttgcagctatccagccccagatcgcccttctgcaggaaatgcatgtcacacacttccgattttcactcgattgggctctgatacttccgctagggaatcagtcacaggtcaatcacaccattttgcagtattaccgatgcatggcttctgagttagttcgagtcaatatcaccccagtagtcgctctctggcaaccgatggcaccaaatcagggattgcctagactactagctaggcaaggcgcttgggaaaacccttataccgccctcgcctttgcagaatacgccagactgtgcttccaggaactggggcatcacgtcaagctgtggatcactatgaacgagccctacacaagaaacatgacctacagcgctggccataacttgctgaaagcacatgccctggcgtggcatgtttataacgaaaaattccgccatgcccagaacggcaagataagtatcgccctgcaggcggactggattgagccggcatgtccctttagccagaaggataaggaagtggcggaaagagttttggaattcgatattgggtggctggcggaacctatctttggcagtggtgattatccctgggtgatgcgggattggcttaatcagagaaataactttctgttgccctattttaccgaggatgagaagaaactgatacaaggcaccttcgattttcttgcgctaagccattacactactattctggtagattcagagaaggaagaccctattaagtacaacgactatctggaggtacaagagatgacggacattacctggctgaacagtccctcacaagtcgcggtcgtgccttgggggttacggaaggtgttaaattggctaaagttcaagtacggcgaccttcccatgtacatcatttcaaacgggatcgacgatggcctgcacgctgaagatgaccaactccgcgtctactatatgcagaactacatcaatgaggctttgaaagctcatattctagacggcatcaacctttgtggatactttgcatactccttcaacgacagaaccgcccctaggttcggactgtacagatacgctgctgatcagttcgaacccaaggctagtatgaaacattacaggaaaatcattgatagtaacgggtttcctggacccgagactttggagagattctgccccgaggaattcactgtatgcactgaatgcagctttttccatacccgcaaaagcctgctggccttcattgcgtttctattttttgccagtattattagcctctcgctcattttttattatagcaaaaaaggcaggcggagctacaaa

SEQ ID NO: 149658 - DNA, 3036 bp, Artificial Sequence
  derived and/or modified sequence
atgccagccagcgcgccccctaggaggccgaggcctcctcctcccagtctgtctcttctgttggtcctgctcggtctgggtggtagacgcttgcgcgcggagcctggtgatggtgcacaaacctgggcaagattttccagaccaccagctcccgaggccgcaggactctttcagggcacgtttccagacggcttcctgtgggcagtcggcagtgctgcttaccaaaccgagggcggctggcagcagcacggcaagggagcttccatctgggatacatttacacaccaccctctcgcaccacctggcgacagtcgcaatgcgtctttgccacttggcgctccttcccccctgcagcccgcaacaggtgatgtggcctccgacagctataacaacgtcttccgcgacacagaggcccttcgcgagcttggagttactcattacagattttccataagctgggcaagagttctccccaacggttcagcgggagtgcccaaccgcgagggcctcagatattacagaaggttgctcgagaggctgcgcgaactgggagtgcagcctgtagtgactctttaccactgggaccttcctcagaggctccaggatgcctatggaggctgggcgaaccgcgctttggctgaccatttcagagattatgctgaactgtgttttcgccacttcggcggacaggtcaagtattggatcactatcgataatccatacgttgtggcttggcacggctacgcgaccggacgcctcgctccgggcatcagaggctctcctagattgggatacttggtggcacataacctgctccttgcgcacgctaaagtgtggcatctttataacactagcttcagacctacacagggtggtcaggtcagcattgctcttagtagtcactggatcaaccccaggaggatgaccgatcactccatcaaggagtgccagaagtcactggattttgtcctcggttggtttgcaaagcccgtgttcatcgatggcgactaccctgaatcaatgaaaaacaatctgtcttccattctgccagatttcacagaaagcgagaaaaaatttatcaaaggcactgcagatttctttgccctctgctttggtccaacattgtcattccaactcctcgatccacatatgaagttccgccagctcgaaagtccaaaccttcgccagttgctttcctggatcgacctggagttcaaccacccccaaatctttatcgttgagaacggctggttcgtgtctggcacaactaaaagggacgacgcgaagtatatgtactacctcaagaaatttatcatggagacactcaaggcgataaaactggacggagtggacgttattggatacaccgcctggtcactcatggatggtttcgagtggcacagaggctattccatcaggaggggtcttttctacgttgacttcctgtctcaagataagatgctgttgcctaagtcctcagccctgttctaccagaaactgatcgagaagaacggcttccccccgctcccagagaaccaacccctcgagggtacgttcccctgtgattttgcttggggcgtggtggataattacattcaggtcgatacgactctgagccagttcactgatctcaacgtgtatctgtgggatgtccatcacagcaagcgcctgattaaggtcgatggagtcgtcactaagaagcgcaagtcttattgtgtagacttcgctgctatacaaccgcagatcgctctgctccaggagatgcacgtgacccatttccgcttcagtctggactgggctttgatcttgcctctcggaaaccaatcccaggtgaaccacacgatcttgcaatactacaggtgcatggcttccgagctcgtacgcgtcaacataacgcctgtggtggccttgtggcaacccatggctccaaatcagggcctgcccaggctgctcgctaggcagggagcctgggagaatccatatacagcgctggctttcgctgagtacgcacgcctctgcttccaggaactcggccaccacgtcaagctctggatcacgatgaacgaaccgtacactagaaacatgacctactctgccggccataatttgctcaaggcgcacgccctggcctggcacgtgtacaacgagaagtttcgccacgctcaaaacggtaagatatctattgcactgcaagctgattggattgagccagcgtgtccgttctcccaaaaggacaaggaagttgcagagagggtcctggagttcgatatcggatggcttgccgaaccaatcttcggtagcggtgattacccttgggtaatgagagactggttgaaccagaggaataactttctccttccctactttacagaggatgaaaagaaactcatccagggcacgttcgatttcttggcgctgagtcactacacaactatacttgtggactcagagaaggaggaccccatcaaatataatgattatttggaggtacaggagatgactgacatcacatggctgaattctccctctcaggttgctgtagtcccttggggattgcgcaaggttcttaattggctgaagttcaaatacggagatcttccaatgtatattatttctaatggaatcgatgatggactgcacgctgaggacgatcagcttagagtgtactacatgcagaactacatcaacgaagcgcttaaggctcacattctggacggaatcaacttgtgcggatactttgcctacagtttcaacgacaggacagcgccgagattcggcctgtacaggtacgctgcagatcaattcgagccaaaggcatccatgaagcactataggaagatcattgactctaatggtttcccgggacctgaaactctggaaaggttttgcccagaagaatttaccgtatgcaccgagtgctcatttttccacacgcgcaagtccctccttgccttcatcgccttcctcttttttgcttcaattatctctttgtccctgattttctactactctaagaagggtaggcgctcttataag

SEQ ID NO: 149659 - DNA, 3036 bp, Artificial Sequence
  derived and/or modified sequence
atgcccgcctccgcccctccccgccgtcctcggcctcctccgccgtctctgagtctgcttctcgtcctccttggcctaggcggaagacgacttcgtgccgaaccaggcgatggagcgcagacatgggcccgtttcagcagacctcccgcccccgaggcagcgggtctctttcaagggacctttcctgacggctttctctgggccgtggggagcgccgcctatcagactgagggggggtggcagcagcatgggaagggagcatcgatttgggacacattcacgcaccatcctttggctccacctggagattcccgcaacgcaagcctccccttgggcgccccttccccacttcagcccgccacaggggatgtcgcgtccgacagttacaacaacgtatttcgggacacggaagccttgcgcgagctgggggtgactcattacagattttccatctcatgggctcgtgttctgccaaatggatctgccggcgtgccaaaccgcgaaggcctgcgatattaccgcagactcctggagagactgcgggagctcggcgtccagcccgttgtaactttgtatcactgggacctgccacaacgtctccaggatgcatacgggggctgggcgaaccgcgccctcgctgaccacttcagggattatgcggagctctgtttccgtcacttcggcggtcaagtgaagtactggatcacaatcgacaacccgtatgtagttgcatggcatggttacgccacagggcgcctggctccagggatccggggatcccctcgtctcggttacttagtagctcacaatctgctcctcgctcacgccaaggtgtggcacctctacaacacttcatttcggcccacacagggcggacaggttagcattgccctgagctcccactggatcaaccccaggcgaatgactgaccactccattaaagagtgccagaagtctctggattttgtgctgggctggttcgccaaaccagtgtttattgacggcgattacccggaatccatgaaaaacaacttatcgtccatcctccctgacttcacggagtcagagaagaagtttattaagggaaccgctgacttcttcgctctatgctttggtccaacactatcattccagctcctcgaccctcatatgaaattccgacaactcgaatcccccaatctgaggcagttactgtcttggatagatttagaatttaatcacccccagatcttcatcgttgagaacgggtggttcgtctcaggtacaactaagcgggatgacgcgaagtatatgtattatcttaaaaagttcatcatggaaacactgaaggctattaaacttgatggtgtcgatgtgatcggctacaccgcctggagcctaatggacgggttcgagtggcacagagggtacagtatccggagagggctgttttacgtggactttctgtcgcaggataagatgcttctccccaagagctccgccctgttttaccaaaaactgatcgagaaaaatggatttccaccgcttccagagaaccagcccttggagggcaccttcccctgcgactttgcctggggcgtggtggacaactatatccaagtcgatacgacactttctcagttcaccgacctgaatgtgtatttgtgggatgtccaccacagcaagagattgattaaagtggacggagtggtaacaaaaaagcgcaaaagttattgcgtggattttgccgccattcagccacagatcgccctgttacaagagatgcatgtcactcacttccggttcagtctggactgggcgttgattctgcctctggggaaccagtcccaggttaaccatactatcctacagtattatcgctgcatggcaagtgaactggtgcgggtaaatatcacaccggtggtcgccctgtggcagccaatggctcctaaccaaggactaccccggctactcgcaagacagggtgcttgggagaacccttacaccgctctggccttcgccgagtacgctcgcctgtgtttccaggaacttgggcaccatgttaagctgtggattacgatgaatgagccctacactcggaatatgacctattcagcgggtcacaacctcctgaaagcacacgcactggcatggcacgtgtacaacgagaagttcagacatgctcagaacggcaagataagcatagcccttcaggcggattggatcgagcccgcctgtccattctcgcagaaagataaggaggtagctgaacgggtactcgagtttgacatcggctggctggcagagccaatcttcgggagcggagattatccttgggtgatgagggattggctgaatcaacgaaacaactttcttcttccttatttcacagaggatgagaaaaagctgatacaaggaactttcgactttctggcactatcacactatacaactatccttgttgacagcgagaaggaggaccccattaagtacaatgattacctggaggtgcaggagatgactgacataacttggctgaattctcccagtcaggtcgcagtggtcccttgggggctgcgcaaagtcctgaactggttgaagtttaagtatggagatctccctatgtacatcattagcaatggcattgacgatggcctgcacgccgaggacgaccaactgcgggtatattatatgcagaattacataaatgaggcactgaaggctcacatcttggacggaattaatctgtgtgggtactttgcttactctttcaacgataggacagcccccagatttggcctctaccggtacgccgcggatcagtttgagccaaaggcttccatgaagcattatcgtaagataattgactctaatgggttccccggccccgagacactggaaaggttctgccctgaggagttcaccgtctgcaccgagtgtagcttttttcataccagaaagtcacttctcgcttttatagcgtttcttttcttcgcatccattattagcctttccctgattttttactactctaaaaaaggacggagaagctacaag

SEQ ID NO: 149660 - DNA, 3036 bp, Artificial Sequence
  derived and/or modified sequence
atgccagctagcgccccccctcgacgaccacgcccaccccccccgtctttgtctctgttgttagtactgctcggtctcgggggaagacgtctccgagcagagccaggtgacggggcccaaacctgggctcgtttcagtagacccccagcacccgaggccgctggcctgttccaggggacctttcctgatggctttttatgggctgtcggcagtgcagcctatcagacagagggcggctggcagcagcacggcaaaggggcttctatctgggatacgtttacccatcacccacttgcacctccgggagattctcgcaatgccagcctccctttaggagccccttccccactccagcctgccaccggagacgtcgcctctgattcatataacaacgtctttcgcgacacggaagccctcagagaactcggagtcacccactacaggttcagtatttcctgggccagagttttgcccaacggttcagctggcgtccccaaccgggaggggctaagatattatcgccggctgcttgagcgcctgcgcgaactaggcgtccagcccgtcgttaccctctaccattgggacctccctcaacgcctacaggatgcatatggcggctgggccaacagagctttagccgaccattttcgggattatgcagagctttgctttagacactttggaggccaggtgaagtattggataactatagacaacccttacgtcgtggcttggcatgggtatgcaaccggtaggctagcacctggtatccgggggtcccctagactgggatatctggtggcccataaccttctattggcccatgcgaaggtctggcatctgtacaatactagtttccggcccacacaggggggccaagtctcaattgctctgtcttctcattggatcaatcccaggcgaatgaccgatcattctattaaagagtgtcagaagtccttagatttcgtgcttggatggttcgctaagccagtgttcattgatggtgactaccccgaatcgatgaaaaacaacttatcctccatactgcccgacttcaccgagtcagagaaaaaattcataaagggcacggcggacttttttgcgctgtgtttcggcccgaccttatccttccagctcttagatccacatatgaagtttagacaactggaaagccccaatctgaggcaactcctttcatggatcgatctcgaattcaaccatccccagatctttattgtcgaaaacgggtggtttgtcagtggcacgacaaagagggacgacgcaaagtatatgtactacctgaaaaagttcatcatggaaacactgaaggcaatcaaactcgatggggttgatgtcatcggatacaccgcctggagtctgatggacgggttcgagtggcatcgagggtacagtattagacgaggtctattttacgttgacttcctcagccaggacaaaatgttactgcctaaatcctcagcactattctaccagaagcttattgagaagaacggattccctcctctgccagaaaaccagcctcttgaggggacttttccgtgtgacttcgcttggggggtggtggacaactacattcaagtggataccaccctcagccagtttaccgatctgaacgtgtacttgtgggatgtgcaccacagcaagagactaatcaaagtcgacggtgtggtgaccaaaaagagaaagtcatactgtgtggactttgcagcgatccaaccccagatagccctgctgcaggagatgcacgtgacgcactttcggttttcactggattgggctttgatcctcccactcggaaatcagagtcaagttaatcatacaatcctgcagtattacagatgcatggcaagcgagctggtacgagtgaacataacacctgtggttgccctgtggcagccaatggcaccaaatcaaggcttgccccgactcctcgccagacagggggcatgggaaaatccttataccgcactcgccttcgcagaatatgcgcgcttgtgctttcaggaactcggtcaccatgtcaagctgtggataactatgaatgaaccctacaccagaaacatgacgtactcagctgggcacaaccttttgaaggcgcacgcattggcatggcacgtgtacaacgaaaagttccggcatgcacagaatggtaaaattagcatcgcgttgcaggcggattggatcgagcctgcatgtcccttttctcagaaggacaaggaggtggcggagcgggtcctggagtttgatatcggatggctagcagagcccatcttcggctcaggcgactacccctgggttatgagggattggctcaaccagcggaacaacttcctgctgccttacttcactgaagacgaaaaaaaactgatccaggggacatttgatttcctggccctcagtcactatacaaccatcctggtggattccgagaaagaggatccaattaagtataatgattacctcgaggttcaggaaatgaccgatattacatggctgaattcaccctcacaggtggccgttgtgccttggggactgaggaaagtgttgaactggttgaaattcaaatatggagacctacctatgtacataatcagtaacggcatagatgatggcctccatgccgaggacgaccaactccgcgtgtattatatgcagaattatataaacgaagctctgaaggcacacattctcgacggaataaacctttgcggctatttcgcctattctttcaacgaccggaccgcccctcgttttggcctatatcgttacgctgctgaccagttcgagcctaaggcatcaatgaaacattatcgcaagatcatcgactcaaatggcttcccagggcccgaaactttagaaagattttgccccgaggaatttacagtgtgtacagagtgtagctttttccatacaagaaagagcctccttgctttcatcgcctttttgttctttgcctctataatcagcttaagcctaattttttactactctaagaaggggaggaggtcatacaaa

SEQ ID NO: 149661 - DNA, 3036 bp, Artificial Sequence
  derived and/or modified sequence
atgcctgcctctgctcccccacggaggccaaggcctccccccccttcgttgtctctgcttctggtcctgctcggtctcggcgggcgccgcctacgagccgaacccggcgacggggcccagacctgggcccgatttagtcgccctccggctcctgaggcagctgggctgttccagggcacctttccagacgggtttctgtgggccgtggggtctgctgcctatcagaccgagggcggctggcagcagcacggaaagggagctagcatttgggacacctttacacaccatccactggctcctccaggagactctaggaatgccagtctaccccttggcgctccctcacccttgcagcccgccacaggggatgtggcttccgacagttacaacaatgtgttccgggatacagaagccctgagggaacttggagttacccattatcgcttttcaatcagctgggcccgagtcctacccaacggaagcgctggggtccctaatcgggaaggattacgatactaccgcaggcttctggaaagactgagagaactcggcgtgcagcccgttgtgaccctgtatcattgggacttaccccagcgcttgcaagacgcatacggtggatgggctaacagggccttggctgatcactttcgagactacgctgagctatgctttcggcactttgggggacaggtgaagtattggattacgatagacaatccctacgttgtcgcttggcatgggtacgcaaccggacggctagcccctggtattcgggggagcccgcgcctgggctacctagttgcccacaacctgctgctcgcacatgccaaggtgtggcatctttataataccagcttccgtcctactcaggggggccaggtctctatcgcccttagctctcattggattaatcccagacgcatgaccgaccactccattaaggagtgtcagaagtccctcgatttcgttctcggctggttcgcgaaaccagtttttatcgatggagactatcccgagagcatgaagaacaatctgagctcaatccttcctgatttcacagagtctgagaagaagtttatcaaaggcactgctgatttttttgctttgtgttttggtccgactttatcttttcagttattggatccccatatgaaattccgtcagctggaatcccctaacctgaggcaacttctctcttggatcgatctggagttcaaccatccacagatctttattgttgagaatggctggttcgtatccggcacaaccaaacgggacgatgccaagtatatgtactacctgaagaaattcatcatggagactctgaaggcgatcaagctagacggggtggacgtaatcgggtacactgcctggtccctgatggacggcttcgaatggcatagaggttatagtataaggagagggctcttctatgtggacttcctgagtcaggacaagatgcttctgccaaaatcctcagccctcttctaccagaagcttatcgaaaagaacggattcccccctctcccagagaatcaaccattggaaggcaccttcccctgcgactttgcctggggggttgtagacaactatatccaggtggacaccacccttagccaatttacagatctcaacgtatacctgtgggatgtgcaccactcaaaaagactcatcaaggtggatggtgtggtcaccaagaaacggaagtcctattgtgtggatttcgcagcaatccagccacaaattgccctgctgcaagaaatgcatgtgactcattttcgcttcagtctagattgggcacttattctccccttgggaaaccaatcccaggtgaaccacactatcctgcagtactatcgctgcatggcttcagaactagtgcgcgtaaatatcacgcccgtggttgccctttggcagccaatggcgccaaatcaggggctgccaagattgctcgcccgtcagggggcttgggaaaatccgtacactgccttagcattcgccgagtacgcccgtctctgttttcaagaattgggtcaccacgtgaagttgtggatcacgatgaatgagccatacacacgaaatatgacctacagcgcaggccataacctgttaaaggcccacgccctcgcttggcatgtatataacgagaagttccggcatgcacaaaacggcaagatttccatagctctgcaggccgactggattgaacctgcctgtcccttcagccagaaggacaaggaggttgccgagagggtgctcgagttcgacatcgggtggctcgctgagcctatcttcgggtcaggggattacccctgggttatgcgcgactggctgaatcagcgcaacaactttttgctgccatattttactgaggatgaaaaaaaacttattcaaggcacatttgacttcctggcactgtcccattatactacaattctcgtcgatagcgagaaagaggatcccattaagtacaacgactacctagaagtgcaggagatgactgatattacttggcttaactcaccatcccaggtagccgtggttccatgggggcttcgcaaagtgttgaactggctgaaattcaaatacggagatcttcctatgtatattatttcaaatggaattgacgacggcttacacgcagaggatgatcagctcagggtgtactacatgcagaactatattaatgaggctctgaaagcccatatcctggacgggattaacctgtgcggctactttgcttactccttcaatgaccggaccgctccacggtttggcctttaccggtacgccgccgaccagttcgagcccaaagcctcaatgaagcactataggaagataatcgattccaacgggttcccaggccctgaaacgctggaacggttttgtcccgaagagttcacggtttgtacagaatgctcctttttccatacacggaagagcctcctggcttttattgcttttttgttttttgccagtattataagtctctctctgatcttctactactccaagaaggggaggcgctcctacaag

SEQ ID NO: 149662 - DNA, 3036 bp, Artificial Sequence
  derived and/or modified sequence
atgcctgcttccgcaccccccagacgaccccggccacccccgccatctctgagcctactcctggtgctgctaggtctgggggggcggagactgcgcgccgaacccggagatggagcccagacttgggcacgttttagtcgacctccagcgcccgaggcggcaggactgttccaaggcacttttccggatgggttcctgtgggccgtcggcagcgctgcctatcagacagaaggaggttggcagcagcacggcaagggtgcttctatctgggacacattcacccatcaccccttggccccccctggagatagcagaaacgcctcactgcctttgggcgctccaagtcccctacagcctgctactggggatgtcgcttctgacagttacaacaatgtattcagagataccgaagccctgagggaacttggcgtcacccactatcgattcagcataagctgggccagagtactccctaacggatccgctggagtccctaacagagagggcttgcggtattaccggcggttgctagagagattgcgtgaactaggggtccaacctgttgttactctgtatcactgggatctgccccagcggctgcaagacgcatatggaggatgggctaatagagcgctggctgatcacttccgggattatgctgagttatgcttccgtcattttggaggccaagtcaaatactggatcacaatcgataatccatacgtggtcgcctggcacggatacgcaaccggcagactggcccccggcattcggggatccccccggcttggctacctggttgcacacaatctcctgctggctcatgcgaaagtgtggcatctctataatacatcatttcgtcccactcagggcggtcaggtgagtatagccttatcttcccactggattaatcccaggcggatgaccgaccatagtattaaggaatgccagaagagcttggattttgtcctgggctggttcgccaaacccgttttcatcgacggcgattaccccgagtccatgaagaacaacctctcgtctatattacccgattttacggagagcgaaaagaagtttatcaaaggcaccgctgatttcttcgccctgtgttttggccccacactgtcgtttcagcttctcgacccacacatgaaatttcgacagctggagagcccaaatctaaggcaactgctaagctggattgacctagagttcaaccatcctcagatatttatagtggaaaatggctggttcgtaagtggaacaaccaaaagagatgacgccaagtatatgtactacctgaaaaaatttattatggaaacgctgaaagccattaaactagacggggttgatgttatagggtacacagcctggtcattgatggatggctttgaatggcatcgcggttatagtatccgcagaggcctgttctacgtggacttcctcagccaagacaagatgctgctgcctaagtctagtgctcttttttaccagaaactgattgaaaagaacggtttcccccctctcccagaaaaccagccattggaaggcacgttcccatgtgatttcgcatggggggtcgttgacaactacatacaggtggatactacactgagtcagttcacggacctgaacgtttacctctgggatgttcatcactcaaaacgtctgatcaaggtggacggagtggtcacaaaaaaacggaagagctattgtgtggattttgcagcaattcagccacagatcgcactgcttcaagaaatgcacgttacccactttcgtttctctttggactgggccttgatcttgcccctaggcaatcagagccaggtgaaccatactattctacagtactacaggtgcatggccagcgagctggttcgtgtaaacatcacgcccgtagtggcgctctggcaacctatggcccccaaccagggcctcccaaggcttctcgctcgccagggagcctgggagaatccatatactgcactcgcctttgccgaatatgccaggctgtgcttccaagaactcggacatcatgtgaaactctggattaccatgaacgaaccctatacgaggaacatgacctattccgcaggacacaacctgctgaaagctcacgctctggcgtggcacgtgtataatgagaagtttcggcatgctcagaatggcaaaattagcatcgctctgcaggctgattggatagagccagcttgtccgtttagtcagaaagacaaggaggtagcggagcgcgttctggaatttgatatcggttggttggccgagcccattttcgggtctggggactacccctgggtaatgagagactggcttaaccagcgcaacaattttctgctcccatacttcacagaggatgaaaagaagctcatccaaggaacatttgactttctcgccttgtcgcattatacaactatcttagtggactctgaaaaagaagacccaatcaagtataacgactacttagaggttcaggaaatgaccgatatcacttggctgaactctccctcccaggtagccgtcgtgccctggggactccggaaggttctcaattggctgaaattcaagtatggcgatctgccaatgtacatcattagcaatggcatcgatgatggccttcatgcagaggatgaccagctgcgtgtctattatatgcaaaattatattaacgaggccttgaaagcccatattctagacggtatcaatctttgcggctactttgcttacagtttcaatgaccgaacagcccctcgtttcggcttgtatagatacgccgcagatcagtttgaaccaaaggcatccatgaagcattaccgaaaaatcattgatagtaacggatttcccggacccgagacactggagcggttctgtcccgaagagttcacagtttgcacggaatgttccttttttcatacccgtaagtctcttctggcttttatcgcttttttgttctttgcaagcatcatttccctgagcctgatcttctactattcgaagaaaggccgacgcagctacaag

SEQ ID NO: 149663 - DNA, 3036 bp, Artificial Sequence
  derived and/or modified sequence
atgcccgcttctgctcccccgaggcgtccccggccccctccaccctcgctgtccctgctgcttgttctcttagggctgggagggcgacggctgcgcgccgagcccggagacggagcccagacctgggcccgctttagccgccctcctgcgcccgaggcggctggactgttccaaggcacatttcccgatggattcctttgggcggtggggagtgctgcataccaaaccgagggcggttggcagcaacacgggaaaggggcatctatatgggacacttttacacaccatcctctagcaccccctggagacagtcggaatgcttctcttccacttggggccccatctcctctccagcccgcgacaggcgatgtcgcttccgactcttacaataacgtgttccgggacacagaggccttacgtgagctcggcgtgactcactaccggttctctattagctgggcacgggtgcttcctaacggctcagcgggcgtgccaaaccgggagggtcttcggtactatcggcgactgctggaaaggctgcgggaacttggcgtgcaacccgtcgtcactctgtaccactgggatttgccacaaagattacaggacgcatatggcggatgggccaacagagcactagctgaccattttagggactacgcggagctgtgcttccgccattttgggggccaggtgaaatactggatcacaattgataatccctacgttgtggcatggcacggatatgccacaggtcgactggcacctggaatccgggggtctccccgactgggctatttggtcgcccataatctattgctggcgcatgcaaaggtgtggcacctctataacaccagcttcagacctactcaaggcggacaggttagtattgccctttctagccactggataaacccccgcagaatgactgatcattccatcaaagagtgtcagaagtcattggacttcgtcctcggatggtttgccaaacccgtcttcattgatggggactatcctgagtctatgaagaacaacctgtcttctatactaccagactttacggagtctgagaagaaatttattaaggggactgccgacttcttcgccctctgtttcggccctaccctctcctttcagctccttgacccgcatatgaagttccgccaattggaatctccgaatctcaggcaactgctaagttggattgacctggaattcaaccatcctcagattttcattgttgaaaacggttggttcgtgtcagggacgaccaaaagggacgacgcaaaatacatgtactatttaaagaaatttattatggaaaccttaaaggccatcaagctagacggagtagacgtcatcggatatactgcctggagcttgatggacgggtttgagtggcatagaggctactctatccgtaggggcttgttctatgtggattttctctcccaggacaaaatgttgcttcctaagagtagcgctctcttttaccagaagctcatcgaaaagaacggattcccacccttgcctgagaaccagcccctcgagggtacctttccatgtgactttgcatggggggtagttgacaactacatccaggtagacacgacactgtctcagttcactgatctgaacgtgtatttgtgggacgtgcaccactccaagcggctaatcaaagtggatggagttgtgacaaagaagaggaaatcatattgcgtcgattttgcagcaatccagccccagatcgctctgctgcaggaaatgcacgtgacccacttcagattttccctggattgggctctgattttacctcttgggaaccaatctcaagtgaatcacactatcttacagtactacaggtgtatggccagcgaactcgttcgagtgaacataacaccagtggtggccttgtggcagcctatggctcccaaccaaggccttcctagactgctggcccggcagggggcctgggaaaatccctatacagccctcgctttcgcagagtatgcgcgcttgtgcttccaggagctggggcaccatgtgaaactctggatcactatgaacgagccctacacgaggaacatgacctatagtgccggtcacaatctgctgaaagcccacgccctcgcatggcatgtgtacaacgaaaaattccggcatgctcagaatgggaaaatctcaatcgcgctgcaggccgattggatcgagcccgcctgtccctttagccagaaggacaaggaggtcgcagagagggttttggagttcgatataggatggctggccgagcctatcttcggttccggtgattacccatgggttatgcgggattggttgaatcaaagaaacaacttcctgctcccatattttactgaagacgagaaaaaattgattcagggaacattcgacttcctcgctctgtctcactacactaccattcttgtggatagcgagaaggaggacccaatcaaatataacgattacctggaagtccaagaaatgacggacatcacgtggctgaactcaccatcgcaagtcgcagtggtgccctggggtctgaggaaagtgctgaattggcttaaattcaagtatggtgacctgcctatgtatattatctccaatgggattgacgatggtctccacgccgaggacgaccagctgagagtgtattacatgcagaattacattaatgaagcactgaaagctcacattttggatggcattaacctgtgcggatattttgcatacagctttaacgacagaactgctcctaggttcggcctttacagatacgccgcagatcagtttgagcccaaagcctcaatgaagcattataggaagatcatcgattctaacggatttccaggccccgagactctcgagaggttctgccccgaggagttcactgtgtgtaccgaatgctctttcttccacacccggaagagcctcctggcattcatcgccttccttttttttgcaagcattatctccctgagtctaatcttttattactctaaaaaggggagacggtcttacaaa

SEQ ID NO: 149664 - DNA, 3036 bp, Artificial Sequence
  derived and/or modified sequence
atgccagcttcggctccaccacgtcgcccgaggcctccaccgcctagtctctccttgttattggttttactcgggttaggcgggaggcgactacgtgccgaaccaggagacggggctcagacctgggctcgtttttctagaccaccagctcccgaggctgcagggctatttcagggaacttttccagatgggtttttgtgggcagtgggatccgctgcataccaaacagaaggaggttggcaacaacatggcaaaggtgcgagcatctgggacacattcacccatcatccattggcacccccaggggattccagaaacgccagtcttccacttggggccccttctccattacagcctgctacaggcgatgtcgcttccgattcttataacaacgtgttcagggacactgaggctcttagggagttgggagttactcattatcgtttttccatcagctgggctagggttttgcccaacggatctgctggggttcctaacagggaagggcttagatactatcgtagactcttggaacgcttgagggagctgggcgtgcagccagttgtgaccctttaccactgggatcttccccagagattacaggatgcttacggcggatgggctaatagggccttggctgatcattttagggattacgcagagctttgttttcgtcattttggaggacaagtgaaatactggataacaattgacaatccttacgttgtcgcttggcacggatacgccactggaagactcgcccctggcattcgaggaagcccccgattgggttatcttgtagcccacaacttactgttggctcacgctaaagtctggcacctgtacaatacctccttccgtcctacacaaggggggcaagtatcaatagccctttcaagccattggataaatcctcgaagaatgactgatcactctattaaagagtgccagaagagcttggatttcgttttggggtggtttgctaaacctgtatttatcgatggcgattaccccgagtccatgaagaataatctcagttccatactcccggactttacagagtctgagaagaaatttattaagggaacggcagacttctttgctctgtgttttggtcctacactctcgtttcagctgctcgatcctcatatgaagtttaggcagttggagtcaccaaatctccggcagttattatcctggatcgatcttgagtttaaccatccccagatatttattgttgagaacggttggtttgtctctggtacaacaaagcgtgacgacgccaagtatatgtactacctcaagaaatttattatggagaccctgaaggctatcaagcttgatggtgtggatgttatcggctacactgcgtggtctcttatggatggcttcgagtggcataggggctattcgattcggcggggtctcttctacgtcgattttctttctcaggataagatgctactcccaaagtcatctgccttgttctatcagaagcttatcgagaagaacggcttccctcccctacctgaaaatcaaccacttgaggggacttttccatgcgatttcgcatggggtgttgtggacaactatattcaagttgatacaactttgtcacagtttactgacctcaacgtttatttgtgggatgtgcatcattccaagcgcctcattaaggtggatggtgttgtgactaaaaagcgtaagagttactgcgtagacttcgctgcaattcaacctcagattgcgctcctgcaggagatgcacgtcacacactttaggttttctcttgattgggctctcattttgccacttggaaatcagtctcaagtcaaccacactattctgcagtactataggtgtatggcaagtgaactcgtcagggtgaacattacgccagttgttgcattatggcagcccatggctcctaaccagggtctgcccagattgcttgctaggcaaggagcttgggaaaacccatacactgctttggcattcgccgaatatgctagattgtgcttccaagagcttggacatcatgttaaattgtggataaccatgaatgagccctatactaggaatatgacatattcagctggccataatcttttaaaagcacatgccctggcttggcacgtttataatgaaaaattcagacacgctcaaaatggaaagatttcaatcgctcttcaggctgactggattgaaccggcttgtcccttttcacaaaaggataaggaggtggctgaacgtgttttggaatttgatatcggatggttggcggaacctatctttggaagtggcgattacccgtgggttatgcgggactggctgaatcaacgtaacaacttcttgctaccatactttaccgaagatgagaaaaagcttatccaaggaacctttgacttcttggcactttcacattataccacgatccttgttgattccgaaaaggaagatcctatcaaatataacgactatttggaggttcaggagatgacggatattacatggttgaattccccaagccaagtggcagtggtgccatgggggttacgaaaagtgctcaattggctgaagtttaagtacggtgacctacccatgtacataattagcaatgggatagatgatgggttgcatgccgaagacgaccaactcagggtttattatatgcaaaattatattaacgaagctttgaaggctcatatccttgatgggattaatttgtgtggatacttcgcatattcctttaatgataggactgcacctcgttttggcctgtaccgttacgcagcggatcaattcgaacccaaggctagtatgaagcattacaggaaaatcatagattccaacggttttccgggacctgaaacattagaaaggttctgcccagaggaatttaccgtatgcaccgaatgcagtttttttcacacccgaaagagcctccttgctttcattgccttcttgttcttcgcttcgatcatctcactaagtcttatattttattatagtaagaagggtaggagatcgtacaag

SEQ ID NO: 149665 - DNA, 3036 bp, Artificial Sequence
  derived and/or modified sequence
atgcctgcatccgcccctcccagaaggccaaggcctccaccaccatccctgagccttctgctcgtccttctgggactgggcggacgccggctgcgcgccgagccaggcgatggagcacaaacttgggccagattttcgaggccccctgcaccggaagctgcgggtttgttccaaggtacgttcccagacggatttctgtgggcagtgggatcggcagcctaccagaccgaagggggatggcaacagcacggaaagggtgcttcgatctgggacacgttcacccatcaccctttggcacctcctggggattccagaaatgcatcacttccactcggcgcgccctcgcctctccaacccgcaacgggagatgtggcatccgattcatacaacaacgtatttagagataccgaggcattgcgagagcttggcgtgactcattaccgcttctcgattagctgggcgagagttctcccaaatggaagcgcaggcgtgcctaaccgtgagggactgcggtactatcgaaggctcttggaacgactcagagagctgggcgtgcaaccggtcgtcactctttaccattgggatctgccgcagagactgcaagacgcgtacggagggtgggcaaaccgggcactggccgatcactttagggattacgctgaactttgttttcgacatttcggagggcaggtgaaatactggattaccattgataacccttacgtggtggcgtggcacggttacgcaaccggtaggctggcccctggtattcggggaagccctaggctggggtacctggtcgctcataacttgcttcttgctcatgctaaggtctggcatctctacaataccagttttagacctactcaagggggtcaagtgtcaattgcattgtcgtcacattggattaacccacggcgaatgaccgaccacagcattaaggagtgccagaagtcgcttgatttcgtgctcggatggttcgcaaaaccggtctttatagatggcgactaccctgaatcaatgaagaataacctgagctctattcttcctgactttaccgaatcagagaagaagttcattaaaggcactgccgacttttttgcgctgtgtttcggacccacccttagctttcaactcttggatccgcatatgaagtttcgacaacttgaatctcctaacctgaggcaactgcttagctggattgatcttgaattcaaccaccctcaaatctttattgtcgaaaacggatggttcgtgagcgggaccacgaagcgagacgatgccaagtacatgtattatcttaagaaattcattatggagactctgaaggcgatcaaactggatggagtcgatgtgattggatacactgcgtggtccctcatggacggtttcgaatggcacagaggttacagcataagacgggggctcttttatgtcgactttttgtcgcaagacaagatgctgcttccaaaaagctcggcactgttttaccagaagctgattgaaaagaacggtttccctccacttccagaaaaccaaccactggagggcacgtttccatgcgactttgcatggggagtggtcgataactatatacaagtcgacacgactctttcccagtttaccgacctgaacgtctacctgtgggacgttcaccactccaagcggctgattaaggtggatggggtcgtcactaagaaacggaagtcgtactgcgtggattttgccgcaattcaaccacaaattgcccttttgcaggagatgcatgtgacccattttcgcttctccctggattgggcactgattctgccactgggaaatcagtcgcaagtgaaccataccatcctccaatactaccgctgtatggcgtcggaattggtcagagttaacatcacccccgtcgtcgccttgtggcaacccatggcaccgaatcaagggcttcctcgtctgttggcgcgccagggagcctgggaaaacccatacaccgcacttgcttttgcggagtacgcacgcttgtgcttccaagaactgggacatcacgtgaagctgtggatcactatgaacgaaccatatacccgcaacatgacttactctgcaggtcataatcttctgaaggcacatgcacttgcatggcatgtctacaacgaaaagtttagacacgcacagaatggaaagatatcgattgccctgcaagctgattggattgaacccgcatgtccgtttagccagaaggataaggaagtggccgagagagtgcttgaatttgatataggttggctggcagaaccgatttttggatccggtgattacccgtgggtgatgagagactggctgaaccaaaggaataacttcctgctgccctactttactgaggacgagaaaaaacttatccagggtacttttgattttctcgctctttcccattataccaccattctggtggactcagagaaagaggaccccattaagtacaacgattaccttgaagtccaggagatgaccgatataacgtggttgaactccccttcccaggtcgcagtcgtgccttgggggctgcgtaaggtgctgaactggctgaagtttaagtacggtgatctgcctatgtacattatctcgaacggtatcgatgacgggctccacgcagaagatgatcaactccgagtgtactatatgcagaactacataaacgaagcactgaaagcacatatactggatgggataaatctgtgtgggtactttgcctactcgttcaacgaccggaccgcaccgcgctttggcctttacagatacgcagcagaccagtttgaacccaaagcgtcgatgaagcattaccgaaaaatcatagattcaaatggctttccgggacctgaaacgctggagcggttttgtccagaagaattcaccgtgtgtaccgagtgcagcttttttcatactcgcaagtcgcttctggcctttattgctttccttttctttgcatcaattatcagtctttcactgatcttttactactcgaaaaagggtaggcgatcctacaag

SEQ ID NO: 149666 - DNA, 3036 bp, Artificial Sequence
  derived and/or modified sequence
atgcccgcatcggcgccgcctcggcgccctagacccccccccccgtctctctcactgcttctcgttcttttgggcttgggcgggcgccgactccgtgctgaaccgggcgacggcgcacagacctgggctcggttctcccgccccccggcacctgaggccgcgggattgttccaggggacattcccggatggcttcttgtgggccgtggggtctgcggcctatcaaaccgagggtggctggcagcaacacggcaagggcgcctctatctgggatacattcacccaccatcccctcgcccctcccggcgactcccggaatgcctcgctcccccttggcgcgccttcacccctccagcccgccaccggtgatgttgcttctgactcctacaacaatgtttttcgggacaccgaggcgctccgcgagctcggcgtgacccattatcgtttctctattagttgggcccgcgtcctgcccaacggttctgcgggtgtgccgaaccgagaaggactgagatattatcgtcgactgcttgagcgactacgcgagttgggtgttcagcccgtggttaccttgtaccactgggacctgccccaacgacttcaagacgcttatggaggttgggcgaatcgtgccctagctgatcatttccgcgattatgccgaactttgtttccgccacttcggcggccaggtcaagtattggatcacaatcgacaacccctacgtggtcgcgtggcacggctacgcgaccggtcgcctggcgcctggtatccggggaagtccacgactgggctacctagtcgcccataatcttttgctcgcccatgctaaggtttggcacctgtacaacacctctttccgcccaactcagggcggtcaagtgtccattgcgttgtcgagccactggattaacccccgtagaatgactgatcactctatcaaggagtgccagaagtcgctcgatttcgttctgggttggttcgcaaaacctgtcttcatcgacggagactaccccgaaagtatgaagaacaacttgtcgtccatcctgcctgacttcaccgagtcggagaagaagttcatcaagggaacagccgatttctttgccctgtgctttggccccactttaagcttccagctgttggaccctcatatgaagttccgtcaactggagagccccaaccttcgccagttactgtcctggatcgatctggagttcaaccacccacagatcttcattgtggagaatggttggttcgtgtcaggtaccaccaagcgggatgacgccaagtacatgtactatctcaagaagttcatcatggagaccctcaaggccatcaagcttgacggtgtggacgtgattggttacaccgcgtggagcctgatggacggcttcgagtggcatcggggctacagtatccgccgcggcctgttctatgttgatttccttagtcaggacaagatgctgctgcccaagtcctccgccctgttctaccagaagctgatcgagaaaaacggctttcccccgctcccggagaaccaacctctagagggcaccttcccctgcgacttcgcctggggcgtggtggacaactacattcaggtcgacacaaccctgagccagttcaccgatctcaacgtgtatctctgggatgtgcaccattctaagcgtctgatcaaagtggacggcgtggtgacgaagaagcgtaagtcgtactgtgtagacttcgccgccatccagcctcagattgcccttcttcaagagatgcacgttacgcacttccgcttctccctcgattgggctctcatcttgcccttaggtaatcagagccaggtgaaccataccattttgcagtattaccgctgcatggcttctgaactggtccgcgtgaatatcacccccgtcgtagccctgtggcagcctatggctcccaaccaggggttgcctagactccttgcgcgccagggcgcttgggagaacccctacaccgctctggctttcgcggagtacgctaggttgtgcttccaggagctgggccatcacgttaagctgtggatcaccatgaacgagccgtacactaggaacatgacctactccgctgggcataacctcctgaaggcgcacgcgctcgcttggcatgtttataacgaaaagtttcgtcacgcccagaacggtaagatttcgatcgcgctccaggccgattggatcgaacccgcatgcccgttctcccaaaaagataaggaggtcgctgaacgtgtccttgagttcgacataggttggctggccgaacccatcttcggtagcggtgactacccctgggtcatgcgcgattggttgaaccagcggaacaacttccttctcccctacttcactgaggacgagaagaagcttatccagggcactttcgacttcctcgccctcagtcattataccactatcctagtcgactcggagaaggaagatccgattaagtataacgactacctcgaggttcaggaaatgacggatattacgtggctcaactccccatcgcaagtggctgtagttccttggggcttgcgcaaggtcctcaattggctcaaattcaagtacggggatctcccaatgtatattatttcgaacggcatcgacgatggcctacacgccgaagacgaccaactccgtgtctactatatgcagaactacatcaacgaagctttgaaggcccacattctggatggaatcaacctctgcggttatttcgcctactcattcaacgacaggaccgccccacgtttcggtctgtatcgttacgcggctgatcagttcgaacctaaggcatctatgaagcactaccgcaaaatcattgactctaacggtttcccgggcccggagaccttggagcgcttctgcccggaggaatttaccgtgtgcaccgagtgctccttcttccacacgcgaaagagcctgctggcattcattgccttcctcttcttcgccagtatcatcagcttgtccctgatcttctactatagcaagaagggccgccgttcttataag

SEQ ID NO: 149667 - DNA, 3036 bp, Artificial Sequence
  derived and/or modified sequence
atgcctgcctcagctcctccaagacggcctcgacccccacctccctctctgtccttgctccttgtacttcttgggctcggaggacgccgactcagagctgaacccggagacggggcacagacatgggcgcggttttctagaccaccagctcctgaagctgctggattgttccaggggacatttcctgatggatttctttgggctgtgggatctgccgcatatcagacagaaggagggtggcagcaacacggaaagggagcttctatctgggacactttcacacatcatccactagctcctcctggggattcaaggaacgccagtctccctttgggggctcccagtcctctgcagcctgccactggggacgtggcttcagactcatataataatgtgttccgggatacagaggccctcagggaactcggagtaacacattacagattctcaatatcctgggctcgggtccttccaaacggatctgcaggggtgcccaatagagaaggacttcgctattatcgacgactcctcgagaggttacgggaactcggggtgcagcctgttgttacactttaccattgggatctaccccagaggctgcaggatgcgtatgggggatgggccaatagggccctagccgatcactttagagattacgccgagctttgtttcaggcactttgggggacaggtgaaatactggatcactatcgataacccttatgtggtagcctggcacggatatgccacagggaggctcgcccccggaatccgggggtctccacggcttggatatctagttgcccataatctcctgttagcccatgccaaagtgtggcatctttataatacatcattccggccaacacaaggagggcaggtgtctattgctctcagttctcattggatcaatcccaggcggatgactgatcactctataaaagaatgtcagaaatcactcgactttgtgctgggatggtttgcaaaacctgtgttcatcgatggagattacccagagagtatgaaaaacaacctttcatcaatactacctgatttcacagaatctgagaaaaaatttattaaagggacagctgatttctttgccttatgctttggacctacactctcctttcagcttctggacccccacatgaaattccggcagcttgagagtcccaacctcagacagctgttatcttggattgatcttgaattcaaccacccccagatattcatagtggaaaatggatggtttgtctctgggacaacaaaacgggatgatgcaaaatatatgtattatctcaaaaaattcatcatggaaacattgaaggccattaaattagatggggtagatgtcattgggtatactgcctggtcactcatggatgggttcgaatggcataggggatactctattaggcgcgggctattttatgtcgacttcttgtcccaggataaaatgctcctaccaaaatctagtgcccttttttatcagaaactgatcgaaaagaatgggttcccacctctccctgaaaatcagccactagagggaacattcccttgtgattttgcttggggggtcgttgataactatatacaggtggatactacgctctctcagttcactgatttgaatgtgtatctctgggatgttcaccatagtaagagattaatcaaagtcgatggggtggttacaaaaaaaagaaagtcctattgcgttgatttcgcagccatccagccccagattgccttgttgcaggaaatgcacgtgacacactttcgattttcactggattgggccttaatactaccattgggaaatcagagtcaggtgaaccacacgatactgcagtattacaggtgcatggcttcagaactggtgagagtgaacataacacctgtcgtggcgctgtggcagcccatggcacctaaccagggactcccgcgccttctcgcccgacagggagcatgggagaacccctatactgcactggcatttgcagagtatgccagactgtgtttccaggaactcggacatcatgtgaaactttggatcacaatgaacgaaccttatactaggaacatgacttatagtgctggacacaacctactgaaggctcacgcacttgcttggcacgtatataatgaaaagtttagacacgcccagaatgggaaaatatctatcgctctccaggccgattggatagaacctgcctgtcctttcagtcaaaaagacaaagaagtggccgaaagggtgctggaattcgatataggatggctcgctgaaccaatcttcgggagtggggattacccttgggtaatgagggattggctaaaccagcgtaacaattttctcctgccatattttactgaagacgaaaaaaaactgatccagggaacttttgattttctcgctctgtcccattacacaactatattagtcgatagtgagaaagaggacccgataaaatacaatgactaccttgaagtacaagaaatgacagatatcacatggcttaactctccttctcaggtcgcagttgtaccctgggggctgcggaaagttctcaactggttaaaatttaaatacggagacctgcccatgtatataatttcgaacgggattgatgatgggctacatgctgaggatgatcagctacgcgtgtattatatgcagaattatattaacgaggcattaaaagcccatatacttgatggaattaacttgtgcgggtatttcgcctactcatttaacgatcggacggctccacgcttcggactgtatcgctatgccgcagatcagtttgaacccaaggcctcaatgaaacactatagaaaaataattgattcaaacggatttccaggacccgaaactttagagagattttgtcccgaagagtttactgtctgtacagaatgcagtttttttcatactaggaaatcactccttgcatttatagccttcctattcttcgcttctatcatctctttgtcccttatcttctactactccaaaaaaggaagacgatcatacaaa

SEQ ID NO: 149668 - DNA, 3036 bp, Artificial Sequence
  derived and/or modified sequence
atgccagcatctgcaccacctcggcggccccgaccgcctcccccgtctctgtccctgctactcgtcctcttaggtcttggcgggcgtcgcctcagagcagagcctggagacggcgcacagacctgggcaagattctctcggccgccagcacccgaggccgctgggctgtttcaaggaaccttcccagatggctttctttgggcggttggtagcgctgcatatcagacagaaggcggctggcagcaacacggtaagggagcctccatttgggacacattcactcatcatcccttagcccctccaggcgattctcggaatgcctctttgccccttggcgccccgagcccactgcagcccgcaaccggggatgtggcctctgatagctataataacgtctttcgggacacagaggcactgcgggaactcggtgtcacacactatagattttctatatcctgggctcgggtgttgcccaatggaagtgccggcgtgccgaacagggagggcttaagatattaccggcggttactggagcgactgagagagctgggggtccagccagtggttactttatatcattgggatctgccccagaggctgcaggacgcctatggtggctgggctaatcgggcacttgcagaccatttcagagactacgctgagctgtgttttcggcactttggcgggcaggttaagtactggataaccatcgacaatccatatgttgtggcttggcatggatatgccaccgggcgtctcgcgccgggtattcgggggtcccctagactgggctacctcgtggcccacaacctattactggcccatgctaaggtctggcacctttataacactagctttagacctacccaagggggtcaggtgtctatcgcactgagcagccactggattaatccaaggagaatgacagaccactccatcaaagagtgtcagaagtctctggatttcgtgctaggctggtttgctaagccagtcttcatcgacggagactacccagaaagtatgaagaacaacctgtcctcgattttacccgactttactgagtctgagaaaaagttcattaaagggactgctgatttctttgccctatgctttgggcctacgctgtccttccagcttttggatccccatatgaagttccggcagttggagtcacctaacctcaggcagttactaagctggatcgatctcgaattcaatcatccccagattttcatcgtagagaacggctggttcgtctcagggacaactaagcgtgacgacgccaaatatatgtattatctgaaaaagttcatcatggaaaccctgaaagccattaaactagacggcgtggacgtaattggttacaccgcctggtccctcatggacggattcgaatggcacaggggctattcaataagacgggggctgttttacgtcgactttctatctcaggataagatgctcctccctaagagcagtgccttgttctatcagaaactcatcgagaagaacgggtttcccccactgcccgaaaatcagcccctggaaggtactttcccttgcgactttgcatggggcgtggtcgacaactatatacaggtcgacacgaccctgtcgcaattcacagatttgaacgtttacctctgggacgtccaccacagcaagcggttgatcaaagtggacggggtggtaaccaagaaaaggaaaagctactgtgtcgatttcgcagccattcagcctcaaatagctctgctgcaggaaatgcacgtgacacactttcgattttctttagactgggctctgattctacctcttggtaatcagagccaggtgaatcacaccatcttgcagtattaccgatgtatggcctccgaactggtcagggtgaacataactccagtcgtggccttgtggcagccaatggcccccaatcagggactacctcgtctcttggctagacagggagcctgggagaatccgtatactgccctcgcctttgctgaatatgctcggttatgttttcaggaactgggacaccatgtgaaattgtggattaccatgaacgaaccttatacgcgcaacatgacgtattctgcgggacacaacttgcttaaggcacacgccctggcatggcacgtgtataacgaaaaatttaggcacgcccaaaatggaaaaattagcattgctttgcaggctgattggattgaaccagcatgccctttctcacaaaaggataaagaagtggctgaaagggtactcgagttcgacattgggtggctggctgaacccattttcgggtctggcgattacccatgggtgatgcgcgactggctgaaccaacggaataactttctgctgccatactttacagaagatgagaagaagctcatccagggtacatttgatttcctggcacttagtcactacaccacaatactggtcgacagcgagaaagaggaccccattaaatacaacgactatctcgaggtccaggaaatgacagacatcacatggctcaactctccaagtcaggtcgcggttgtaccctgggggcttcgtaaggtattgaactggctgaagttcaaatatggtgatctgccaatgtacatcattagtaatggaatcgacgatgggttgcacgccgaggacgaccaactccgggtttactacatgcagaactatataaacgaagccctgaaggcacacattctagatggcattaacctgtgcggatatttcgcgtactcttttaacgacagaaccgcaccaagatttggactgtacagatacgcagctgaccagtttgaacctaaggcctccatgaagcattatcgcaagataatagactccaatggttttccaggaccggagacgctggaacggttttgccctgaggagttcactgtttgtaccgaatgcagcttttttcacactcggaagtctcttctggccttcatcgcattcctcttcttcgcgtccattatatccttaagcctcatattctattattcgaaaaaaggccgcagaagctacaaa

SEQ ID NO: 149669 - DNA, 3036 bp, Artificial Sequence
  derived and/or modified sequence
atgcccgcatcagcacctccacgtagacccaggcctccaccaccaagcctgtcactccttctggtcttgctgggactgggcggtcggcggctgcgtgcagaacctggtgacggtgcacagacctgggcaaggttttcgcgtcccccagccccggaagccgccggactgttccaaggtacctttccggacggatttctctgggcagtcggcagcgcagcgtaccagactgaaggaggatggcagcaacatggtaagggcgcatctatttgggatacctttactcatcacccactcgcccctcccggcgacagccgaaatgcgtcccttcctctgggcgcaccttctccacttcagcccgcaaccggagatgtcgcgtccgattcctacaacaacgtgttcagggataccgaagcactgcgggaactgggagtgactcattacaggttttcgatctcctgggcacgcgtgctccctaacggaagcgccggcgtgccgaaccgggaagggctgcgttactaccgcagacttttggagaggcttcgcgaacttggcgtgcaacccgtggtgaccctttaccattgggacctgccccaaaggctgcaagacgcttacggaggatgggctaatcgagccttggccgatcatttcagagattatgcggaactttgttttagacatttcggtggacaggtcaagtactggattactattgacaacccttacgtggtcgcatggcatggatacgcaactggcaggcttgccccgggcatcaggggatcacctaggctgggttaccttgtcgctcataacctgcttcttgcacatgccaaagtgtggcatctgtataacacgtcattcagaccaacccagggaggtcaagttagcattgctctttcgtcgcattggattaatcctaggcggatgactgaccatagcataaaggagtgtcaaaagtccttggattttgtccttggttggtttgcaaaacctgtgttcatagatggagattaccctgaatccatgaagaacaatctgtcgtccatactccctgactttaccgaatcagaaaagaagtttatcaaaggtactgccgatttcttcgctctgtgtttcggtcctactctctcctttcaacttctggatcctcacatgaaattccgtcagcttgaatcgccaaacctgagacagctgctttcgtggattgatctggagtttaatcatccgcaaatcttcatagttgaaaacggatggttcgtctcggggactactaagagagacgacgccaagtacatgtattacctcaagaagttcatcatggaaactctcaaagcgataaaactcgatggagtggatgtgattgggtacactgcgtggtccctcatggatgggtttgaatggcatcgtggctacagcattcgaaggggactgttttacgtcgatttcctgtcccaggacaaaatgctgctccctaagtcctctgcactcttttaccagaagctgattgaaaagaacggatttcccccacttcccgaaaaccaacctcttgagggaacgtttccatgtgattttgcctggggcgtggtcgataactacattcaagttgacaccaccctgagccaatttaccgatctgaacgtgtatctctgggatgtgcatcacagcaaaagactgattaaggtggacggagtggtcaccaaaaagcgaaaaagctactgtgttgattttgcggcaatccaaccacagattgcactgcttcaggagatgcatgtgactcactttagattttcacttgattgggccctgatcctgcctcttggaaaccagtcgcaagtcaaccataccatcctgcagtactacagatgtatggcatcggaactcgtgagggtgaacatcactcctgtggtggcactctggcagccaatggccccgaaccaagggcttccgcggctgctggcaagacaaggagcgtgggagaatccctacaccgcgctggcttttgcagaatacgctcgactttgcttccaagagcttggacaccatgtgaagctgtggataactatgaatgagccttacaccaggaacatgacctactcagcaggccacaaccttcttaaggcgcatgcactggcctggcacgtctacaacgaaaagttccgtcacgcacaaaacggtaagatctcgatcgcgctccaggcagactggatcgagccggcatgccctttttcgcagaaggataaggaagttgcagaacgggtccttgagtttgatattggatggcttgcagagcccatttttggatcaggtgactacccttgggtcatgcgcgattggttgaatcaaagaaacaatttcctgctcccttacttcacggaggacgaaaagaagctgatccagggcacctttgactttctcgcactctcgcactatacgaccatcctggtcgattccgagaaagaggaccctattaagtataatgattatctggaggttcaggagatgaccgatatcacttggcttaatagcccctcacaagtcgcagtggtgccgtgggggctgagaaaggtgcttaattggctcaagtttaagtacggcgatcttcccatgtacatcatttctaacgggatagatgacggactgcatgcagaagatgatcaactgagagtgtactacatgcagaactacattaatgaggctctcaaggcccatatactggatgggatcaatctctgtggttactttgcgtactcctttaatgatagaaccgcaccaaggtttggtctgtacagatacgcggccgatcaatttgaacccaaagctagcatgaagcactaccggaagattattgactctaacgggttccccgggcccgaaactcttgagcggttctgcccggaggaatttacggtgtgcaccgaatgttccttttttcacacccgcaaatcgctcttggcattcatcgcatttctgttcttcgcatcgatcatttcccttagcctgatattctactacagcaagaagggaagaagatcatacaaa

SEQ ID NO: 149670 - DNA, 3036 bp, Artificial Sequence
  derived and/or modified sequence
atgccagcatcggcaccacctaggcgaccgcgacccccaccgccctccctctcgcttcttttggtgcttcttggactgggtggtcgcagacttcgcgcagaacctggggatggcgcacaaacctgggcccggttttccaggccccctgcaccagaagcagccgggctctttcaaggaacgtttcccgacggtttcctgtgggcagtgggttcagcagcgtaccagactgaaggtggatggcaacagcatggaaaaggagcatcaatctgggatacgttcacccatcatcctctcgctccccctggagatagcagaaacgcctccctcccactgggagcgccctcacccttgcagcctgctaccggagatgtggcctcagattcctacaataatgtgttccgggataccgaagcactcagagaacttggagtgactcattatcgtttttcgatttcgtgggcacgtgtactgcctaacggctcggccggcgtcccaaaccgagagggcttgagatactacaggcggctcctggaaaggctccgtgagctgggggtgcagccagtggtgactctgtaccattgggatcttcctcagcggctgcaggatgcttacggtggttgggccaaccgggcacttgcggatcactttagagattacgcagagctgtgttttcggcattttggcggtcaggtgaagtactggataaccattgacaacccatacgtcgtcgcatggcatggctacgccaccggaaggcttgccccaggaatccggggcagcccgaggcttggatacttggtcgcccataatctgctgctggctcatgcgaaggtgtggcatctctacaacacttccttccgcccgactcagggcgggcaggtgtcgattgcactctcctcgcattggattaacccccgaagaatgacggaccatagcataaaggagtgtcagaagagccttgattttgtcctgggctggtttgccaagcctgtctttattgacggggactacccagaaagcatgaagaacaatctttcgtccatcctcccagatttcaccgagagcgaaaagaagttcattaaagggaccgccgatttctttgccctctgtttcggaccaactttgagcttccagctgcttgacccacacatgaagtttaggcaactggaatcacctaacctccgacagcttctgagctggattgatctggagtttaatcatccccagatcttcattgtggagaatggttggtttgttagcggaaccactaagagagacgatgccaagtatatgtactaccttaagaagtttatcatggaaacgctgaaagcgattaagctcgatggagtcgatgttattggatatacggcatggtcccttatggacggattcgaatggcaccggggatattcgatacgccgtggactgttctatgtggatttcctttcccaagacaagatgctgctgccgaagtcctcggcactgttttaccaaaagttgattgagaaaaacggcttccctcctctccctgagaatcagccccttgaaggaaccttcccgtgcgactttgcctggggtgtcgtagacaactatattcaggtcgatacgactcttagccagtttaccgatctgaacgtctacctttgggacgtgcatcattcgaagcggttgataaaagtggacggagtcgtcaccaaaaagagaaaatcctactgtgtggactttgcggcaatccagcctcaaatagcactgctgcaagagatgcacgtgacgcactttcgattttccctggattgggcactcattctgccccttggaaatcagtcacaggtgaaccacactatccttcagtactaccgatgtatggcaagcgaacttgtgagagtcaacattactccagtcgtggcactgtggcaaccaatggcacctaatcaaggacttcctcgtctcttggcccgtcaaggcgcttgggagaacccttacactgcccttgcatttgcagaatacgccagactttgtttccaagagctcggacatcatgtgaaactttggatcactatgaacgagccttacacccggaatatgacctacagcgccggccacaatctgcttaaagcacatgctttggcgtggcacgtttacaacgaaaagttccgtcatgcacaaaacggcaagatctccatcgcactgcaggccgattggattgagcctgcatgtcctttttcgcagaaagataaggaagtggccgaacgcgtcctggaatttgatatagggtggctcgcagaacctatattcggttcgggtgactacccttgggtgatgagagactggctgaaccaacgaaacaattttctgctcccttactttaccgaggacgagaagaagttgatacaaggaacttttgatttcctcgcgctctcacactacactaccattcttgtggatagcgaaaaggaggacccaattaagtacaatgactacctcgaagtgcaagaaatgaccgatataacgtggctcaactcgccttcacaagtggcagtggtgccgtgggggcttcggaaagtcctgaattggctgaagtttaagtacggtgatcttccaatgtacataatctccaatggcatagacgatggattgcatgcagaagatgaccagctgcgagtgtactacatgcaaaactacattaacgaagccctgaaggcacacatcctggatggtataaacctgtgcggatactttgcatacagctttaacgatagaaccgctcctagatttggactttacaggtacgcagcagatcaatttgaacctaaggcaagcatgaagcattacaggaagattattgattcaaacggatttcccgggccggaaacccttgaaaggttttgccctgaggaatttaccgtgtgcacggagtgttcgttcttccacactaggaagagccttcttgcatttatcgcattccttttctttgcctcgattatcagcctgagcctcatcttttactatagcaaaaaaggaaggcggagctacaaa

SEQ ID NO: 149671 - DNA, 3036 bp, Artificial Sequence
  derived and/or modified sequence
atgccagcctcggcgccaccgaggcgaccgcggcctccaccgccgagcctgtccctgcttctcgttctcctcggcttgggagggcgccgcctgcgcgccgagcctggagacggtgcccagacctgggcccggttctcccgtccgcccgcgccggaagccgcaggactgtttcagggcacttttcccgacggatttttgtgggctgtcgggtctgccgcatatcagactgaggggggttggcaacaacacggaaagggtgcatcgatctgggacacctttacccaccacccccttgcgcctccaggagactcaagaaacgcgtccctcccgctgggcgctccgtcgccgcttcagcctgcgaccggggatgttgcctccgattcatacaacaacgtgtttcgcgacaccgaagcgctgcgcgaactcggtgtcactcattatcgcttttccatctcctgggccagggtgctcccaaacggctcagccggagtcccgaatcgggaaggactcagatactaccgcaggctgctggaaagactgcgcgaactgggcgtgcaaccggtggttaccctctaccattgggatctccctcagcggctgcaggatgcgtacggagggtgggctaaccgggccctggcggaccatttcagagattacgccgagctgtgctttcggcattttggtggccaggtgaaatactggattactatcgataacccgtacgtcgtggcctggcacggctacgcgaccggtagactggccccgggaatcagagggtcgcccagactgggatacctggtggcccataacctgctcctcgcccatgccaaagtgtggcatttgtacaacaccagcttccggccaactcaagggggccaggtgtccatcgcgctgtcctcacattggatcaacccacggagaatgactgaccactcgatcaaggagtgccaaaagagcctggacttcgtccttggttggttcgccaagccggtgttcatcgacggagattacccggagtcaatgaagaataatctctcctcaatcctgccagacttcaccgagtccgaaaagaagttcatcaagggcactgccgatttctttgcactgtgcttcggccctacgctgtcgtttcagctcctggatccgcacatgaagttccgccagttggagagccctaatctcaggcagctcctctcctggatcgacctggagttcaatcacccgcagattttcattgtggagaatggctggtttgtgtcaggaaccactaagcgcgatgatgcgaagtatatgtattacctcaagaaattcattatggaaaccctcaaggcgatcaagctggacggagtggacgtgatcggctacacggcgtggagcttgatggatgggtttgagtggcaccggggatactcgattagacggggtctgttctacgtggacttcctctcacaagacaagatgctgctcccgaagagctccgctctcttctaccagaagctcatcgaaaagaacggctttccgccgctcccggagaatcagccacttgaaggaaccttcccgtgcgacttcgcttggggagtggtggacaattacatccaggtggacaccaccctgtcccagtttacggacctgaatgtctacctgtgggacgtgcatcattcgaaacgcctcataaaagtcgacggcgtcgtgactaagaagcggaagtcctactgcgtcgacttcgcggcgatacagccgcagatcgcgctgctgcaggaaatgcacgtcacccattttcgcttttcactggactgggcgctcatcctgcctttgggaaaccaatcgcaagttaatcatactatcctgcagtattaccgctgcatggcctccgaactggtgcgggtgaatatcaccccggtcgttgccctctggcaacctatggctccaaaccagggactccctcgactcctggcgcggcaaggagcgtgggaaaatccatacactgccttggctttcgccgaatatgcccggctgtgctttcaagagctcggccaccacgtcaaactctggatcactatgaacgaaccgtacaccaggaacatgacctactcggcaggccacaacctgcttaaagcccacgcccttgcgtggcatgtgtacaatgagaaattcaggcatgcccagaacggaaaaatctcaatcgcgctgcaggccgactggatcgaacctgcctgccccttctcacagaaggacaaggaagtggccgagagagtcctggaattcgatatcggatggctggccgagccgattttcgggagcggagactacccgtgggtgatgcgagactggctgaaccagcgaaacaatttcctcctcccgtacttcactgaagatgagaagaagctcatccaagggaccttcgatttccttgcattgtcccattacaccaccattctggtcgatagcgaaaaggaggacccaatcaagtataacgactacctcgaggtgcaggaaatgactgatatcacgtggttgaatagcccatcacaggtggcggttgtgccgtggggactgcgcaaggtgctcaactggctgaagttcaagtacggcgacctgccgatgtacattatctccaacgggattgacgacggactgcatgcggaggatgatcagctcagggtgtactacatgcagaactacatcaacgaagccctgaaggctcacatccttgatggcatcaacctgtgtggttacttcgcctactcattcaacgatcgcaccgctccacgcttcggactctaccggtacgcagccgaccagtttgagccgaaagccagcatgaagcactacagaaagatcatcgactccaacgggtttccgggtccagaaaccctcgaacgcttctgtccggaagagttcactgtttgcactgaatgctcgttctttcatacccggaaaagcctgctggcgttcatcgcattcttgttcttcgcctcaattatctcactctcgctcatcttctactactctaagaagggaagaaggtcatacaag

SEQ ID NO: 149672 - DNA, 3036 bp, Artificial Sequence
  derived and/or modified sequence
atgcccgcatccgctccccctagaaggcctcgcccaccgcctccttctctaagcctgcttttggtgctgcttgggcttggcggtagacgtctgagggccgaaccaggggacggcgcccaaacttgggccagatttagccgtccccctgccccagaggcagccggcctgtttcagggcacttttcccgacggctttttgtgggcagtcgggtccgcagcataccaaacggaagggggttggcaacagcacggcaagggagctagtatctgggataccttcactcatcaccccctggcacctccaggcgactcaaggaacgcctccctgcccctgggagctccatctccgctgcagcctgcaaccggcgacgtggccagcgacagctataacaatgtgtttagggacactgaagctttacgtgaactgggcgtgacgcactaccgattttcaatatcctgggcccgggtgctaccaaatggttccgccggcgtaccaaacagggaagggctacggtattacagacgtttgctggaaaggctgagggaactaggtgtgcaacccgttgtgacactataccattgggatctgccacagcggctgcaggacgcatatggaggatgggccaaccgagccctggctgaccatttcagggattacgctgaactgtgctttaggcattttggggggcaggtaaaatattggatcactatcgataatccctatgtcgtggcctggcacggatacgcgacggggcggcttgcccctggcatcaggggatctccccgactgggatatctggtcgctcataacctgctgctagcgcacgctaaggtttggcacttatataacaccagctttcgacccacccagggcgggcaggtgagtatcgcactgtcttctcattggatcaacccccgacggatgaccgatcatagcataaaagagtgccagaagagcctggactttgtgttgggctggtttgctaagccggtgtttatcgacggcgattaccccgagtctatgaagaataatctgagttccatcttaccagacttcactgagtcagagaagaagttcattaaaggtaccgctgattttttcgcactgtgctttggccccacactgtctttccagctgctcgaccctcatatgaaattcaggcagttagaatccccaaacctgcgccagttgctgtcctggatcgatctggagttcaatcatccccaaatttttattgtggaaaatggatggtttgtttcaggtacgactaaaagggacgacgctaagtatatgtactatttgaaaaaatttataatggaaacattgaaggcgattaagttagacggagttgatgtcatcgggtacacagcttggagcctcatggatggctttgaatggcataggggttactccattcgaagggggctgttctacgttgacttcctctcccaggacaagatgctcctccccaagtcaagcgccctcttttatcagaagctaatcgagaaaaatgggttcccacctttgcctgaaaaccagccgttggagggcacatttccctgcgacttcgcctggggggtggtggacaactatatccaggtggatacaaccctatctcaatttaccgacctgaacgtgtacctttgggacgtgcaccactccaaaagactcataaaggtggacggcgtcgtgactaaaaagcgtaagtcttattgcgtggatttcgccgcaatccaaccgcagattgcgttactgcaggaaatgcatgtgacccacttccgtttttcccttgattgggctctgattttacccctcggtaaccagtctcaggtgaaccacacaatattgcagtactaccggtgtatggcttctgaactggttagggtaaacatcacaccagtggtcgccctgtggcagcccatggcacccaatcagggactgccgagactgcttgccagacagggagcgtgggaaaacccctacaccgcactcgcatttgcagagtacgcaagactgtgtttccaagaactgggacatcatgtgaagttatggatcaccatgaatgagccttacactcgaaacatgacctattctgcaggacataatttattaaaggctcacgcgttggcgtggcacgtctataatgagaaatttagacacgcacaaaacggcaagataagtatcgcattgcaggctgattggatcgaacctgcctgccctttttctcaaaaagacaaggaagtcgcagagagagtgctcgagttcgacattggatggcttgcggaacccatcttcggtagtggcgactacccatgggtgatgagagactggttgaaccagcgaaacaattttctgctgccttatttcaccgaagatgaaaaaaagttgatccaaggcacgttcgacttcctggctctgtcccactatacgacaattctcgtggactctgaaaaagaagatccgattaagtacaatgattatttggaagtacaggaaatgacggacatcacgtggctcaacagtccatcgcaagttgctgtagtaccctggggcctgagaaaggtactcaactggctaaaattcaagtacggggacctgcctatgtacatcatttctaatggcattgacgatgggttacacgcggaggatgatcagctgagagtctattatatgcagaattacatcaatgaggcccttaaagcgcatattctagacgggattaatctgtgcggatacttcgcctattcttttaacgaccgaaccgccccgaggtttggtctctatcggtacgcggctgaccagttcgaaccaaaggcctccatgaagcattaccgcaagattattgattctaacggattccccgggccagaaaccttggagagattttgtcccgaagagttcacagtgtgcactgagtgctcttttttccacacacgcaaatccctgctggcctttatcgcatttctgttcttcgctagcattattagcttgagccttatcttttactatagtaaaaagggcaggagatcatataag

SEQ ID NO: 149673 - DNA, 3036 bp, Artificial Sequence
  derived and/or modified sequence
atgcctgcttcggcgccaccaagacggccgaggccaccgcctccttcgctgtcattgctcctcgtgcttctcggactgggcggacgacgcctgagagctgaacctggagacggagcccagacctgggcccgtttctcacgcccgccggcgccagaagccgccgggctcttccaagggacgttccctgacggattcctgtgggctgtgggttcggccgcgtaccaaaccgagggtggctggcaacagcacggaaaaggagcgagcatctgggatactttcactcaccaccctctggcaccaccaggcgactcccgcaacgcttcacttccgctcggcgcaccaagcccgctccaaccagcaaccggagacgtcgcgtccgactcctataacaacgtgttccgagatactgaggccctgcgggagctcggggtgacgcactacagattttcgatctcgtgggcacgggtgctgcctaatggatccgccggtgtgccaaaccgggagggactgcgctattaccgcagactcctggagcgcctgagagaactgggagtccagccagtggtcaccctgtatcattgggacctgccacagcgactgcaagatgcctacggaggttgggccaaccgggcactcgccgaccatttcagagactacgctgaactctgtttccggcacttcggaggacaggtgaaatactggattactatcgacaatccatacgtcgtggcttggcacggatatgccactggacgactggctcccggaatcaggggcagcccaagactgggatacctggtggctcacaacctcctgcttgcccacgcaaaggtgtggcacctgtacaacacttcatttaggcctacccaagggggacaggtgtcgatcgctctctcaagtcactggattaaccctaggagaatgactgaccattcaatcaaggaatgccagaaatccctggactttgttctgggctggttcgcgaaaccggtctttattgacggagactatccagagtccatgaagaacaacctgtcgagcatcctgccggacttcaccgaaagtgagaagaaattcatcaagggaaccgccgacttctttgcgctgtgcttcggaccaacgctctcattccagctgctggatccacatatgaagttccggcagctggaatccccgaacttgagacagctcctgagctggatcgatctggagttcaaccacccgcagattttcatcgtcgagaatggatggttcgtgtcgggaactaccaagagagatgatgccaaatacatgtactatcttaagaagtttatcatggagactcttaaggccattaaacttgacggcgtggacgtgatcggctacaccgcctggtcgctgatggacggattcgagtggcacagaggatactccatccgccgcggactgttctacgtggatttcctgtcacaggataagatgctgctgcctaagagctcggcactgttctaccagaaacttattgaaaagaatgggtttccgccactgccagagaaccaaccgcttgagggtacttttccttgtgactttgcctggggtgtggtcgacaactacatccaggtggatactaccctgtcacagtttaccgacctgaatgtctacctgtgggacgtgcatcacagcaagaggctcattaaagtggacggagtcgtgactaagaaacgcaagtcctactgcgttgacttcgctgccatccagcctcagatcgcccttttgcaggaaatgcacgtgacccatttcagattctccctggactgggccctcatcctcccactgggaaatcaatcccaggtgaaccacactatcctccaatactaccgctgcatggcttccgaactggtgcgcgtcaacattaccccggttgtcgcgctgtggcagccaatggccccaaaccagggcctgccgcgattgctggccagacagggggcctgggagaacccatacacggctctcgcgtttgcggaatacgcccggctgtgcttccaagaactgggacatcatgtcaagctgtggatcaccatgaatgaaccttacactcgcaacatgacttactcggcggggcacaatctcttgaaggcccatgccctggcttggcatgtctacaacgaaaagttccgccacgcacagaatggaaagatttccattgcactgcaagcggactggatcgaaccggcttgccctttttcacagaaggacaaggaggtggcggaacgcgtgctcgagttcgatatcggatggctggcagaaccgatctttggctccggcgattacccatgggtgatgcgggattggctgaatcagcggaataacttcctgctgccgtatttcaccgaggatgaaaagaagctgatccaaggtactttcgattttctggcgctcagccattacaccaccatcctggtggattccgagaaggaagatccgatcaagtacaatgattacctcgaagttcaagagatgactgacatcacttggctcaattccccctcccaagtggcagtggttccgtggggtctgcgcaaagtgctcaattggctgaagttcaaatacggggacttgccgatgtacatcatctccaacggcatcgatgatggactgcacgctgaagatgaccagctgcgcgtctattacatgcaaaactacatcaacgaagccctcaaggctcacatcctggacggaatcaatctctgcggatacttcgcttactcgttcaacgatcggactgcaccccggttcggcctctaccgctacgccgctgaccagttcgaaccgaaggcaagcatgaagcactaccgcaagataatcgactcgaacggattccctggaccggaaaccctcgaacgcttctgccctgaagagtttactgtgtgcactgagtgctccttttttcacaccaggaagtcgctccttgctttcatcgcattcttgtttttcgcatccatcatcagcctctcccttatcttttactacagcaaaaagggacggcggagctacaaa

SEQ ID NO: 149674 - DNA, 3036 bp, Artificial Sequence
  derived and/or modified sequence
atgcctgctagtgcaccgccacggcggccacggcccccccctccctccttatccttgctgctcgtcttgctcggattaggaggccggcgactgcgcgcagagcccggggatggcgctcaaacatgggctcgcttcagccggcccccagccccagaagccgcaggactgttccagggaaccttccccgacggcttcctctgggcagtgggaagcgcggcctaccaaaccgagggcggctggcagcagcacggcaagggtgcttctatttgggatacattcacacaccacccgctggcacccccaggtgatagtaggaatgcttctttgcctctgggcgccccatcacctctgcagcccgccacaggagacgtcgctagtgacagctataataacgtgttccgcgatacagaggcgctccgagaattgggagtgacccactatcgtttctcaatcagctgggcccgagtcctgccgaacgggagcgcaggggtgcccaatcgggaaggcctgcgttactatcgaaggctgctggagcgtttgcgggagctgggcgtccaacccgtcgtgacgttgtatcactgggacctgccacagcggctgcaggacgcctacggtggatgggcaaaccgtgctctggcggaccatttccgagattatgccgaactgtgttttcgccattttggcggacaggtcaagtattggatcactattgataatccctacgtcgtcgcttggcatggctacgccactggtcgtctagctcccggaatcaggggctccccccgcctggggtacctcgttgcccacaacctgctcctggcccacgcgaaagtctggcacttgtataatacttcctttcggccaacccagggcggacaggtctctatcgccctgagcagtcactggattaatccccgccggatgacagatcatagcattaaggaatgtcagaagagcctcgacttcgtattgggatggttcgccaagcccgtttttatagacggagactatccagagtctatgaaaaacaatctgtcctccatcctgccagatttcaccgagtctgagaaaaaattcattaagggaactgccgatttcttcgctttgtgtttcggtcctacattgtcctttcagctcctcgatcctcatatgaaatttagacagctggaaagtcccaatctccgtcagttgctttcatggattgatcttgaatttaaccacccacaaattttcatcgtggaaaatggctggttcgtcagcggcacgaccaaacgggatgatgctaagtacatgtattatcttaagaagttcattatggagacgttaaaggccatcaagctggacggcgtggatgttataggctatactgcatggagtctgatggatgggttcgagtggcacaggggctactctatacgccgtgggctattctatgtggacttccttagccaggataagatgctcctgccaaagtcgtctgctctcttttaccagaaactgatagaaaaaaacgggtttcctccattacctgaaaaccaacccctcgaaggcacctttccctgcgattttgcctggggtgtcgttgataattatatccaggtggataccactctgagccaatttacagatctcaatgtatatctttgggatgtgcaccacagtaaacgcctgatcaaagtggacggcgtcgtaaccaagaagaggaagtcttactgcgtggattttgccgccattcaaccccaaatcgcacttctccaggagatgcatgtaacgcacttcaggttctccctggactgggcgttaatcctcccgttggggaaccaatctcaggttaaccatactattcttcagtactatcgctgcatggccagtgagctagtgcgagtgaacattacacctgtggtggcactctggcagccgatggcaccgaaccaaggtctacctcgcctcctggctaggcaaggcgcgtgggaaaatccttacactgctctggctttcgccgagtatgccaggctttgttttcaagaactggggcaccacgtaaaactgtggatcacaatgaatgaaccctacactcggaatatgacctactccgcaggccacaacctactcaaagcgcatgcgctcgcctggcatgtttataatgagaaattccgtcacgcacagaacggcaaaatatccatcgcactccaggcggattggatcgagccagcctgcccgttcagtcagaaggacaaagaggtggcggagagagtcctggagtttgatatcgggtggctggcagaacccatctttggcagcggagactacccatgggtgatgagagactggctcaatcagaggaacaacttcctccttccctatttcaccgaagacgaaaagaaactgatacaaggtacatttgacttcttggccctgagccactacacaaccatcctggttgactctgaaaaagaggatcctatcaaatacaacgactacttggaggtacaggagatgacggatattacatggctcaactcgccctcacaggtggcagtggtgccttggggattgaggaaagtgttgaattggttaaaattcaaatacggggacttgcctatgtacataatttccaatggcattgacgatggactccatgccgaagacgaccagctcagagtgtattacatgcagaactacatcaacgaggcgctgaaagcacatattttggatgggataaatttgtgtgggtattttgcatattcctttaacgaccggacagcaccacgattcggattgtatcgctacgccgctgatcagttcgagcctaaggcttctatgaaacactacaggaaaattatagactctaatggtttcccaggcccagagacactggagcgtttctgtcctgaggagttcaccgtctgcacggaatgcagtttcttccacacgaggaagtcactcctggcgttcatagcttttctttttttcgcttctatcatctcactttccctaatcttttactacagtaagaaaggacggcgctcctataag

SEQ ID NO: 149675 - DNA, 3036 bp, Artificial Sequence
  derived and/or modified sequence
atgcctgcatcggcaccacctcgcagacctcggccgcctcctccctccctgagccttctccttgtgttgctcgggctgggtggccgtaggcttcgcgcggaaccaggagacggggcacaaacctgggcaagattttcgaggcccccggctccagaagccgccggactgttccagggtacttttcccgatggattcttgtgggcagtgggtagcgccgcataccaaaccgagggtggatggcagcaacatggcaagggagcaagcatttgggatacgtttacccatcaccccctcgcacctcctggcgactcgagaaacgcgtcgctcccattgggggccccttcaccactccaaccggccactggagatgtcgcctcagatagctacaataatgtgtttcgggataccgaagcactgagggagctgggagtgactcattaccgctttagcatttcatgggcaagagtgctcccgaatggctcggcaggagtgcccaacagagaaggtctgagatactaccggcgcctcctggaacgactccgcgagcttggggtccagcctgttgtgaccctttaccattgggacctgcctcagaggttgcaggacgcatacggaggatgggcgaaccgggcgctggcagatcatttccgggattatgccgagctttgcttcaggcatttcggagggcaggtcaagtactggattactatagataacccatacgtggtggcatggcatggatacgcaaccggaaggctcgcacctggaattagaggatcgcctcggcttggttaccttgtggcacacaacctgctgctggcccatgcaaaggtttggcacctgtacaatacctcgttccggcctactcaaggtggacaagtctcgattgcactgtccagccattggatcaacccaaggagaatgaccgaccactccattaaggaatgtcaaaagagcctcgactttgtgcttggctggttcgcaaaaccagtgttcatcgacggggactacccagaaagcatgaagaacaacctttcatccattcttccggattttactgaatcagaaaagaaattcatcaagggtactgcggacttctttgcactctgctttggcccaaccctgtcttttcaacttctcgacccacacatgaagtttagacaactcgagtcgcctaacctgagacagctgctgtcctggattgatcttgagttcaatcatccgcagatattcatcgttgaaaatggctggtttgtgtcaggcactactaagagagacgatgcgaagtatatgtattacttgaagaagtttatcatggaaacgcttaaagcaattaagctggacggcgtcgatgtgatcggttacactgcatggagcttgatggacggttttgaatggcaccggggctactccattcgtcgcggtctgttctacgtggattttctgagccaggacaaaatgctgcttcctaaatcatcggctctcttttaccaaaaacttatcgaaaagaatgggtttccgccattgccagagaatcagcctctggagggcacctttccttgcgacttcgcatggggggtggtcgacaattacatacaagtggataccaccctttcccaatttaccgatcttaacgtgtatctgtgggatgttcatcattcaaaacgtctcattaaagttgatggagttgtgactaagaaaagaaagagctactgtgtggactttgcagctattcaaccacaaattgctctcttgcaagaaatgcacgtgacgcatttccgcttctccctggattgggcactgattctgccgctgggaaatcagtcccaggtgaaccacactatcctgcagtactaccgctgcatggcatcggaactggtgcgcgtgaacattacgcctgttgtcgcactctggcaaccgatggctccaaaccagggtttgccccgacttcttgcaagacagggtgcttgggaaaacccatacacggcactcgcatttgcagaatacgcgagactgtgctttcaagagctggggcaccatgtcaagctgtggatcaccatgaacgaaccctacactcgcaacatgacctactccgccggacataaccttctgaaggcacacgcccttgcatggcatgtgtacaacgaaaagtttaggcacgcccaaaacggaaagatttccattgcacttcaagctgactggattgaacctgcatgtcctttttcacagaaggataaagaggtcgcggagcgcgtgctggagtttgatattggctggcttgcagaacctatctttggatcgggagattacccgtgggttatgcgggattggcttaatcaaaggaacaactttctccttccttactttactgaagatgagaagaaacttatacaaggcacctttgattttctcgccctctcccattataccaccatccttgtcgattcggaaaaggaggaccctataaagtacaatgattatctggaggtgcaggagatgacggatataacttggttgaactctccatcccaggtggccgtggtgccttgggggcttcggaaagtgctgaactggctcaagtttaagtatggtgacctgccgatgtacataatcagcaatggaatcgatgatggacttcatgccgaggacgaccaactgagggtgtactacatgcagaattacatcaacgaagcgcttaaggcccacatccttgatggaattaacctgtgtggctacttcgcctattcctttaatgatagaactgcaccccgattcggtttgtacagatacgcagcggatcaatttgaacccaaggcgtcgatgaaacattaccggaagatcatcgattctaacgggttcccggggcccgaaactttggaacgcttttgtccggaagaattcaccgtgtgtaccgaatgttcttttttccatactagaaagagcctgctcgcgttcatcgcctttctctttttcgcatccatcatttctctttcgcttatcttctactacagcaagaagggacgacggtcatacaaa

SEQ ID NO: 149676 - DNA, 3036 bp, Artificial Sequence
  derived and/or modified sequence
atgcccgcctccgccccccccagacgcccccgtccacctccccccagtctttcacttctgctggtactcttgggactcggaggtcgccgtctcagggctgagccaggcgacggcgcacaaacctgggcacgtttttcaagacctcctgccccagaagctgctggtctgtttcagggtaccttccccgatggtttcctctgggctgtgggatccgcagcctatcaaactgagggtggttggcagcagcatggcaaaggagcttctatctgggacactttcactcatcatcctttggcaccacccggcgactcaaggaatgcttctctgcctttgggagccccctctccactccagcccgcaacaggagacgtagcatcagactcatacaacaatgtctttagggatactgaagcccttcgcgagctgggagttacacattatcgtttcagcatcagttgggctcgcgtgctgccaaacggttccgcaggtgtccccaaccgtgaaggtctgcgctactaccgcaggctgctggagaggctgagagagcttggagtgcagcccgtcgtgacactctaccactgggatctgccccaacgtctgcaggacgcttatggaggatgggccaacagggccctggccgatcacttcagggactacgcagagctttgctttcgccatttcggcggacaggtgaagtactggatcaccattgataacccctacgtggtcgcctggcatggatacgccaccggtcgcctggccccaggcattaggggctcacctaggcttggatatcttgtggcccacaaccttcttctggctcacgctaaagtgtggcacctttacaatacctcctttcgcccaactcagggcggacaagtgtctattgccctcagttcccattggattaaccccagacgcatgactgatcattctatcaaagagtgccaaaaatccttggattttgttctcggatggtttgccaagcctgtgtttatcgacggtgattatccagaatctatgaaaaataatttgtctagcatcctgcccgacttcactgagtctgaaaaaaaattcatcaaaggaaccgccgatttctttgctctgtgcttcggacccacactgagcttccagctgctggacccccatatgaagttcagacagcttgaatcccccaatctccgtcaactgttgagttggattgacctggaattcaatcaccctcaaatctttatcgtggaaaacggctggttcgtgagcggaaccacaaagcgcgacgatgctaagtacatgtattacttgaagaagttcataatggagactctcaaagctatcaaactggacggtgtggatgtgattggctataccgcctggtctcttatggatggcttcgaatggcatcgtggatactcaattcgccgcggcttgttctatgttgacttcctgagtcaggataagatgcttcttcctaagtcctccgcacttttctatcagaaactcatcgaaaagaacggcttccctccattgccagagaaccagccactggaaggaactttcccctgcgacttcgcttggggcgtggttgacaactatatccaggtcgacaccactctgagccagttcactgatctgaacgtttacctgtgggatgtgcatcacagcaaaaggctgataaaggttgacggcgtcgtcacaaagaagagaaaatcctactgcgttgattttgctgccatccagccacagattgccttgttgcaggaaatgcacgtgacacacttcagattcagtctcgactgggcactgatcctgcctctgggaaaccagtcacaggtgaatcacacaatactgcagtactacaggtgtatggctagtgaactcgtccgtgtcaatataaccccagtcgtggccctgtggcagcctatggctccaaatcagggtctgcctcgcctgcttgcaaggcagggcgcctgggagaatccttatacagccttggcattcgccgagtatgctcgcctttgtttccaagagctgggccaccatgttaaactgtggatcacaatgaatgagccctacactcgcaacatgacctactctgccggacacaacctcctcaaggctcatgccctggcttggcatgtttataacgagaagttcaggcacgctcagaacggcaagatctccatagctctgcaagccgactggattgagcctgcctgcccattctctcagaaagataaagaggtcgcagagagagtgctcgaatttgatatcggttggctggctgaacctattttcggaagtggcgactacccctgggttatgcgcgattggctgaaccagagaaataacttcctgctgccctacttcacagaagacgagaaaaaacttattcagggcaccttcgattttctggctctgtctcactacaccaccatcttggtggactctgaaaaggaggacccaattaagtataatgactatctggaggtgcaggagatgactgacatcacctggttgaactcaccctcccaagttgccgtagtgccctggggcctgaggaaagtcctgaactggcttaagtttaagtacggagacctgccaatgtatatcataagtaatggcatcgatgacggcctccacgctgaagacgatcagcttagggtttactatatgcagaactacatcaatgaagctctcaaggcccacatcctggatggtattaacctgtgtggatattttgcttactcattcaacgatcgtacagctcctagattcggcctgtaccgctacgctgcagaccagttcgagcctaaggcttctatgaaacattataggaagatcattgacagtaacggtttccctggtcccgaaactctggagagattttgtcctgaggaattcactgtatgcactgagtgctccttttttcacaccaggaagtccctcctggctttcatcgccttcctgttctttgcttctatcatcagcttgtcccttattttttactactctaagaaaggccgcaggtcctacaag

SEQ ID NO: 149677 - DNA, 3036 bp, Artificial Sequence
  derived and/or modified sequence
atgccagcttcagccccacccagaaggccgagaccacctccccctagtttgagccttctgcttgtgctcctgggcctgggaggtcgacggctccgggcagagccaggtgacggcgcccaaacatgggcaagattctccagacctccagcaccagaagccgccggcctgtttcagggcacatttccagacgggttcttatgggcagtgggctctgctgcataccaaactgagggagggtggcaacagcatgggaaaggtgctagtatttgggatacatttactcatcaccctctggcgccacccggggattccaggaatgcctccctgcctctgggggctccatcacccctgcagcccgcaactggcgatgtagcaagcgactcatataataacgtgtttagagacaccgaggctctgagagagctgggagtcactcactacagattttctattagctgggcaagggtgctgcccaatggcagtgcaggcgtcccaaaccgggagggcctgagatattacagaagactccttgagaggcttcgggagttgggcgtacaaccagtagtgaccctttaccattgggacctgccacagagattacaggatgcgtacggcgggtgggctaatcgcgccttagctgaccatttcagagattacgccgagctgtgcttcaggcacttcggtgggcaggtaaagtactggatcaccatagataacccatacgtcgtggcatggcacggatatgcaaccggtcgcctggcccctgggatcagaggctcaccaagactcggctatctggtggcccataatttgctgttggcccatgcgaaggtttggcacctatacaatacttctttccgaccaactcaggggggccaggtgtccattgcactgtctagccattggataaacccccgtaggatgaccgatcacagtatcaaagagtgtcagaaatccttggactttgtgttgggatggttcgcgaagccagtgttcattgatggtgactatcctgagtccatgaagaataatctgtcctctatcctgccagactttactgagtctgagaaaaagttcataaagggtaccgccgattttttcgccctctgctttgggcctacactaagtttccagctgttagacccccatatgaagttcaggcaactcgaatccccaaacctgcggcagctgctgtcatggatagatctggaattcaaccatccacagatttttatcgtggaaaacgggtggtttgtgtctggaacaaccaaaagagacgacgccaaatatatgtattacctgaagaaatttatcatggagaccctcaaggccataaaacttgacggagtcgacgtgattgggtacaccgcgtggtcgttgatggacggttttgaatggcataggggttactcgattaggcgcggcctgttctacgtcgatttcctgtcacaggacaagatgctcctcccgaagtcgtccgccctgttttaccagaagttaatcgagaaaaatggatttccacctcttcccgagaaccaaccactggagggcactttcccttgtgacttcgcctggggggtggtggataattacatacaggtcgacaccacactgtcacagttcacggaccttaatgtgtatctgtgggacgtacaccattctaagcgtctgattaaggtggatggtgtcgtcacaaagaagcgcaaaagctactgcgtcgatttcgctgctattcagcctcaaatcgctctgttacaggaaatgcacgttacccacttccggttctctctggattgggcgctgatacttccattgggaaaccaatcacaggtgaatcataccattctgcagtattatcggtgcatggcatccgagctggtgcgagtgaacattacacctgtcgtagctctgtggcagcctatggccccaaatcaagggttgccccgccttttagcccggcaaggggcgtgggagaatccatacacggcactcgctttcgcagagtatgcacggttgtgtttccaggaactcggacatcatgtgaagttatggatcacaatgaacgaaccgtatacccgaaatatgacctacagcgcgggtcataacctgctcaaagcgcacgccctcgcttggcatgtgtacaatgagaaattcagacacgcacagaacggaaagatttcaattgcactgcaggctgactggatagaaccagcttgtccgttttcccagaaagataaggaagtcgccgaacgtgtgctcgagtttgatataggctggttagccgaacccatcttcgggtccggagactatccatgggtaatgagagattggctgaaccagcggaataatttcctcttgccttactttacagaagatgagaagaagctaattcagggcacctttgatttcctagcactatcgcattacacaaccatcctggttgacagcgagaaggaggatccaatcaaatataacgactatttagaggtacaggaaatgacagatatcacatggttaaactcaccttctcaggtggcagtagtgccttggggactcaggaaggttctgaattggctgaagtttaagtatggcgatctgccaatgtatatcatctccaatgggatcgatgatggcctccacgccgaggacgaccaattgagggtgtattacatgcagaattatatcaacgaggctctgaaggctcacatcctcgatgggattaatctttgcggctattttgcatactcctttaatgaccgcaccgcaccccgtttcggcctgtaccgttatgcggccgaccagttcgagcccaaagcaagcatgaagcattaccgaaagatcatcgactccaatggatttccggggcctgagaccctggaacgcttctgtcccgaagaatttacggtatgtactgaatgcagttttttccacactagaaagtccctcctcgccttcattgcctttctcttctttgcctcaatcatctcactgtctctcatcttctactatagtaagaaaggcaggagatcctataag

SEQ ID NO: 149678 - DNA, 3036 bp, Artificial Sequence
  derived and/or modified sequence
atgccggcctcggcacccccccggcggcctagacccccaccacccagtctgagcctcctgctcgtcctcctaggactgggaggccgcaggctgagggcagagcccggagacggcgctcaaacatgggcgcgtttcagcagacctcctgcccctgaagccgcaggtctgttccaggggacattccctgatggtttcctgtgggccgtgggatccgccgcttatcagaccgagggagggtggcagcagcacggcaagggcgctagcatttgggatacatttactcatcatcccctcgctccacctggtgactccagaaatgcatcactgcctctcggggcaccgtcccctctgcagccggccaccggcgatgtggcaagcgactcttacaataacgtttttcgggacacagaggcactgcgggagttaggagttactcattatcgtttctccatttcgtgggctcgcgtcctccccaacggttccgccggtgtgccaaaccgggaggggttaagatactatcgccgactgctcgagcgtctgcgcgaattgggtgtgcagcccgtagtgacactgtatcactgggacttgccacagaggttgcaggacgcgtacggtggatgggccaatcgcgcactggccgaccatttcagggattacgccgaactgtgtttccgccattttggtggtcaggtgaagtactggattactattgacaacccttacgtcgtagcctggcatggctatgctaccggacggttggcccctggcattcgcggttctccgaggctgggctatctggttgctcacaacttgctactcgcccacgcaaaagtgtggcacctttacaacacttcttttcgccccacgcagggcggacaggtatccattgccttgtcttcgcactggatcaatcctcggcgtatgaccgaccacagcattaaagaatgccagaagagcctagatttcgttctggggtggtttgcaaagcccgtgtttattgacggcgattaccctgaaagcatgaagaacaatttgtcaagtattttgccagattttactgagtccgagaagaagttcatcaaaggaaccgctgatttcttcgccttgtgttttgggccaaccctgtctttccaactgctggacccgcatatgaaattccggcagctggagtccccaaaccttcgccagcttttgagctggattgaccttgagttcaaccaccctcagatatttatagtggagaacggttggtttgtgtctgggacaaccaaaagggatgacgcaaagtatatgtactacctcaagaaattcatcatggaaaccttgaaggcaatcaagctcgacggtgtggatgtgatcgggtacactgcctggagtttgatggatgggtttgagtggcatcgtgggtatagcatcagacgcggactattttatgtggatttcctgtctcaagataagatgctgctgcccaagtcctccgccctgttttatcagaaacttatagagaaaaatgggttccctccgttgcctgagaatcagccacttgagggcacctttccgtgcgattttgcttggggggtcgtcgataactatatccaggttgataccaccctgtcgcagttcacagacctcaacgtgtacctgtgggatgtgcaccattccaagcggctgatcaaagtcgacggagtggtgaccaagaagcggaaaagctattgcgtggacttcgccgctatccagccacagatcgctttactccaggagatgcacgtgactcacttccggttcagtcttgactgggcactcatactacccttgggcaaccagtctcaagtcaaccataccatcctgcagtattatcgatgcatggcatctgagctggtgcgagtcaatatcactccagtggtcgcgttgtggcagccaatggctcctaaccagggccttcccaggctgctcgctcgacagggggcctgggaaaacccatatacagcactcgcctttgctgaatatgcacgtctctgcttccaggagttgggccatcatgtgaagctgtggattacaatgaatgagccctacaccagaaacatgacatattccgcaggccataatctgttaaaagcccatgccttagcctggcacgtgtacaacgaaaagttccggcacgctcagaatggaaagatatctatagccctccaggccgactggatcgagcctgcctgtccattttcccaaaaggacaaggaagtcgcggagagagttctggagtttgacatcggttggctggccgagcctatttttggatccggcgattacccgtgggtgatgagagactggctcaaccaacgcaacaattttcttctgccctacttcacggaggatgaaaaaaaactgatccagggtacctttgatttcctggcgctctctcattataccaccatcctggtggactccgagaaagaggaccctatcaagtataatgattacctggaagtgcaagagatgacagatataacctggctaaattcacccagccaggttgctgtcgtcccctggggactaaggaaggtgttgaactggctgaaattcaaatatggcgacctgcctatgtacatcatatctaatggaattgacgatggcttgcacgctgaagatgatcagctgagagtttactatatgcagaactacattaatgaagccctgaaagcacacattctggatgggattaacctgtgcggctatttcgcttatagctttaacgaccgcacagccccacgcttcggcctgtaccggtacgccgccgatcagtttgaacctaaagcaagtatgaaacattacaggaaaatcatagattccaacggctttcccggaccagagaccctggagagattctgccctgaagaatttaccgtgtgcacagagtgttcatttttccatacccggaagtccctgttggcttttattgcgtttttatttttcgcaagcattatttcgctttctcttatattctattactcgaaaaaagggagacggtcttacaag

SEQ ID NO: 149679 - DNA, 3036 bp, Artificial Sequence
  derived and/or modified sequence
atgccggcttcagcacctccgagaaggccgcgccctccgccgccatccctctcgctgcttctcgtcttgttgggtctgggaggaaggcgcctgcgcgcggagccgggagacggcgcccagacgtgggcacggttttccagacctcccgcccctgaagccgccggacttttccaagggactttcccggatggttttctgtgggctgtggggtcggcggcctaccaaactgaaggaggatggcagcaacacggaaagggcgcaagcatttgggatacgttcactcatcatccgctcgctccgccaggagacagccgtaacgcttccctcccactcggcgcgccaagcccactgcaaccggccaccggggatgtcgccagcgactcctacaacaacgtgttcagagacaccgaagcgctgcgagaactgggggtcacccactaccggtttagcatctcatgggcgcgggtgctgccgaacggaagcgcgggcgtcccgaaccgggaaggcctgaggtactacagacgcctcctggagcggctgcgagagttgggcgtgcagcctgttgttaccctgtatcactgggacttgccgcaacgcctccaagatgcatacgggggttgggccaatcgcgccctcgcagatcattttcgagactatgctgagctgtgcttccgccatttcggcggacaggtcaaatactggatcactatcgacaatccttatgtggtggcttggcatggatacgcaaccggccggctcgccccgggaatccggggctcgccaaggctcgggtacctggtggctcacaacctcctgcttgctcacgcgaaagtgtggcacctgtataacacctcgttccggccgactcagggtggacaggtgtccatcgcactgtcaagccattggatcaatccgaggcgcatgaccgatcactcaatcaaggagtgccaaaagtctctggacttcgtgttgggatggtttgccaagcctgtgttcatcgacggagactaccccgagtcgatgaagaacaacctctcgtcgatccttcctgatttcaccgaatcggagaaaaagttcatcaagggaactgccgacttcttcgcgctttgtttcggaccgaccctgtcctttcagctgttggacccacatatgaagtttcgccagctggaatcgcccaacctcagacagctgctgagctggatcgatctggagttcaatcacccgcagattttcatcgtggagaatggatggttcgtctccggcactactaagagagacgacgccaagtatatgtactatctcaagaagttcatcatggaaactcttaaggcaatcaaacttgacggagtggacgtgatcggatacactgcgtggtcactgatggatggcttcgagtggcaccggggctactccatccgccggggtctgttctacgtcgacttcctgtcccaggacaagatgctcttgcctaagtcatccgcgttgttttaccagaagctgatcgaaaagaatggattcccgccgttgcccgaaaatcaaccgctcgagggtacttttccgtgtgacttcgcttggggagtggtggacaactacattcaagtggacactaccctttcacaattcacggaccttaatgtgtacttgtgggatgttcaccattccaagcggctgatcaaagtggacggagttgtgacgaagaaaaggaaatcatactgcgtggatttcgctgccatacaaccacagatcgcgcttctgcaagaaatgcacgtgactcacttcagattctctctggactgggcgcttatactccctcttgggaaccagtcacaggtgaaccacactattctgcagtactatcggtgcatggccagcgaactggtccgcgtgaacatcacccctgtcgttgcactgtggcaacctatggccccaaaccagggccttccgaggctccttgcccgccagggagcatgggaaaatccgtacaccgccctcgccttcgccgaatacgcccggttgtgtttccaagaactgggccaccatgtgaagttgtggatcaccatgaatgagccatacactagaaacatgacttacagcgcggggcataatctgttgaaggcgcatgcgctggcctggcacgtgtacaacgagaagtttaggcatgcacaaaacggaaagatttcgatcgcgctccaggcggactggattgagccggcgtgccccttttcgcaaaaggacaaagaagttgccgaacgtgtcttggagttcgacattgggtggctggcagaacccatcttcggatccggtgactacccttgggtgatgagggattggctgaaccagcggaacaacttcctcctgccatacttcaccgaggacgagaaaaaactcatacagggaacgtttgattttctggccctctcccactacaccaccatcctggtggattccgagaaagaagatcccatcaaatacaatgattacctcgaagtgcaggagatgacggacatcacctggctgaactcgccctcccaagtggccgtggtcccgtggggtctgagaaaggtgcttaactggctcaagtttaagtacggtgatctgccgatgtacatcatctcgaacggcatcgatgacgggctgcacgccgaggatgatcagctgcgcgtctactacatgcagaattacatcaatgaggcgttgaaagcacacatcctggatgggataaatctgtgcggttacttcgcttactcttttaacgatcgcaccgcgccacgcttcggcctgtacagatacgccgctgaccagttcgaacctaaggcctcgatgaaacattacaggaagattatcgactcaaatggatttccgggaccagaaactctggagcgattttgcccggaagaattcaccgtgtgcaccgaatgctcattcttccacacccgcaaatcgctcctcgccttcatcgcattcctcttcttcgcctctatcatctctctttcactgatcttctactacagcaagaagggacggcggagctacaag

SEQ ID NO: 149680 - DNA, 3036 bp, Artificial Sequence
  derived and/or modified sequence
atgcctgccagcgcccccccaaggcgaccgcggccccctcctccttctctgagccttttgctggtgctgttggggctaggaggacgcagactgcgggcagagccaggggacggcgctcaaacatgggcccggtttagccgcccgcccgcgccagaagcagcagggttattccaaggcacctttcctgacggatttctctgggcagttggatctgccgcttatcagacagaaggcggatggcagcagcatggtaaaggagcctctatctgggacactttcacccaccacccactcgcacctccaggagatagcaggaatgcatccctgcctctgggtgcaccgtcgcctttacaacccgcaaccggcgatgtggcatccgatagctacaacaacgtgttccgcgataccgaagccctgcgggagttgggagtgacccattaccgcttttccatctcttgggcccgcgtgctgcctaacggcagcgctggggttcctaatcgtgaagggttgcgttattatcgaaggctcttggagcggctgagggaactcggggtccagcccgtggtgacactgtaccattgggatctgccccagaggttgcaagacgcctatggtggctgggccaatcgcgctctggctgaccatttcagggattacgctgaactgtgcttcaggcatttcggaggtcaggtgaagtactggataaccatcgacaacccgtacgtagtagcttggcacggctatgccacaggtaggcttgcacccggcattaggggcagcccgagactcggttacctcgtggcccacaacttgcttctggcccacgcaaaagtgtggcacctttacaatacttcattccgccccacacagggaggacaagttagcatcgccctgtccagtcactggataaacccacggcggatgaccgatcatagtatcaaagaatgccagaagtcactggacttcgtactgggctggttcgccaaaccagtttttatagatggggactaccctgaatccatgaaaaataacctcagcagcattctgcctgacttcaccgagtctgagaagaagttcatcaagggaaccgccgatttctttgccctttgctttggacccaccctgtctttccaacttttggatcctcatatgaagtttagacagctggagtcccctaacctgcgccagttgctctcatggatcgacctggagttcaaccacccccaaatctttattgtcgagaatggatggtttgtgagtgggactacaaagcgggacgacgctaagtacatgtactacctcaagaagtttataatggaaactctgaaagctatcaagctggatggagtcgacgtcatcggctataccgcatggagccttatggatggatttgaatggcaccgcggatacagcattaggaggggcttgttctacgttgactttcttagtcaggataagatgctcctgcctaaatcatccgcactgttttatcagaaattgatcgaaaaaaacggattcccacctctccctgagaatcagccactggaagggacctttccctgcgacttcgcttggggagtcgtggacaattatatccaggtcgatacaaccctgagccagttcactgacctaaatgtatacctgtgggatgttcatcacagcaagaggcttataaaggtggacggggtcgttaccaaaaaacgtaaaagttactgtgtggactttgcggccatccaacctcagatagctctcttgcaagagatgcacgtcacccactttcgcttcagcctggactgggccctcatcctgcccttgggcaaccagagccaagtcaaccatacaatactccagtactacaggtgcatggcatctgagctggtgagagtgaacatcacaccggttgttgctctgtggcaaccgatggcaccaaaccagggactgccaaggctgctggctcgacaaggcgcatgggagaatccctacactgcactggcattcgccgaatacgctcgcctgtgttttcaggaattgggacatcatgtgaaactgtggattacaatgaacgagccatatacccggaacatgacatactcggccggccacaacttgttaaaggcacacgctcttgcctggcacgtctataatgaaaaattcagacatgcacaaaacgggaagatctctatcgcattgcaagccgattggatcgagcctgcgtgtcctttctcccagaaagataaggaagtggcagagagggtgctggagttcgacatcggatggcttgcagaacccattttcgggagcggggactacccttgggtgatgagagactggctaaaccagcgcaacaactttctgcttccatactttacagaggatgagaaaaaactgattcaggggacctttgacttccttgctctctcccactatacaactatcttagtcgacagtgagaaggaggatcctatcaaatacaatgattacttggaggtgcaagagatgacggacataacttggctgaattcacccagccaggtggcagtggtcccgtggggccttaggaaggtactgaattggttgaaatttaaatatggagatctgcctatgtacattatttccaacggaatcgacgatggactgcacgccgaagatgatcaactcagagtctactatatgcagaactacattaacgaagcattaaaggcccacatcctggatggcatcaatttgtgcggctactttgcttacagctttaacgataggacagctccacgattcgggctctatagatacgctgccgaccaattcgaacctaaagcatcaatgaagcactatcgtaagatcattgatagcaatggatttccgggcccggagaccctggaaaggttctgtcccgaggaattcacagtgtgtactgagtgcagcttctttcacacccgcaaatcgctcctggcgtttatcgcttttctttttttcgccagtatcattagtcttagcctgattttctactactcaaaaaagggtagaagatcatataag

SEQ ID NO: 149681 - DNA, 3036 bp, Artificial Sequence
  derived and/or modified sequence
atgcctgcgagcgccccaccaagaagaccaagaccacctcccccaagtctcagcctgcttcttgttcttcttggcttgggaggcagaaggctgcgcgctgaacctggagacggagcccagacatgggctaggttttctagaccgcccgctccagaagccgcaggcctgttccagggaactttccccgacggattcctctgggcagtaggctccgccgcataccagacagaagggggatggcagcaacacggcaaaggcgcatcaatttgggacacgttcacgcaccatcctcttgcaccaccaggcgactcacggaatgctagtctacccctgggggccccaagcccgttgcaaccagctaccggagatgtcgcatctgacagttacaataacgtattccgtgacacagaggccctccgcgaactgggggtgacacattatcgttttagtatttcctgggctagggtgttgccaaacgggagcgcaggagtccctaaccgcgagggactgaggtactacagaagactgctcgagaggctcagagagctgggggtccagcctgtcgtcaccctgtaccactgggatctgccacaacgtctccaggacgcttacggcggctgggcaaatagagctctcgcagatcatttccgcgactacgccgaactttgcttcaggcacttcggaggccaagtaaaatactggatcacaattgacaacccctacgtcgtggcttggcacggttacgccacgggacgtcttgctcctggaatcagaggatctcctcggctgggatatttggtcgctcataacctgctgctagctcacgctaaagtctggcatttatacaatactagctttcgcccaacacaaggaggacaggttagcattgcgctctccagtcattggatcaatccgcgcaggatgaccgaccacagcatcaaagagtgccaaaaatctcttgactttgtgctcggctggttcgctaagcctgtttttatcgacggtgactatcctgagagtatgaaaaacaacctcagcagcatcttaccagattttaccgaatcagagaaaaaattcattaaaggtacagctgatttcttcgccctttgtttcggacctaccctctctttccagttgctagacccacacatgaagtttcgtcagctggaaagcccaaacctgaggcagctcctgtcatggattgacctggaatttaaccaccctcaaatttttatcgtcgaaaacggttggtttgtctcgggcactacaaaaagggacgacgctaagtacatgtactacctgaagaagttcatcatggagactttaaaggccataaaattagatggtgtggacgtgatcggctacactgcatggtcccttatggacggatttgaatggcataggggctattccatcaggagaggactcttttatgtagactttctgagtcaggataaaatgctgctccctaaaagcagtgctttgttttaccaaaaattaatcgagaaaaacggttttcccccacttccagaaaaccagcccttggaaggcactttcccttgtgatttcgcttggggagtggttgacaactacatccaggttgatactaccctctctcagttcacagacttgaatgtgtacctgtgggacgtgcaccactccaagaggctgatcaaggtggacggagtggtcacaaaaaagagaaaaagttactgcgtggacttcgcggctattcagccccagatcgctcttcttcaggaaatgcatgtcacccactttcgctttagcctggactgggccctcatcctgcctctggggaaccagtcgcaggttaaccacacaatcctccaatactaccgctgcatggccagcgaacttgtaagggtgaatataactccagtcgtcgcattatggcagcccatggcacccaaccaaggcctccctagactcctggcccgccagggagcctgggaaaatccgtacacggctctcgcgttcgcagagtacgcaagattgtgtttccaagagcttggccaccacgtgaagctttggatcaccatgaatgaaccatatacgcggaacatgacctatagcgctggacacaacctcctaaaggctcacgctctcgcatggcacgtgtacaacgagaagttcagacacgcccaaaacggcaaaatctcaatcgctctgcaggcagactggatagaacctgcctgcccattctcacagaaggataaagaggtggcagaacgagtattagagttcgatattggctggttggctgaaccaattttcggcagcggggactacccttgggtgatgagggactggctaaaccagaggaataacttcctgctgccatattttacagaggatgaaaaaaaactgatccagggtacctttgatttcctagctctctctcactataccacaatactcgtggatagcgaaaaggaggatccaatcaagtataatgattatctcgaagtgcaggaaatgaccgacattacatggcttaacagcccgagccaggttgccgtggttccttgggggcttagaaaggtgttgaattggctgaaattcaagtacggggacctgcctatgtacatcatcagtaacggaatcgatgacgggctccacgccgaagacgatcagctgcgcgtctattacatgcagaactatattaacgaggctttaaaggcacacattcttgatggcatcaacttgtgcggctattttgcatactcctttaacgatagaactgcacccagatttggattgtaccggtacgccgctgatcagtttgaacccaaggctagcatgaaacactacaggaaaatcatagactccaacggattccccgggccagagacccttgagaggttttgccccgaagaatttactgtgtgcacggagtgcagcttctttcacacccgtaagagtctgttggcatttatcgcattcttgttttttgcgagcattatcagcctgtcactgattttttattacagtaaaaaagggaggaggagttataag

SEQ ID NO: 149682 - DNA, 3036 bp, Artificial Sequence
  derived and/or modified sequence
atgcctgcctctgcacctccacgccgcccccggccacctcctccctctctaagcttattgctggtcctgctggggcttgggggaagacggctccgcgccgaaccaggtgatggcgctcagacttgggcaaggtttagcaggccccccgctcctgaggcagcgggtttgttccaaggtactttccctgacggattcctgtgggctgtgggatctgccgcataccagaccgagggaggttggcagcagcacggaaagggagccagcatctgggacaccttcacccaccaccccctggcaccgcccggtgactctcgtaacgcctcactcccgctgggtgccccaagtcccctccagccggcaaccggggatgtcgccagtgattcctataacaatgtcttccgcgacacagaggccctcagagaattaggagtcacccactacagattcagcatctcttgggcccgagtcttacccaatggttccgcaggcgtcccgaatagagagggactgagatattacaggcggctgcttgagcgcctccgtgagctgggcgttcagccagtggtgacgttgtaccactgggatctgccccagcgcctacaagacgcatatggcggatgggccaatcgagcccttgcagatcactttagagattatgctgaactttgtttcaggcacttcggcggacaagtcaaatactggataactattgacaatccttacgtcgtggcttggcacgggtacgcaacgggtcggctagcacccgggattcggggatcccccagactgggctatttagtggctcataacctgctgctggcccatgctaaggtttggcatctctataatacatccttcaggcctacgcaaggtggacaggtcagtatcgcgctgtcttctcactggattaaccccagaagaatgacggatcattctataaaggagtgtcagaagagccttgatttcgtgcttgggtggtttgcaaagccggttttcattgatggagattatcctgagtctatgaaaaacaatctttcatctattctgcccgactttaccgaaagtgaaaagaaattcataaagggaactgccgactttttcgcgctgtgcttcgggcctaccctctcgttccagctgctagacccacatatgaaatttcgacagctcgaaagccccaacctgcgccaactgctgagttggatcgatctggaattcaatcatccacagatcttcatcgtggaaaacgggtggttcgtgtcaggcactaccaagcgcgacgacgccaagtatatgtactatctcaagaagttcattatggagacacttaaagccatcaagcttgatggcgtggatgtcattggttataccgcatggtcacttatggacggtttcgagtggcatcggggctacagtattcggagaggactcttttatgtggatttcctgagccaggacaagatgctgctgcctaagtccagcgcgctgttctaccagaaactgattgagaagaacggttttccacccctgcccgagaatcagcccctggaagggacttttccgtgtgactttgcctggggtgtggttgataattatatccaggtggacaccaccctgagtcagtttacggatctgaacgtgtatttgtgggatgtgcatcattccaagcgtttgatcaaagtggatggcgtcgtcaccaagaagcgcaagagctattgtgtcgacttcgccgcaatccagccgcagattgcactcctgcaagagatgcacgtaactcacttcagatttagtctagattgggccctgatcctaccgcttggtaaccagtcccaagtcaatcataccattttgcagtactaccgttgcatggctagcgagctggttagggtcaacattacacccgtggtcgccctttggcagccaatggcaccaaatcaaggcctgcccagacttttagccagacaaggcgcatgggaaaacccctatactgctctggcctttgcagaatacgcacgcctttgcttccaggagcttggacaccatgtcaaactctggattaccatgaatgagccttatacgcggaacatgacctattccgcagggcacaatctacttaaggcacacgccctggcctggcacgtgtataatgaaaagttccgccatgcacagaacgggaagatctccattgcgctccaggctgattggatcgagcccgcctgcccgttcagccaaaaggataaagaggtggccgaacgcgtgcttgagttcgacatcgggtggctggcagaacctatcttcggttccggtgactatccatgggtaatgagagattggctcaatcagcggaataatttcttgttgccctacttcacagaagatgaaaagaaacttatacaggggacattcgactttctcgcattgtcccactataccaccatactggtggattctgagaaagaagatcctatcaaatataatgattatctggaggtccaggagatgacagacataacatggctgaactccccctcacaggtcgctgtcgttccttggggcctgaggaaggtgctcaattggttgaagttcaagtatggggatttacctatgtacataataagcaatggtatcgacgatgggttacacgctgaagatgatcagcttagggtatattacatgcagaattacatcaatgaggccctgaaggctcacattctggatggtattaatctttgtgggtatttcgcctacagctttaacgacagaacagccccacgcttcggcctgtacagatacgcagccgatcaattcgaacccaaagcttctatgaaacattacaggaaaataattgatagcaatggcttccccggacctgagacactggaaagattctgtcctgaagagttcactgtttgtaccgagtgtagtttttttcacactcggaagagcctgctggcattcatagcgtttctgttttttgcatcaattatctcactttcactgatcttttactattccaagaagggccgcagaagctacaag

SEQ ID NO: 149683 - DNA, 3036 bp, Artificial Sequence
  derived and/or modified sequence
atgccggcttctgcccccccaaggcggccaagaccccctccgcccagtctttcactgctgctggtgttgctcgggttggggggacgcagactgagagccgaacccggcgatggagctcagacatgggctcgcttttcccggccccccgcacctgaggccgcaggattgtttcagggaacctttcccgacggctttctgtgggcagtcggaagtgccgcctatcagaccgagggaggttggcagcaacacggcaaaggggccagtatatgggacacattcactcaccaccctctcgccccccctggggattccagaaacgcctcactcccactgggcgccccgagccctctccagcccgccacaggggacgtggcaagcgattcatacaataacgtgtttagagacaccgaagcgttgagggagttgggcgtgacccactacagattctctatctcctgggctagggtcctccctaatggaagtgcgggggtccccaacagggagggccttaggtactacaggcggctcttggagcggctgagagaactcggcgtgcagccggttgtcactctttaccactgggacctgccacagcggctccaggacgcttacggaggctgggctaatagggccttggctgaccattttcgggactacgctgagctgtgcttccggcatttcggcggccaggtgaagtactggataaccatagataatccgtatgtagtggcctggcacggatatgccaccggtaggctggctccagggatccggggatctccacgcctggggtacctggtggcacacaatctgctgctcgcacatgcaaaagtttggcacctgtataacacgtcttttagacccacacaggggggccaggtgtccatagcgctgagcagccactggatcaatcccaggcgcatgacagaccactccattaaggagtgccagaagagcctggacttcgtgttggggtggttcgccaaacctgttttcattgacggggactacccggagtccatgaagaataacctttccagcatcctcccagatttcacagagagcgaaaagaaatttatcaaaggcacggcagacttcttcgcactgtgcttcggccccaccctgtcctttcagctgctcgacccacatatgaaatttagacaactggaatcccccaatctgcggcagctcctcagctggatcgatcttgaatttaaccacccccagatctttatcgtcgaaaatggctggtttgtctccggaacaaccaagcgagatgacgcgaagtatatgtactatctgaagaagttcattatggaaactctgaaggccatcaagctcgacggagtggacgtaatcggatacacagcatggtctctgatggacggcttcgaatggcatcggggttactcaattagaaggggactgttctatgtcgattttctcagccaggacaagatgttgctcccaaagagcagcgcacttttttatcagaagctgatagagaaaaacgggttcccacccttgcctgaaaaccagcctctggagggaaccttcccctgcgacttcgcttggggagtcgtggataactatattcaggtagataccaccctcagccagtttacagatctcaatgtatacctgtgggatgtacaccacagcaagagactcattaaggtagacggggttgtgaccaaaaaacggaagagttattgcgtagatttcgctgctattcagcctcagattgctctgcttcaggagatgcacgtgacccacttcagattttccctggattgggctctgattcttcccttgggcaaccagagtcaagtcaatcacacgatccttcagtattatcgatgcatggcttccgaactggtgcgagtgaatataacccccgtggtcgcgttgtggcagccaatggcccctaatcagggcctgccccgcctcctcgcccggcagggggcctgggagaacccatataccgccctggctttcgctgagtacgcaaggctgtgcttccaggagctgggccaccacgttaaactgtggatcaccatgaacgagccgtacacacggaacatgacgtacagtgctggacacaacctcttgaaggcccacgctctggcatggcacgtttataacgagaagtttcggcacgctcaaaatggcaagatctccatagctcttcaagctgattggattgaaccagcctgccccttctctcagaaggataaggaagttgccgagcgcgtactcgaatttgacattgggtggctggctgaacctatcttcgggagcggagattacccctgggtgatgcgcgattggctgaatcagaggaataattttctcctgccatatttcaccgaggacgagaagaagctgatccagggcaccttcgacttcctggcactttctcattatactactattcttgtcgattcagagaaggaagaccccattaaatacaacgattacctggaggtgcaggagatgacagacatcacttggctgaattcaccaagccaggtggctgtggtcccctggggcctcagaaaagtattgaactggctgaagttcaagtatggtgatctccccatgtacatcatctccaatgggatcgacgacgggcttcatgccgaggatgatcagctgagggtctactatatgcagaactacatcaacgaggctttgaaggcgcacattctggacgggataaacttgtgcggttacttcgcatatagttttaatgatcgaaccgcaccacgctttggactctaccgctatgcagctgaccagtttgagccaaaggcctcaatgaagcactataggaagatcatcgacagcaacggcttccccggtcccgaaaccttggagcgcttttgccctgaagaatttacggtgtgcaccgagtgctccttttttcataccagaaaatcacttctggccttcattgcttttctgttctttgccagcatcattagcctgtcacttatattctactattccaagaagggacggaggtcctacaag

SEQ ID NO: 149684 - DNA, 3036 bp, Artificial Sequence
  derived and/or modified sequence
atgccggcttccgcccccccacgtcggcccagaccccctcccccatcattatctctgctgctggtgttactcgggctgggcgggcggcggctccgggctgagcccggagatggagcacagacatgggctcggttctcaaggccaccggcccccgaagccgccggtttgttccagggcaccttccctgatggttttctttgggccgtcggctctgcagcctatcaaacagaggggggatggcaacaacatggcaagggcgctagcatatgggatacctttacacaccatcccctggccccccccggggattcaagaaacgcgagtctgccccttggcgctccttccccactgcaacccgcaactggggacgtggcgtctgattcgtacaacaacgtgttccgcgacaccgaggctctgagggagctgggagtgacacactataggttctctatctcttgggctcgggttctccctaacggctccgctggggtgccgaaccgcgaaggcctccgctactataggcgcctacttgagcggctgcgggaattaggagtgcagccggttgtcacactataccactgggacctgcctcagagacttcaggatgcatacggcggttgggccaaccgagcgctggcagatcacttcagagactacgccgagctctgtttccgccacttcggaggccaggtgaaatactggatcactattgataatccctatgttgtggcgtggcacgggtacgcaaccgggcgtttagcacccggaatccgagggtctcctcgcttaggctaccttgtggcacacaatctcctgctggcccatgccaaggtctggcatttgtataacacgtcttttagacccacccagggcggacaggtgtccattgctttaagttcacactggatcaatcccagacgcatgacagaccattccatcaaagagtgtcagaaatctctagacttcgttctgggttggttcgcgaagcccgtgttcattgacggcgactatcctgagtccatgaagaacaacctttcaagtatcctacctgactttacagaatccgagaaaaaattcatcaaggggactgctgactttttcgccctgtgtttcggacccaccctctcctttcaacttctggatcctcatatgaagtttcgccagttggagagtccaaatctgcggcagctcctgtcctggattgatttggagttcaaccatcctcagatctttattgtggaaaacggctggttcgtgtcggggactacaaagagagatgatgcgaaatacatgtattacctgaagaaattcatcatggagacccttaaagctataaagctggacggggttgacgtaatcggctatacagcttggtctctgatggatggtttcgaatggcatcgcgggtacagcatcagacggggactcttctacgtggacttcctctcccaggacaaaatgctgctacctaaatcttccgcgttgttctaccagaaactgatagaaaagaacggttttccccccctgcctgaaaaccagccgttggaaggtacattcccatgcgacttcgcctggggcgtcgtcgataactacattcaagtagacacaactttaagccaattcaccgacttaaatgtatacctttgggacgtgcaccacagtaagagactgattaaagtagatggggtagtgactaagaaacgtaagagttactgtgtggactttgctgctattcagccacaaatcgccctcctccaggagatgcatgtcacccatttcagattttccttagattgggcgctgatcctccccctggggaatcagtcccaggtgaatcacacaatccttcagtactatcgatgtatggccagcgagctggtgcgcgtaaacatcacaccagtcgtggccctgtggcaacccatggccccaaaccagggcctgcctcggcttctggctcgccagggagcttgggaaaacccttataccgcgctcgcttttgcggagtatgccaggctctgctttcaggaactcggacatcacgtcaagttgtggataacaatgaatgaaccctatacgagaaatatgacgtatagcgccggccacaatctcctgaaagcccatgcgcttgcctggcacgtgtacaatgaaaagtttagacatgcccaaaatggcaagatatccatcgccctgcaggccgattggatcgaacctgcttgccctttcagccaaaaggataaggaggtggcagaacgggtcctggagttcgatatcgggtggcttgcagagccaatcttcggtagtggtgactacccctgggtgatgagggactggcttaaccaacgtaataatttcctgctcccctattttaccgaagatgaaaaaaaactgatacaaggcacgtttgactttctggcattgagtcactatactactatcctcgtcgattccgaaaaagaggatccaatcaagtataacgactatcttgaggtgcaggagatgaccgatattacctggttgaactccccatcccaggtggcagtggtgccatggggactacgcaaagtattgaactggttgaagttcaagtacggcgatctccccatgtacataatcagtaacggaattgacgatggcctgcatgcggaggacgatcagttgcgcgtgtactacatgcagaattacatcaatgaggcacttaaagcacacatcctagacggaattaatttgtgtggctatttcgcctatagtttcaacgatcgcactgcaccgagattcggcctgtaccgctacgctgccgatcagtttgagcccaaggccagcatgaaacattacaggaagattatcgattcaaacgggttccccggccccgaaaccctcgagcgtttctgtcctgaggaattcaccgtttgtacggaatgtagcttctttcacacacgcaagagcctgttggcgttcatagcctttctctttttcgcatctattatttcactgagcctgatcttctattatagcaaaaaggggaggaggtcctataaa

SEQ ID NO: 149685 - DNA, 3036 bp, Artificial Sequence
  derived and/or modified sequence
atgcctgccagtgccccgccccgacgaccccgcccgcccccaccatcacttagccttctgctggttctgctcggactgggcgggagacgcctgcgcgcggaaccaggagatggagcgcagacttgggcgcgcttttcgcggccgccggctcccgaagcagcgggactgttccagggaacgtttccggacggcttcttgtgggccgttggatcggccgcctaccaaactgaaggcggctggcaacagcatggaaagggcgcttcaatctgggacaccttcactcaccatccgcttgccccgccgggggactctcggaatgccagcctcccgctgggagcaccgtccccactgcagccagcaacgggggacgtggccagcgactcgtacaacaatgtgtttagggatacggaggcccttcgagaattgggagtcacccattaccgattctccatatcatgggctagagtgctccccaatgggtccgctggggtgcctaaccgcgaaggtctgcgttattaccggcggctgctcgaacgcctgagagaacttggagtccagccggtcgtgaccctctaccactgggatttgcctcagagactgcaagatgcgtacggtgggtgggctaatcgggccctggcagaccatttcagggactacgccgaactgtgctttagacattttggaggacaggtcaagtactggattacgatcgataatccatacgttgtcgcctggcacggctacgccactgggcgcttggcgccaggtatccgcggatcaccgcggttgggttaccttgtcgcgcacaacttgctcctcgctcacgctaaagtctggcacctctacaacacttcgttccgcccgacccagggagggcaagtgtcgatcgctctgtcctcacactggatcaacccaaggaggatgactgatcattcgataaaagagtgccagaaaagcctcgacttcgttttgggctggtttgccaaacctgtgttcattgacggagactaccctgagagcatgaaaaacaacctgtcgtccatcctgcctgattttactgagtcggagaagaagtttatcaagggcaccgcggacttctttgcattgtgcttcggacctaccctcagtttccagctgctggacccacacatgaaattccggcaactggaaagcccaaatctccggcagttgctgtcgtggattgacctggagttcaatcacccacagatattcatagtcgagaacgggtggttcgtgagcggaaccactaaacgggacgacgccaagtatatgtactatctcaagaagttcatcatggagactctgaaggccatcaagctggacggcgtcgatgtcattggctacaccgcttggagcctgatggatggcttcgaatggcatcggggatactccatccggcgggggttgttctacgtggacttcctgtcgcaggacaagatgttgctccctaagagctcggccctgttctaccaaaagctgatcgaaaagaacgggttcccgccgcttccggagaaccaacccttggaaggaactttcccgtgcgacttcgcgtggggagtcgtagataactacatccaagtggacaccaccctgtcccaattcactgatctcaatgtgtacctgtgggatgtccaccactccaagcggctgatcaaggtggatggggttgtcactaaaaagagaaagagctactgcgtggattttgccgccatccagccgcaaatcgccctgctccaagagatgcatgtcacgcatttccggttttccctggactgggcactcatcctgccgctcggaaatcagtcgcaggtgaaccacaccattcttcaatactaccgctgtatggcttcagaactggtgagggtgaacatcaccccggttgtcgctctgtggcaacccatggcgccgaaccagggcctgccgcgtttgcttgccaggcagggagcctgggagaatccgtacaccgcgctggcctttgcagaatacgcgcggctgtgtttccaggagctgggacaccatgtgaagctctggatcactatgaacgagccgtacacccggaatatgacgtactctgccgggcacaacctcctgaaagctcacgcactggcatggcacgtgtacaatgagaagtttaggcacgcgcagaacggtaagatctcaattgcactgcaggcagattggatcgaacccgcatgccccttctcacagaaggacaaagaagtcgccgaacgcgtgctcgagtttgacatcggctggctcgccgaaccaatcttcggaagcggtgattacccctgggtgatgagagactggctcaatcaaaggaacaactttctcctcccgtacttcaccgaggacgagaaaaagctcatccagggaacttttgacttcctggcgctttcacattatactacgatcttggtggacagcgagaaggaagatccaatcaagtacaacgactatctggaggtccaagaaatgaccgacataacctggctgaactccccatcgcaagtggcagtggtgccgtggggcctgcgcaaagtgctgaactggctcaagttcaaatacggagatctgccaatgtatatcatttccaatggcatcgatgacggtctgcacgcggaagatgaccagttgcgagtgtactacatgcagaattacatcaacgaggccctcaaggcacacatcctggatggtatcaacctgtgtggatactttgcctactcgtttaacgaccggactgccccgaggttcggtctttaccgctacgccgcggaccaattcgagccgaaggcttcaatgaagcattaccgcaagattattgattcaaatggcttccctggtccagaaactcttgaacggttctgtcctgaagaattcactgtctgcactgaatgttctttctttcacacgagaaagtccttgctggcgttcatcgcgttcctcttctttgctagcatcatctcgctttcgttgatcttctactacagcaaaaaaggcagaagatcctataag

SEQ ID NO: 149686 - DNA, 3036 bp, Artificial Sequence
  derived and/or modified sequence
atgcctgcctcggcacctcctagacggcctagaccgccacccccgtcactgtccctcctccttgtactcctcggcctgggaggtcgacgcctcagagcagaacctggagacggtgcccagacttgggctaggttttcacggccccctgcaccagaagctgcaggcttgtttcaaggtactttcccagatggttttctgtgggcagtggggtccgcagcataccaaaccgagggaggttggcaacaacacggtaagggtgcatcaatctgggatacttttacccaccatcctttggcacctcccggtgacagcagaaatgcatcgcttcctttgggggccccttccccacttcagcctgcgacgggcgatgtggcctcagacagctacaacaatgtattcagggataccgaggcgcttcgagaattgggagtcactcattacagattttcgatcagctgggcacgcgtcctgcccaacggatcagcaggagtgccaaaccgggaaggacttagatattacagacggctcttggagagactccgggaactgggagtccaaccagtggtcactctgtaccactgggaccttccccagcgcctgcaagacgcgtacggaggctgggccaaccgagccctcgcagaccatttccgtgactacgctgaactgtgctttcgacattttggcggccaagtgaagtactggattactatcgataatccctacgtggtggcatggcatgggtacgcaactggacggctggctccagggattcggggttcgcctaggctcggctacctcgtcgcccataaccttcttcttgcacatgctaaggtgtggcatttgtacaacaccagctttcgtccaacccaaggtggacaggtgtcaattgctctttccagccactggataaatccaagacggatgaccgatcactcgataaaggagtgtcaaaagtccttggattttgtcttgggctggtttgcaaagccagtgtttatagatggggattacccagagtccatgaagaacaatctgagttcgattctcccagatttcaccgagtcggaaaagaagtttatcaagggaactgcggatttcttcgctctctgtttcggacccaccctttcgtttcagctgctcgatccacacatgaaattcagacaattggagagtccaaacttgagacaactcttgtcctggattgacctggagttcaaccacccccagattttcattgtggaaaacggctggtttgtctccggtaccacgaagagggatgatgcaaagtatatgtattacttgaagaagttcattatggaaaccctcaaggccataaagctggatggtgtggatgtcataggctacactgcatggtcgctgatggacggattcgaatggcaccgcgggtacagcattcggagggggttgttttacgtggatttccttagccaggataagatgcttctgcctaagtcatccgcactgttttaccagaagctgattgagaaaaatggatttccacccctccctgaaaatcagccactggaaggcactttcccctgcgattttgcatggggggtggtggacaactacatccaggtcgacactaccctgtcgcaatttaccgaccttaacgtgtacctttgggatgttcatcatagcaaaagactcatcaaagtggatggagtggtgacgaaaaagagaaagtcgtactgcgtcgatttcgcggcaatccagccacagatcgcactgctgcaggagatgcatgtcactcatttccgcttttccctggactgggccctgatccttcctttgggaaatcaatcacaggttaaccatactattctccaatactacagatgtatggcgtccgaactcgtgcgcgtgaacataacgcccgtcgtggccctttggcaaccgatggcaccaaaccaaggccttccacgcttgctggcacgccagggcgcatgggagaacccttacaccgcacttgcatttgccgaatacgctcggctgtgctttcaggaattgggtcaccatgtcaagctgtggattactatgaatgaaccctatacccgtaatatgacctactctgcgggacacaatttgctcaaggcacacgcccttgcatggcatgtgtacaacgaaaagtttcgtcatgcacaaaacggcaagatctccatagcacttcaggcagattggattgagcctgcatgccctttttcacagaaggataaggaagtcgcagaaagagtcctggagttcgatattggatggctggccgaaccaattttcggtagcggggactacccatgggtgatgagagactggctgaatcaacgaaataacttcctgcttccttactttaccgaggacgagaagaagctgattcaaggcactttcgattttcttgcgctgtcccattacaccactattttggtggatagcgaaaaggaagatcccataaagtacaacgattaccttgaagtccaagaaatgacggatatcacctggttgaattcaccatcgcaagtggcggtggtgccatggggactcagaaaagtgctgaactggcttaagtttaagtacggggaccttcctatgtatatcatttcaaacggaatagacgatggtttgcatgcggaagatgatcagctgagggtctactacatgcaaaactacattaacgaggcgctcaaggcgcatattcttgatgggatcaacctttgtggctactttgcctactcgttcaacgaccgcaccgcccctagatttggactgtacaggtacgcggcagatcaattcgaaccaaaagcatccatgaagcactatcggaagattatcgactcaaacggttttcctgggcctgagactctggaacgtttttgtcctgaggaatttaccgtgtgtacggaatgctccttttttcacacccgcaaatccctgcttgcattcattgcattcctgttttttgcatccattatctccctcagcctcatcttctactactcgaagaagggacgccggtcatacaaa

SEQ ID NO: 149687 - DNA, 3036 bp, Artificial Sequence
  derived and/or modified sequence
atgcctgcttccgccccgccgagacgcccccgcccccctccgccatcactgtccctgcttttggtgctgctgggactcggcgggcggcgcctgcgcgcagaaccaggagacggtgctcagacctgggcccggttctcgcggccccccgctccagaagccgccggcttgttccagggtacttttcccgatggattcctgtgggctgtgggatctgccgcttaccagactgagggagggtggcaacagcacggcaaaggtgcgtccatctgggacactttcacccaccatccattggcgccgcctggcgattcacgcaacgccagcctcccgcttggcgccccgtccccattgcagccagccaccggcgacgtggcctcggactcctacaataacgtctttcgggataccgaagccctgagagaacttggcgtcacgcactaccggttctcgatctcctgggccagagtcctccctaacggatcggcgggagtgcccaaccgggagggcctccgctattaccgtcggcttctggaacgtctccgcgagctgggcgtgcaaccggtggtgacgctctaccactgggacttgccccagcggctgcaagatgcgtacggagggtgggccaaccgcgcgctggctgatcatttccgggactacgctgagctttgttttcgccattttggaggacaggtgaagtactggatcaccatcgataacccgtatgtggtggcctggcatggctacgctactgggagactggctccgggcattcgcggttcaccgcggctgggatacctcgtcgcgcataatctgcttctggcccacgccaaggtgtggcacctgtacaacacctccttccgcccaactcaggggggccaggtcagcatcgcgctctcatcgcactggatcaaccctagacggatgactgatcattcaatcaaggaatgccagaagagcctggacttcgtgctgggctggtttgctaagccggttttcatcgatggggactacccggagtcgatgaagaacaatctctcctcaattctcccggacttcaccgagtccgagaagaagtttatcaagggaacggcagacttcttcgcgctctgcttcgggccgaccctgtcatttcagctgctggacccgcacatgaaattccgccagctggaatccccgaatctgcgccaactgctgtcctggatcgatttggagttcaaccacccgcaaatctttatagtggagaacggatggttcgtgtcaggcacgaccaaacgagatgatgctaaatacatgtactatctcaagaagttcatcatggaaactctcaaagccatcaaactggatggagttgacgtgatcgggtacactgcgtggagcctgatggacggattcgaatggcacaggggatactcgatccgccgaggactcttctacgtcgatttcttgtcgcaggacaaaatgctcctcccaaagtccagcgcgctcttttatcaaaagctgatcgagaagaacggcttccccccactgcctgagaaccagccgctggaagggactttcccgtgcgatttcgcctggggagtggtcgacaactacatccaggtggatacgactctctcacaatttactgacctgaacgtctacctgtgggacgtccatcattccaaaaggctgatcaaagtcgacggcgtcgtcactaaaaagcggaagtcgtactgcgtggactttgccgctattcaacctcagatcgctctgcttcaggaaatgcacgtgacccatttccgattctcactggactgggcgctgattctcccgctcggcaaccaatctcaagtgaaccataccatcctgcagtactaccggtgcatggcctcggagctggtgagggtcaacattaccccagtggtcgccctgtggcaaccgatggcccctaaccaggggctgccacgcctccttgcgagacagggcgcctgggaaaacccatacactgccctggcctttgctgagtatgcacgcctgtgtttccaggagctggggcatcacgtgaagctgtggatcaccatgaacgagccttacactaggaacatgacttactcagccggacataacttgctgaaagcgcacgcactggcgtggcatgtgtacaacgagaaatttcggcatgcccaaaatggcaagatcagtatcgctctgcaggccgactggatcgaaccggcttgtcccttctcacaaaaagacaaggaggtggcagaaagagtgctggagttcgacatcggatggctggcggaacccatctttgggtccggagactacccttgggtcatgcgcgactggctgaaccaaaggaacaacttcctcctcccgtatttcactgaggacgagaagaagctcattcagggaactttcgacttcctcgcactgtcccactatactactatcttggtcgactccgaaaaggaagatccaatcaaatacaatgactacctggaagtgcaagaaatgaccgacatcacctggctcaattcgccttcgcaggtcgccgtggtgccgtggggcctgcggaaggtgctgaattggctgaagtttaagtacggagacttgccgatgtacatcatctcaaacggcattgatgacgggctccacgccgaggacgatcagctgcgcgtctactacatgcaaaactacatcaacgaggccctcaaggcccatatcctcgatggaatcaatctgtgcggttacttcgcctattcgtttaatgatcggactgcaccaagattcggactgtaccggtacgcagctgaccagtttgagcccaaagcaagcatgaagcattaccggaagattatagactcgaatggatttccggggcccgagactctggagcgcttctgtccggaggagttcactgtctgtaccgaatgctcgttcttccataccagaaagtcgctcctggccttcattgcttttcttttcttcgcctcaatcatcagcctgtcgttgatcttttactacagcaagaaggggcggcggtcctacaag

SEQ ID NO: 149688 - DNA, 3036 bp, Artificial Sequence
  derived and/or modified sequence
atgccagcatctgctcccccccgcaggcccagacctcctcctccttccttatctttgttactagtccttctaggtctgggagggagaaggctacgcgctgaacctggcgatggggcacagacctgggcacggttctcccgccccccagcacccgaggctgcagggctcttccagggtactttcccagatggctttctgtgggccgtaggttcagcagcctatcagaccgagggaggttggcagcagcacggaaagggcgccagcatctgggacaccttcactcatcaccccctggcacccccaggggactctaggaacgcaagccttcccctgggcgctccttcaccactgcagccggctaccggagacgtggcttcagacagctataataatgtctttagggatactgaagcactgcgcgagcttggcgtgactcactacagattcagtatctcctgggcacgcgtgctacctaatgggtccgctggcgtgccaaaccgtgaggggctacgatactacaggcggctgctggaacgcctgcgcgaactgggggtgcagcctgtggtgaccctgtatcattgggacctcccccagaggttgcaggacgcatacgggggatgggctaacagagccttggctgatcactttagagattatgccgaactgtgcttcagacactttggtggtcaggtcaagtactggataaccatagataatccatatgtggttgcatggcatggctacgcaactggaagactggcaccagggattaggggctccccccgactgggctacttagtggctcataatctgctgctggctcacgccaaagtttggcatctctataacacatcttttagacctactcagggcgggcaggtgtcaatcgcactgtcttcacattggatcaacccacggcggatgaccgaccacagcattaaagagtgtcagaagtctctggactttgtgttgggatggttcgccaaacctgtgttcatcgatggggattaccctgagagcatgaaaaacaatctcagttctatcctccccgactttacagagagtgagaagaagttcataaaaggaaccgccgactttttcgctttatgcttcgggccaaccctaagctttcagctgctggacccccacatgaaatttcggcagctggagtcccccaatctgcggcaactcctgtcttggatagacctcgagtttaaccacccacagatctttattgtggagaacgggtggtttgtctccggcactaccaaacgggacgatgcaaaatacatgtactatctgaagaaatttatcatggagaccttaaaggctattaagctggatggtgttgatgtgattggttacaccgcttggagcttaatggatggattcgaatggcacaggggctacagcattcggaggggtctgttctatgttgattttctcagccaggataagatgctcctccctaaatctagtgccctgttctaccagaaactgatagaaaagaatggcttcccacccctgccagagaatcagcccttagaaggaacttttccttgcgatttcgcttggggcgtggttgacaattacatccaagtagacaccactctgtctcagttcacagatttaaatgtttatctatgggacgtgcaccattctaagaggctgatcaaagtcgacggcgttgtcacaaaaaagagaaaaagttattgcgtcgacttcgccgcaatccagccacagattgccctgttacaggaaatgcatgtgacacacttccggttctctctagattgggcccttattctcccactgggaaaccaatcccaggtgaaccatacaattttacagtattaccggtgtatggccagcgagctggtccgcgtgaatatcactccagtggtggccctgtggcagccaatggctcccaaccagggccttcctcgcctgctagctaggcagggagcctgggaaaatccttacacagctctggcatttgccgagtatgcccgcctatgctttcaggaactagggcaccacgttaaactgtggattacaatgaatgagccctatacccggaacatgacatactccgctggacacaacctccttaaagctcacgcactcgcctggcatgtgtataatgaaaagttccgccatgctcagaacgggaagatttccatcgccttacaggccgactggattgagccagcctgtccatttagccagaaggataaggaggttgccgagcgggttcttgaattcgatataggatggctggcagagcccatatttgggagcggggactatccctgggtgatgagagattggctcaatcagaggaataatttcctgttaccatattttactgaagatgaaaagaagttgattcaggggacatttgatttcctcgcactcagtcactacacaacaattctggtggatagcgaaaaagaggaccctattaagtacaatgactacctggaggtgcaggagatgaccgatatcacttggctgaattccccaagtcaggtggctgttgtaccatggggactccggaaggtgctgaactggctgaagtttaaatatggcgacctgcctatgtacataatcagcaatggaattgatgatggcctgcatgccgaggacgaccagctgagagtttattatatgcagaactacattaatgaagcactcaaagcacacatcctcgacggcattaacctgtgtggatatttcgcctatagtttcaatgacagaactgccccccgatttggcctgtacaggtatgccgccgatcaattcgaacccaaagcttccatgaaacattatcgcaaaattattgacagcaatggattccccggccccgagaccttagagaggttctgcccagaggaattcaccgtgtgtactgaatgctctttttttcacaccaggaagtccctattggcattcatagccttcttgtttttcgcatccattatctctctaagcttgatcttctactatagtaaaaaaggccggagaagctataaa

SEQ ID NO: 149689 - DNA, 3036 bp, Artificial Sequence
  derived and/or modified sequence
atgccggcgtcggcacctccacgcaggccaagaccaccgcctccctccctctcacttctgctcgtgctgctgggactggggggtcggcgcctgagagcggagccgggcgatggagcacaaacttgggcacgcttctcccggccgccggctccggaagcggccggattgttccaagggaccttccctgatggattcttgtgggccgttggatccgccgcctaccaaactgaaggagggtggcaacagcatggtaagggcgcttccatctgggacacgttcacccaccatccgctggccccaccgggtgactccagaaacgcttctctgcccctgggggctccgagcccgcttcaaccggccaccggggacgtcgcatcggactcatacaataatgtgttccgggacaccgaggcactgagagaactgggtgtgacgcactaccggttctcgatctcgtgggcgcgcgtcctgcccaatgggtccgcgggagtgcctaatcgggaggggctcaggtactacaggcgcctgcttgagagactccgtgagctgggagtccagcctgtcgtgactctctaccactgggacctgccacaaagactccaggacgcttacggaggatgggccaaccgggccctggcggatcacttcagagactacgccgaactgtgctttcggcattttggagggcaagtcaagtactggataactatcgacaacccttacgtggttgcatggcacgggtacgcgaccggcagactggcccctggaatcagaggctcccctcgactcggatacctggtggcgcacaatcttctgctggcccacgctaaggtgtggcatttgtataacaccagcttccggcccactcagggaggacaggtgtctatcgcattgagctcacattggatcaacccgcggagaatgaccgatcactcgattaaggaatgccaaaaatcactggacttcgtcctcggctggtttgctaagcctgtctttatcgatggagactacccggagagcatgaagaacaacctctcatcgatcctccccgactttactgagtccgagaaaaagttcattaagggtactgccgacttttttgccctctgtttcggacctaccctctcatttcaactgctcgacccgcacatgaagttcaggcaacttgagtcgcccaacctgaggcaactcctgtcgtggatcgaccttgaattcaaccacccacaaatcttcatcgtcgaaaacggctggttcgtgtcagggaccactaaacgcgacgatgcgaagtatatgtattacctcaaaaagtttatcatggaaaccctcaaggcgattaagctggacggagtcgacgtgatcggatacaccgcctggtcacttatggatggctttgagtggcacagggggtactcgattagaaggggccttttctacgtcgactttttgtcccaggataagatgcttctcccaaagtcaagcgcactgttctatcagaagctcatcgaaaagaacggattcccgccgctgccggagaatcaaccgctggaaggaacttttccatgcgattttgcctggggagtggtcgacaactacatccaggtggacaccactctgtcgcagttcaccgacctgaacgtgtacttgtgggacgtgcatcactccaagagactcatcaaggtcgacggtgtcgtgactaagaagcggaagagctactgtgttgacttcgccgcaatccaaccacagatcgcactgttgcaggaaatgcacgtcacccacttccgttttagccttgactgggctcttatcctgccgttgggaaatcagtcgcaggtgaaccacacgatcttgcagtactaccgctgcatggcaagcgaactggttcgggtcaacatcacccctgtcgtggccctctggcaaccaatggccccgaaccagggactgccacggctcctcgcaagacaaggcgcttgggagaatccgtacaccgccctggccttcgcggagtacgctagattgtgttttcaggagttgggacaccacgtgaaactttggattacgatgaacgagccgtacactcggaacatgacttactcggcgggccacaacctcctgaaagcacacgcattggcatggcatgtgtacaacgaaaagttcagacatgctcagaacggcaagatctcgatcgcgctgcaggccgattggatcgaaccagcttgcccgttctctcagaaagataaagaagtggcggagagagtgctggagtttgatatcggctggctggccgaacccatcttcggctcgggggattatccatgggtgatgcgcgactggctgaatcaacgcaacaacttcctgctgccatatttcaccgaagatgagaaaaagctcattcaaggaactttcgactttctggctctttcgcattacactactatcctggtggatagcgaaaaagaagatccgatcaagtacaacgattacctggaagtgcaggagatgaccgatatcacctggctgaactccccctcccaggtggccgtcgttccgtggggactgcggaaggtccttaactggctgaaattcaagtacggagatctccccatgtacatcatctcaaacggaatcgatgacggactgcatgccgaggacgaccagctgagagtgtactatatgcagaattacatcaacgaggcgctgaaggcccacattctggacggcatcaatctctgtggttatttcgcttactcgtttaacgacaggaccgcacctagattcggcctgtaccgctacgcagcggaccaatttgagccgaaggcgagcatgaagcattaccggaagatcatcgattccaatggtttcccaggaccggaaacgctcgagagattttgcccggaagagttcacggtctgcaccgagtgctcatttttccatactcgcaaatccctgctcgcctttattgccttcctcttcttcgcatcgatcatcagcctgtccctcatcttttactactctaagaagggtcggagatcgtacaaa

SEQ ID NO: 149690 - DNA, 3036 bp, Artificial Sequence
  derived and/or modified sequence
atgccggctagtgcgcctcctcgtaggccaagacctcctcccccttccttgagtctccttctcgtcctgctggggttgggcggacgccggctcagggcagaaccaggcgacggcgcccaaacctgggcccgtttttcgagacccccagcacctgaagcggccgggcttttccaagggacattcccggacggcttcctgtgggctgtggggagcgctgcttatcagaccgaaggagggtggcagcagcacgggaagggcgcctcaatctgggacacatttacacatcacccgttggcccctcctggcgactctcgaaacgcctccctcccgctcggagctccctccccactgcaacccgcaaccggagatgttgcatctgacagctacaataacgtctttcgggacaccgaggcacttagagaattgggcgtgacacattacagattcagcataagttgggccagagttctcccaaatggctccgccggggtccccaatagggagggactgcggtattatcgcagattgttagagagactgagggagcttggcgtgcagccagtagtgactctgtatcactgggacctaccacagcggctacaggacgcctatgggggatgggcaaatcgagccttggccgaccactttagggattacgctgaactgtgttttcgacacttcggcgggcaagtgaaatactggattacaatagacaacccctacgtagtcgcctggcacggctacgcgactggacggctcgcgccaggcattcgtgggagtcctagactgggatacctcgtggcacacaatctactgctggcacacgccaaggtttggcatttgtacaatacatctttccggccaacacagggcggtcaggtgagcatcgccctgagttctcactggattaacccacgcaggatgacagatcattctattaaggaatgccagaagagcttagacttcgtgttgggctggtttgccaaaccggtgttcattgatggtgactacccggaaagcatgaagaacaatctttcttcaatactgccagatttcacagagtcagagaagaagttcatcaaagggacggcagatttttttgctctttgtttcggcccaacattgtcatttcaactattagacccccacatgaagttccgccagctagaatctcctaacctcagacaactgctgagttggattgacctggagttcaatcatcctcaaattttcatcgtggaaaacggatggttcgtttcaggcaccacgaaaagggacgacgcaaagtacatgtactatctgaaaaagttcatcatggaaaccttgaaagccatcaagctcgacggcgttgacgttattggatacacggcctggtctcttatggatggattcgaatggcatagggggtactctattagacgagggctcttctatgttgactttctaagtcaggataaaatgctcttgccgaagtcaagtgccctgttttaccagaaactgattgagaaaaacggcttccccccactgcccgagaatcagcccctggaaggcacatttccctgtgactttgcctggggggtggtggacaattacattcaggtggatactactctcagccagtttaccgatctgaatgtctatctatgggatgtgcaccatagtaaaaggctcatcaaggtcgacggggtcgtcactaagaagaggaaatcctactgcgtcgattttgcagccatccagccccagatagcactgctgcaggaaatgcacgtgacccactttagattttcgctcgattgggctcttatcttgcctctggggaaccagtcacaggtaaatcacacaatcctgcagtattaccgatgtatggcaagtgagttggtgagggtgaacatcaccccggttgttgccctttggcagcctatggcacctaaccagggcctgcctcgtctattagcccggcagggggcctgggagaacccatataccgccctcgctttcgccgagtacgctagactctgctttcaagagctgggacaccatgtcaagctatggataactatgaatgaaccctacactcgcaacatgacttatagcgccggccataaccttcttaaggcccacgcactggcttggcatgtgtataatgagaaattccgacacgctcaaaatggcaaaataagtatagccttgcaggctgattggatcgagcccgcatgtccgtttagccagaaggataaggaagtcgccgaaagagtgcttgaatttgatatcgggtggcttgctgagcccattttcggctccggcgactacccatgggtgatgcgggactggctaaaccagcgcaacaatttcctcctgccttacttcactgaggacgagaagaagctgatacagggaacgttcgacttcctcgctctgtctcattataccaccattctcgtcgactctgagaaagaggaccccatcaagtataacgattacttagaagttcaagaaatgaccgacattacatggctaaattctccaagccaggttgccgttgttccttggggtctgcgcaaggtcctgaactggttgaagttcaaatatggcgacctccccatgtacataattagcaatggcattgacgatggtttacatgcagaggatgaccagcttcgagtctactacatgcaaaactatatcaatgaagcgttaaaggcgcacattctggacggcataaacctgtgtggatacttcgcctattcattcaacgatcggaccgcaccaagatttgggctgtatcgatacgccgccgaccaattcgagcccaaggccagcatgaagcattatagaaagatcattgactccaacggttttccagggcccgaaactctcgaaagattctgccccgaggagtttacggtgtgcacggagtgtagtttctttcataccagaaagtccctcctggcatttatagccttcctgttctttgcctcaataattagtctgtccctgattttttactacagcaaaaaagggagacgctcatataag

SEQ ID NO: 149691 - DNA, 3036 bp, Artificial Sequence
  derived and/or modified sequence
atgccagcatccgcgcccccacgcagacctcgcccccctccaccatccctcagcctccttttggtgcttctgggcctgggtggacgacggctcagggctgagccaggggatggagcgcaaacctgggcacgattttcccgcccgcctgcgccagaagcagcaggactcttccaaggaacgtttccagacggctttctgtgggccgtgggaagcgcagcgtaccagactgaaggtggctggcaacaacatggtaagggagctagcatatgggatacgtttactcatcatccgttggcgcctcccggggactcgaggaacgcatcgctgcctctgggggcgccatcccctcttcaaccggcaactggtgatgtggcatccgattcgtacaataacgtctttagggataccgaagcattgcgtgaattgggagtcactcactacagattctccattagctgggcccgcgtcttgcctaacggctcagcgggtgtgccaaacagggaaggactgagatattaccggcgcctcttggaacggctccgtgagcttggggtccagccagtggtgaccctctaccactgggaccttcctcaacggctgcaagatgcatacgggggctgggctaacagagcactcgcggaccattttagagactatgcggagctgtgctttagacattttggaggacaggtgaagtactggattacgatcgataatccttacgtcgtggcatggcatggctacgcaaccggaaggcttgcccccggcatacgcggatccccaaggcttggttacctggttgcacataatctgctgctcgctcatgcaaaggtgtggcatttgtataacacctcctttcgccctactcagggaggacaagtgtccatagcacttagcagccactggattaatcccaggcgaatgacggatcattccattaaggaatgccaaaagagcttggacttcgtcctgggatggtttgccaaacctgttttcattgatggagattacccagaaagcatgaagaacaatctttcctctatcctgcctgacttcactgagtctgaaaagaagttcataaaaggtaccgccgacttctttgccctgtgtttcggaccgaccctctcctttcaacttctcgaccctcatatgaagtttagacagctggagtcgccaaaccttagacaactgctgtcatggatcgaccttgagttcaaccatccacaaatctttatagtcgaaaacggatggttcgtgtcaggtacgaccaagagagatgatgcaaagtatatgtattacctgaaaaagttcataatggagactttgaaggcgattaaactcgacggagttgacgtcatcggatacacggcctggagccttatggatggtttcgagtggcaccggggttacagcattcggagggggctgttctacgtggactttctctcccaggataagatgctgctgccaaagagctcggccctcttttaccagaagctgatcgaaaagaacggtttcccacccttgcctgaaaaccagcctctggaaggaacttttccttgcgactttgcatggggagtggtggacaactacattcaggtggacactaccctttcgcaattcactgatctgaatgtgtacctttgggacgtgcatcactcgaaacgcctcatcaaggtggacggtgtagtgactaaaaagagaaaatcgtactgcgtggatttcgcagccattcagcctcagatcgctcttttgcaggagatgcacgtgacccattttagattttccctggactgggctctgattcttcccctcggtaatcagagccaagtcaaccacactattcttcagtactatagatgcatggcatcagaactggtccgtgtcaacattacccctgtggtagcactttggcagcccatggccccaaatcaaggacttcccagacttctggcacgacagggtgcctgggaaaatccttacaccgctctggcatttgcggagtacgccaggctttgttttcaggagttgggacatcacgtgaaattgtggattactatgaatgagccttacacccgtaatatgacttacagtgcaggccataacttgcttaaagcacatgccctcgcatggcacgtctacaatgaaaagtttaggcacgcacaaaacgggaagatctccatcgcactccaagcagattggatcgagcccgcatgtccttttagccaaaaggataaggaagtggcagaacgggtactggaattcgatattggttggctcgcagaaccaatattcggaagcggcgactacccgtgggtgatgcgcgattggctgaatcagagaaataactttttgttgccctactttactgaagatgaaaagaaactgatccaaggtaccttcgactttctggcgcttagccattatactactatccttgtggacagcgaaaaagaagatccaattaagtacaacgattacctggaggtgcaagagatgactgatatcacgtggttgaactcgccgtcacaggttgccgtggtcccctggggccttcggaaagtgctgaactggctgaagttcaaatacggtgatcttcctatgtacattatctcgaacggcatcgatgacgggcttcacgctgaggatgaccaacttcgcgtctactacatgcaaaactacatcaacgaagccctgaaggctcatatcctcgatggaattaacctctgtggttactttgcatactcgtttaacgataggaccgccccaaggttcggtctttaccgatacgcagcagatcagtttgaacctaaagcctcaatgaaacattacagaaagattatcgattcaaacgggtttcctggacctgaaaccctggagcgtttttgtccggaagaatttactgtgtgtacggagtgttccttttttcatactagaaagagcctgcttgcattcattgccttcctgtttttcgcctccatcattagcctcagcctgattttctactactcaaagaaaggacggagaagttacaag

SEQ ID NO: 149692 - DNA, 3036 bp, Artificial Sequence
  derived and/or modified sequence
atgcccgcatccgctcccccaaggagaccccgcccacctcctccatccttaagtttgctgttggtgcttctcggattaggtggccgtcgcttgagggccgagccaggtgatggggcccaaacctgggcgcggttctctcgcccgccagctccagaggctgcaggcctgttccaaggcacattccctgacggctttctgtgggctgtcggaagcgctgcatatcagactgaagggggctggcagcagcatgggaagggtgcctccatctgggacacattcacacatcatccactggctcccccgggtgactcccggaatgcgtcgcttccactcggagctccgtcacccttacagccagctaccggcgacgtcgcctccgactcctataacaatgttttcagggacacggaggccctccgcgaactcggcgtgacacattaccgtttttccattagttgggctcgcgtgctgccgaacggctcagccggtgtgccaaacagggaagggctgcggtattatcgcagattgttggaacggctgagggaactgggggtgcaacccgtggtcactctttatcattgggaccttcctcagcgtctccaggacgcctatggtgggtgggctaaccgcgcactagccgaccacttccgggactatgctgaattgtgctttcgtcactttggcggccaggttaaatactggatcacaattgacaacccttatgtcgtcgcgtggcacggttatgcaaccggcaggttggcaccaggtatccgcggtagcccccgactgggctacctggtcgctcacaacctcctcttggctcacgcaaaggtgtggcatctgtacaatacatcatttagaccgacgcagggcggtcaggtgtccattgccttatcaagccactggattaatcccagaaggatgacagatcacagtattaaggagtgtcagaagtcgctcgacttcgtcctgggctggttcgcaaagcctgtttttattgatggagactatcccgaaagtatgaagaataacctttcttcaatccttcctgacttcaccgagtccgaaaaaaaatttatcaaggggaccgcagatttttttgccctgtgcttcggccccactctcagcttccagttactggacccacacatgaagttccggcaactagaatcacctaatctacgacaactgctaagctggatagacctggaattcaatcacccccagattttcatcgtggaaaacggctggttcgtgagtggaaccaccaagagggatgacgccaagtatatgtactaccttaagaaatttattatggaaactctgaaggccattaagctagacggtgtggatgtgatcggctacactgcttggtcacttatggatgggtttgagtggcaccggggatatagtatccgccgcgggcttttttatgtggactttctgtcccaggataaaatgctgctgcccaagagcagcgctctgttttaccaaaagctaattgagaagaacggctttccacctcttcccgaaaatcagccgctcgaaggcacgtttccatgtgacttcgcctggggggttgtggacaattacattcaggttgacactacactgtcccagtttacagatctgaatgtgtatctctgggacgtgcatcattcgaagcgtttgataaaagtcgacggggtggtaactaaaaaaagaaagagctactgtgtggatttcgccgcaattcagcctcagattgccctactgcaggagatgcacgttacacattttcgattctccctggactgggcactgattttaccattaggaaaccagtcacaggtgaatcatactatcctgcagtactaccggtgtatggccagcgaactggtccgagtcaatatcacccccgtggtggcactgtggcaacctatggcccccaatcaaggcctgcctagactgctcgcgagacagggggcctgggaaaacccttacactgcgctggcattcgccgagtacgcccggctgtgcttccaggaactggggcatcatgtgaaactatggatcaccatgaatgaaccctatacccgcaacatgacatattcagccggacataatttattaaaagctcacgctctggcatggcatgtgtacaacgagaaattcagacacgctcagaacggaaagatttcaattgccctgcaggccgactggatcgaaccggcttgcccttttagccaaaaggacaaggaggtggccgaacgtgttctggagttcgacatcggttggctggctgaaccgatatttggatcaggggattacccatgggtgatgagagattggctcaatcagaggaacaatttccttctcccttactttactgaggacgagaagaagctgatccagggtacgttcgatttccttgctcttagccactacacgaccatcttggtggatagtgagaaagaggatccgattaagtataacgattatctagaggtccaggaaatgactgacatcacctggcttaattcaccgagtcaggtcgctgtggtgccttggggtcttagaaaagtgctcaactggctcaaatttaagtatggcgacctgccaatgtacattatttcaaatggcatagacgatgggttgcatgcggaggatgaccaactgcgagtgtactatatgcagaactatataaacgaagcactcaaggcccacatcctcgatggtattaacctctgtgggtacttcgcttactcttttaatgaccgcacagctcctcgattcgggctctatcggtacgcagccgaccaattcgaaccgaaggcgagcatgaaacactaccgcaaaataatcgacagtaacggattccctggcccggagaccctagaacgcttttgcccagaagagttcactgtttgcaccgagtgttcctttttccatacacggaagtcactgctcgctttcattgccttcctgttctttgccagcattatctcgctgagtctgatattctactattccaagaaaggcaggcgtagctacaaa

SEQ ID NO: 149693 - DNA, 3036 bp, Artificial Sequence
  derived and/or modified sequence
atgcctgcaagcgctccacctcggcggcctaggcctcctcctccatctctctctttgttgcttgtgttattagggttggggggtcgccggttgcgggccgagcccggggacggtgcacagacttgggctaggttctctaggccgcccgcgccagaggctgctggattattccaaggcacattccccgacggtttcctttgggctgtcgggtccgctgcctatcagactgaaggtggttggcagcagcacgggaagggggcatcaatctgggatacattcacccatcacccgcttgcaccacctggcgactccagaaatgcctctctgcctctgggggctccctcccccctgcagccagcgacaggggatgtagcttccgactcctataacaacgtgtttagagacactgaggcgctgagagagctaggcgtgacccactaccgatttagcatcagctgggctcgagtcctacccaacggcagtgcgggggtccccaatcgggagggtcttagatactaccgccgcctgctcgagagactccgtgagctcggagtgcagccagtcgtaaccttataccactgggatctgccgcagcgcctacaagacgcatacggaggctgggctaatcgggctctggctgatcactttcgggattatgcagagctttgttttcggcacttcggcggccaggtcaagtactggataactattgacaacccctacgtggtggcctggcatggctacgccacaggtcggttggcacctggcattagggggtctccgcgtctcgggtacctggtggcacacaatctgctgcttgcccacgcaaaagtatggcacctgtacaatacttcattccggcctacacaggggggccaggtctcaatagcgctttctagccattggattaatccgagacgcatgactgatcactccattaaagaatgccaaaagagcctcgacttcgtcttggggtggtttgcaaaacctgtctttatcgatggtgactatccagaaagcatgaaaaataacttgagttccatcctcccagactttacagagtccgagaaaaagttcattaaaggtaccgcagacttttttgcgctctgtttcggcccgacactctcttttcaattactggatccccacatgaagttccgtcaattggaaagtcccaacttgcgtcaactactaagttggattgaccttgaattcaatcaccctcagatattcattgtcgagaatggctggtttgtctccggcaccactaaaagagacgacgccaaatacatgtactacctgaagaaattcattatggagacacttaaggcaattaaactggacggggtggacgtgattgggtatacagcttggagcctgatggatggttttgaatggcaccggggatacagcatcagacgtggtcttttttatgtcgacttccttagtcaagataaaatgttgctcccgaaatcttcggcactcttctaccagaagttaatcgagaagaacggattcccacccctacccgaaaaccagccgttagagggtaccttcccttgtgatttcgcttggggggtcgtagacaactacatccaggtggatactacactcagccagttcactgacctaaatgtgtatctctgggacgtgcaccactcgaagaggctgataaaggtcgatggcgtagtgaccaagaagcgcaagagctattgcgtggactttgcggccatccaacctcagattgcgctgctgcaagaaatgcacgtgacccatttccgtttcagccttgattgggccctgatcctgcccctggggaatcagtctcaggtaaatcatactattcttcagtattatcgatgtatggcttccgaacttgtaagggtcaacattaccccggttgtagctctctggcagcctatggcgcccaatcagggcctccctcgcttactggcccgtcagggcgcttgggagaatccatacactgcacttgccttcgccgaatacgctcgtctatgcttccaggaacttggtcatcatgtaaagttatggatcacaatgaatgaaccgtacaccagaaacatgacatactccgctggccacaatttactgaaagctcatgcgcttgcctggcacgtgtataacgaaaagtttcggcacgcacagaatggcaaaatctccatagccctccaagctgactggatcgagcctgcatgccccttctcacagaaagataaagaggttgccgagcgagtactggagttcgacatcggctggctggccgagcctatttttggtagtggtgactacccatgggtcatgagggactggctgaaccagagaaataatttcctgctgccctacttcacggaggacgagaaaaaattaatacagggcaccttcgatttcctcgcgctgagccattataccacgattttggttgactccgaaaaagaggaccctattaagtacaatgactatctggaggtgcaggagatgacggatatcacttggctcaatagtccatcccaggtagctgtggtgccctggggcctgaggaaagtactcaattggttgaagtttaaatatggggacctcccgatgtatattatcagcaacggaattgacgatggtctccatgctgaagacgatcagctgcgagtgtactatatgcaaaactacattaacgaagccctgaaggctcatattctggatggaataaacttgtgcggctactttgcatatagttttaacgatcgcaccgcccctcggttcggcctgtatcggtatgcagccgatcagtttgagcctaaggccagtatgaaacactaccgcaaaatcatcgactctaatggatttccagggcctgaaactctggagcgcttttgtcccgaggaatttaccgtttgcaccgaatgctctttctttcacaccaggaagagtctgctagcatttattgccttcttattttttgcatctataatttccttatccctgatcttttactattcaaaaaagggtcgcagatcctataag

SEQ ID NO: 149694 - DNA, 3036 bp, Artificial Sequence
  derived and/or modified sequence
atgcctgcctccgctccaccaaggcggcctcgcccgccccctccaagtcttagcctgcttctggtcctgctgggtttgggcggccgaagacttcgagctgagcccggcgacggcgcccagacttgggctcggttttctaggccaccggcccctgaggccgcgggcctgtttcagggcacgttcccggacggcttcctgtgggccgtgggctccgccgcttatcagacggagggaggatggcagcagcacggcaagggtgccagcatttgggatacgtttactcaccacccactggccccgccgggcgattcaaggaatgcaagcctcccattgggggcgccatcccctctccagcccgccaccggggatgtcgcttctgattcttacaacaatgtctttcgcgacactgaggcgctgagagaacttggcgtgacccactaccgctttagcatctcttgggctagggtcctgcccaacgggtctgctggggtgcctaatcgcgagggactgcgctactaccgacgcctcttggagaggctgcgggaattgggcgttcagcccgtggtgacgctgtaccactgggacctcccacagaggctccaagacgcttatggcggttgggccaacagggccctggctgatcattttcgagattacgccgaactgtgtttcaggcactttggggggcaggtcaagtactggattacaatcgataatccctacgtcgtggcctggcacggatacgccactggaaggctggcgcctgggatccgagggagtcctcggctcggttatctggttgcacacaacttgctgttggcccacgctaaggtttggcacctgtacaacacttcatttagaccgactcaagggggccaagtgtctatcgctctgagctcacactggatcaacccccgccggatgaccgatcactcaatcaaggagtgtcagaagagcctggattttgtcctgggatggtttgcaaagcccgtgttcatcgacggagactacccggagtccatgaaaaacaacctgtcttcaattctgcctgattttactgagtcagagaaaaaatttatcaagggcaccgccgacttcttcgccctgtgctttggtccgaccctttccttccagcttctggaccctcacatgaaatttcggcagctggaaagccccaatttgcgacagctgctcagttggatagatctcgagtttaaccatcctcaaatattcatcgttgagaatggctggtttgtgagcggaactaccaagagagacgacgctaagtacatgtactacctgaaaaagtttattatggagacgctgaaggccattaaattggacggggtggatgtcataggctacacggcatggtccctgatggatggtttcgagtggcaccgcgggtacagcattcggaggggcttgttttacgttgattttctctcccaggataaaatgctgctgcccaagtcatcagctctcttctatcagaagctgatcgagaagaacgggttcccaccactgccagagaaccagccattggaagggacctttccctgcgatttcgcctggggtgtcgtggataactatatacaggtggatacaactctgtcccagtttacagatctgaatgtatatttgtgggatgtgcaccactctaaacggttgatcaaggtggatggagtcgtgacgaaaaagaggaagagctactgtgtggactttgcagcaattcagccgcagattgcgcttctgcaagaaatgcacgtcacgcacttccgcttctcactcgactgggcgctcattctgccactgggcaaccaatcacaggtgaaccacacaattctgcagtactaccgatgtatggccagcgaattggttcgcgtcaacatcacgccggtggtcgccctgtggcagccaatggcccccaatcagggtctgcctaggctgctggcccgacagggggcctgggagaacccatacacagccttggcattcgcagagtacgcacgactgtgctttcaggagctgggtcatcacgtcaagctctggatcacgatgaatgagccttacacccgcaatatgacctatagcgcggggcataatttgctgaaagcacatgccttggcctggcacgtctataatgaaaaatttaggcacgcgcagaacggtaagatttctatcgcacttcaggcagactggatagagcctgcttgccccttctctcagaaagacaaggaggtcgctgagagggtgctggaattcgatattggatggcttgccgagcctatcttcggcagtggcgactacccctgggtcatgcgggattggttgaaccagcggaataatttcttgcttccctatttcacagaagacgagaaaaagctgatccagggtacctttgacttccttgccctttcccactatactacaattctcgtggactccgagaaggaggatccgattaagtacaacgactatctggaggtacaggagatgacagatatcacttggctgaactccccctcacaggtagcagtagtaccgtgggggctgcggaaagtgttgaactggctgaaattcaaatacggtgatctgccaatgtacatcatcagcaatggaattgacgatggactgcacgctgaggacgaccagcttagagtttattacatgcaaaactatataaacgaagctctcaaagcccatattttggatggcatcaatctgtgtggatactttgcctacagtttcaacgacagaacggcgcctcgcttcggactgtacaggtacgcagccgaccagtttgagccgaaggcttccatgaaacactatagaaagatcattgactctaacggcttcccagggcctgaaacccttgagagattctgcccagaagaattcaccgtctgcactgaatgcagcttctttcatacgcgcaagtcacttcttgccttcatcgcttttcttttttttgcatctattatctccttgtcactcattttttactattccaagaaaggccgccgcagctacaag

SEQ ID NO: 149695 - DNA, 3036 bp, Artificial Sequence
  derived and/or modified sequence
atgcctgcctccgcaccgccgcggcgccccagacctccaccaccttcgctgtcactgctccttgtgcttctggggctgggaggcagacggctgagagccgaacctggagatggtgcccagacgtgggcacgcttttcccgaccacccgcacccgaagcagcaggtctgtttcaagggacctttccggatggatttttgtgggcggtcggaagcgcagcataccaaaccgaaggaggttggcagcagcatggtaaaggggcctcgatttgggatacctttactcatcaccctctggcacctcctggcgactctcgaaacgcaagcctgcctcttggagccccttcaccgctgcaaccagcaaccggtgatgtggcgtcggactcttacaacaacgtgttccgggacaccgaagcactgagggaactcggtgtgacgcattaccgattttcgatctcgtgggcccgggtcctccctaacggctcggctggcgtgcctaatcgggagggactgagatactacaggaggcttcttgaacgtttgcgtgaacttggagtgcagcctgtggtgactctgtaccattgggacctgccacaacgactgcaagacgcatacggtggatgggcaaatcgcgcactcgcggatcactttagggattacgccgaattgtgtttccgccattttggaggacaggttaagtactggatcaccatcgataatccatacgtggtcgcctggcatggatacgccaccggacgtttggccccaggaattcgcggatcccctcggctcgggtaccttgtggcccataaccttctgctggcacatgcaaaggtgtggcatctgtacaacacttcctttcgtccaacgcaaggtgggcaagtgtcaattgccctgtctagccattggattaatcctcggaggatgacggaccattccattaaagaatgtcaaaagtccttggactttgtccttgggtggtttgcaaagccagtgttcattgatggtgattaccctgaatccatgaagaataacctctcctcaattctccctgacttcaccgagagcgagaagaagttcataaaggggacggcagacttttttgccctttgcttcggcccaacccttagcttccaactgttggatcctcatatgaagttccggcagctggagtcgccaaatctcaggcaattgctcagctggattgaccttgagtttaaccatcctcagattttcatagttgaaaacggctggtttgtcagcgggacgactaagcgagatgatgcaaaatacatgtactatctcaagaagttcattatggagactcttaaagccattaaacttgatggagtggatgtcattgggtacaccgcatggagcctgatggatggttttgagtggcatcgcggttacagcattagaagaggattgttctacgtcgattttctgtcacaggataagatgctgctccccaaatccagcgctcttttctaccagaaactgattgaaaagaatggattccctcctcttccagaaaaccaaccactggagggcacttttccttgcgattttgcttggggtgtggtcgataactacattcaagtggataccactctgtcacaattcaccgaccttaacgtgtacctttgggacgtgcaccattccaaacgcctgatcaaagtggatggcgtggtgaccaagaagcggaaatcgtactgcgtggattttgcggccatccaacctcaaattgcacttctccaggaaatgcatgtgacgcatttccggttttcactggattgggccctcattctgccacttggtaatcagagccaagtcaatcataccatccttcaatactatagatgtatggcttcagaattggtgcgagtcaacattactccggtggtggccctttggcagccaatggcgcccaaccaaggtctgccacgactcctcgcaaggcaaggtgcatgggaaaacccttacaccgctcttgcattcgcagaatacgcaagactttgttttcaggagctgggacaccatgtcaagctctggattaccatgaatgagccttataccagaaacatgacctacagcgcaggacataacctgctgaaagcgcacgcgcttgcatggcatgtgtacaacgaaaagttccgccacgcccaaaatggaaagatcagcatcgcgcttcaagcagattggatcgagcccgcgtgtcccttttcgcagaaggataaggaagtcgcagaacgcgtgcttgaatttgatatcggatggttggccgaacctattttcggatccggagattacccctgggtgatgcgcgattggctgaaccagcgcaacaacttcctccttccatatttcactgaggatgaaaagaagctcatccagggaacttttgattttctcgcgttgtcacattataccaccattctggtggattccgaaaaggaagatcccatcaagtacaacgattacctggaggtccaggaaatgaccgatattacctggttgaactcgcctagccaggtggcagttgtgccatgggggttgaggaaggtcctcaactggctcaagtttaagtacggggaccttcccatgtatatcatttcaaacggtattgacgacggactgcatgcggaggacgatcagcttcgggtgtactatatgcagaactacatcaatgaagcactgaaggcacacattcttgatggtattaacctctgtggctactttgcatactcatttaacgaccgcaccgctcccaggtttggtttgtacaggtatgcggccgatcaatttgagcctaaagcgtccatgaaacattacagaaagattatcgacagcaacggttttcctggtccagaaacccttgagcgattttgtcctgaggaatttactgtctgcactgaatgctccttctttcacactagaaaatccctcctcgcattcattgctttccttttcttcgcatccatcatttcactttcattgatcttttactactcgaagaagggtagaagaagctacaag

SEQ ID NO: 149696 - DNA, 3036 bp, Artificial Sequence
  derived and/or modified sequence
atgccagcatctgcgccgccaagacgcccgcggccgccgccgccttccctgtcactcctgctcgtgctcctcggtctgggtggccgccgcctccgtgctgaacctggggacggtgcgcagacctgggcccgcttcagcagaccaccggccccggaagcggctggattgttccaagggacgtttccagacggcttcctttgggcagtgggttccgcagcttaccagactgagggcgggtggcagcaacatggaaaaggagcctccatttgggacactttcacccatcatccactggcaccacctggggactcccgcaatgcttccctgccgctgggagccccttcacccctgcaacctgccaccggtgatgtggctagcgactcctacaacaatgtgttccgcgacacggaagccttgcgggaactcggagtcacccactatcggttcagcatctcatgggcgagagtcctgccgaacgggtcagctggagtcccaaaccgcgagggactgcgctactacagacggctgctggagagactgcgcgaactcggagtgcagccagtggtgactctgtaccactgggacctgccacagaggcttcaggatgcgtacggaggatgggccaatcgggccctcgccgaccattttcgcgattacgcggagctttgttttcgccatttcggtggacaggtcaaatactggatcaccatcgataatccgtacgttgttgcttggcatggatacgcaactggccggctggcccctggcatccgagggtccccccgcctcggatacctggtggcgcacaatctcctcctcgcccatgctaaagtgtggcatctctacaacacttcgttccgcccgacccagggcggacaggtgagcatcgcgctcagctcgcattggatcaacccgcgacgcatgactgatcacagtatcaaggaatgccagaagagtttggatttcgtcctgggctggttcgccaagcccgtgttcatcgacggagattaccccgaatcgatgaaaaacaatctctcgtcgatcctgccggatttcactgaaagcgagaaaaagttcattaagggaaccgcggactttttcgccctgtgctttggccctaccctctcattccaactgttggacccgcacatgaagttccggcagctggaatcacccaacctgagacagctgctctcctggatcgacctcgaattcaaccatccccaaatcttcatcgtggagaacggatggtttgtctcagggaccactaagcgcgatgacgcgaagtatatgtattacctgaagaaattcattatggaaactctgaaggccattaaactcgacggtgtcgatgtgatcggatacaccgcgtggtcactcatggacgggttcgagtggcaccgcggttacagcatccgtaggggcttgttctacgtggatttcttgagccaggataagatgttgttgccaaagtccagcgctttgttctaccaaaagctgatcgaaaagaacggctttccaccgcttccggagaaccagccattggagggtacgttcccctgcgatttcgcttggggtgtggtggacaattacatccaagtggacactactctgtcgcagttcaccgatctgaatgtgtatttgtgggacgtgcaccattcaaagcgcttgattaaggtggacggcgtggtgaccaagaagcgcaagtcctactgcgtggattttgccgcaatacagcctcaaatcgcgctgctgcaagagatgcatgtgacgcactttcggttttcactggattgggcacttatcctgccgctcggaaaccagtcccaggtcaatcacactatcctgcagtactatcggtgtatggcttccgaactggtcagagtcaacataacgcctgtggtcgccctttggcagccgatggcgccgaaccaaggtttgccgcggcttcttgccagacaaggggcatgggaaaacccgtacaccgcactcgccttcgccgaatacgcgaggctgtgctttcaagagctgggacatcatgtcaagctctggatcacgatgaacgagccgtacactcgcaacatgacctacagcgccggtcataacctgcttaaggcccacgccctggcctggcacgtgtacaacgagaagttccgccatgcccagaacggtaagatctcgatcgcccttcaggcagactggatcgaacctgcctgcccattctcccagaaggataaagaagtcgctgaacgggtgttggaattcgatatcggctggctcgccgagccgatcttcggctcgggggactacccctgggtcatgcgggactggctcaatcaacgtaataacttcttgttgccttacttcacggaggacgagaagaaactgatccaaggtaccttcgacttcctggctctgtcacactataccaccatcctcgtggattccgagaaggaggaccccatcaagtacaatgactacctggaggtgcaggaaatgaccgatatcacctggctgaactctccaagccaggtggcagtggttccgtgggggttgagaaaagtgctgaactggctcaagttcaaatacggcgatctgcccatgtacatcatcagcaacggaatcgatgacggcctccatgcggaggacgatcaacttcgggtctattacatgcagaactacatcaacgaggccctgaaggctcacatcctggatggcatcaatctgtgcggttacttcgcctactcgtttaacgaccggactgccccacgtttcggcttgtaccggtacgccgccgaccaattcgagcctaaagcatcgatgaaacactaccgcaagatcatcgactcgaacggattccctggcccagaaacccttgaacgattttgcccggaggaatttactgtctgtaccgaatgctccttcttccatacccggaagtcactgctggcatttatcgcgttcctcttcttcgcaagcatcatttcactctccctgattttctactactcgaagaagggccgacggagctacaag

SEQ ID NO: 149697 - DNA, 3036 bp, Artificial Sequence
  derived and/or modified sequence
atgcctgctagcgccccgccacgtcgccccagacctccccccccctccctgagcctgctgttagtcctcttgggcttggggggtcgtagactgagagctgaaccaggagacggcgcacagacctgggccaggttcagccgcccaccagcccctgaggcagccgggttgttccagggaacattccccgacggtttcctttgggcagtcggttcagcagcctatcagactgagggtggctggcagcagcatggaaagggggcctctatatgggatacattcacgcaccaccccttggcccccccgggtgacagcaggaacgcatctctacctcttggtgccccctctcctctgcaacccgcgactggggacgtggccagcgacagttataataacgtgtttagagacaccgaagcactgcgtgagctgggggtcacgcactaccgcttcagcatctcatgggcccgtgtgcttcccaacgggtctgctggagtgcctaaccgagaagggctccgttactataggaggctcttagagcgactgagggagctcggcgtccagcccgtggtgaccttataccactgggacctgccccagagactccaggatgcttatggaggttgggcaaacagagctctggccgatcatttccgggattacgcagagctgtgctttcgccattttggagggcaggtgaaatattggataacgatcgacaacccgtacgtggtcgcttggcacggatacgctacaggtcgcctggctcccggaatcaggggctccccaagactggggtatcttgtggcacacaacctgcttctggcccatgcgaaggtgtggcatctgtacaacacatcattccgccctacacaagggggacaagtgagtatcgcattaagctcccattggatcaacccacggaggatgacagatcattccattaaagagtgtcagaagagtctggacttcgtgttaggttggtttgccaaaccagtgtttatcgatggcgactaccccgagagcatgaaaaacaacctgtcttccattctgcctgattttacagagtcagaaaagaaatttataaagggaactgcggacttcttcgctctgtgttttggacctacactgtcttttcagttgttggatcctcatatgaaatttaggcaattggaaagtcctaatctccgacaactgctgtcatggattgacttagaattcaatcatccccagatattcatagtcgagaatggttggtttgtctcgggcacaacaaaaagggatgacgctaagtatatgtactatctcaaaaagttcattatggagacattgaaggccatcaaactggacggagtggatgtcatcggatacactgcctggtcactcatggacgggtttgagtggcatagagggtactctatacggcgtggccttttctacgtcgatttcctgtcccaggacaagatgctgctgcctaagtcctccgctcttttttaccaaaagcttatcgaaaaaaatggcttcccgcctcttccggaaaatcagcctctcgaggggacgttcccttgtgacttcgcttggggagttgtggataattatatacaagtggacactacactgtcacaatttacagacctgaatgtatacctgtgggacgtacatcactccaaaaggctcatcaaggttgatggggtcgtgacaaagaagagaaagtcctattgtgtagacttcgccgccatacagccccagattgcacttctgcaggaaatgcacgtgacccacttccggttctctctggactgggcattaattctgcccttggggaaccagagtcaggtcaaccataccatcctccagtattatcggtgcatggcctccgaattggtcagagttaacattacaccagtggttgcactctggcaacccatggcaccgaatcagggcctgccacggctacttgcccgccaaggggcatgggagaacccatatacagctctcgcctttgccgaatatgcccgcttgtgttttcaggaactgggacaccatgtcaagctctggatcactatgaacgagccgtacacgagaaacatgacttactcagcaggacacaacctccttaaagcacacgctctggcgtggcacgtgtataacgaaaagttcaggcacgcccaaaacgggaagatatcaatcgctctgcaggctgattggattgaacctgcctgtcccttctctcagaaggacaaagaggtcgctgaacgggtgctggagttcgacatcgggtggctggccgaacctatttttggctctggcgattacccatgggtgatgcgggattggttaaatcagagaaataattttctcctcccttacttcactgaggacgagaaaaagctaatccagggaacctttgatttcttggcactcagccactacaccactattctagtggacagcgaaaaagaggatccaattaagtacaatgattacctggaggtgcaggagatgacagacattacatggcttaattctcccagccaggtggccgtcgtgccatggggattacgaaaggtcctcaattggctgaaattcaagtacggagatttacccatgtatatcatcagcaatgggattgatgatggtctccatgccgaggacgatcagcttcgagtgtattatatgcagaactacatcaacgaagcactaaaggcccacatattagatggcatcaacctgtgcgggtattttgcttattctttcaatgatcggacagctccccgttttggtctgtataggtacgcagctgaccagtttgaacctaaggcttctatgaaacactataggaaaatcattgacagtaatgggttcccaggtccggaaacactcgagcgattttgccctgaagagtttacagtgtgtactgagtgcagcttctttcacaccagaaagtcactgcttgccttcatcgccttcttatttttcgcaagcatcattagcctctcgctgatcttttattatagtaagaagggaaggcgttcctataag

SEQ ID NO: 149698 - DNA, 3036 bp, Artificial Sequence
  derived and/or modified sequence
atgccagcatccgcgccgccaaggcggccccggcccccacctccctcactttcgctgctgttggttctgctgggcctaggcggtcgtaggctgagagctgagcctggggacggagcgcagacctgggcccgattcagcagaccgcctgcacctgaggccgccgggctgttccaggggacattccccgacggtttcctctgggctgtcggcagcgctgcataccagacagaaggtggctggcagcagcatggaaagggtgcaagtatatgggacaccttcactcaccacccgctggccccgccaggcgattcacggaatgcctctttaccactgggggccccatccccattacaacccgctactggtgacgtcgcatccgacagttacaataatgtgttccgagatacggaggcgctccgggagcttggggtcacacattacagattcagtatctcatgggctagagtgcttcctaatggcagcgctggtgttcccaatcgcgaaggtttacgctattataggcgcctgttggagcggctccgcgaattgggcgttcagcccgttgtgacgctgtatcattgggatctaccgcagcgcttacaggatgcctacggcggatgggccaatcgggccttagcagaccacttcagagattacgccgagctgtgtttccggcattttgggggccaggtgaagtactggattaccatcgataacccctacgtagtcgcctggcatggctacgctactggccggctcgctcccgggatccgcggcagtccacggctcggatatctggttgctcacaatcttctcctcgcacatgctaaagtgtggcacctgtataatacaagcttcagaccaacccagggaggacaggtgtccattgcactgtcgtcccactggattaaccctcgacggatgacagatcattcgattaaggaatgccagaagtctcttgattttgtcctcggatggttcgctaaacctgtcttcatcgacggtgattatccagaatccatgaagaataatttaagttctattctcccagacttcacggaatctgaaaagaagtttattaaaggcaccgcagacttttttgctctttgttttggtcccacacttagttttcagctgctggatccgcacatgaagttcagacagctggagtctccaaacctgcggcagttactgagctggatcgacctagagttcaatcatccacagatctttattgtcgagaacggctggttcgtcagcgggactacgaagagggacgatgctaagtacatgtattatctcaaaaagttcatcatggaaactttgaaggcaatcaaactcgatggcgttgacgtgatcgggtatacggcctggtcattaatggatggttttgagtggcatcgtggttactccattcggcggggtctgttttatgtcgattttttgtcccaagataagatgttgttgcccaaatccagcgctctcttctatcagaagctaatcgagaaaaacgggttccccccattgccagaaaatcaaccgttggagggcacattcccttgtgactttgcatggggtgtagtggataactacattcaggtggacacaaccctctcccaattcaccgatctgaacgtgtacttatgggacgtacaccactcaaaaaggctgattaaagttgatggggtagtgacaaaaaagcgaaaatcatattgcgtagacttcgctgcaattcagccccagattgcactcctgcaggaaatgcacgtgacccactttcggttttcactggattgggccctgattctaccactggggaatcagagccaggtgaatcacacgatcctgcagtattatcggtgtatggcttcagagttggttcgtgtaaacatcacacctgttgttgcattatggcagcccatggcaccgaaccaaggattgccccgcctgctggcccgccagggggcgtgggagaacccgtacacagctctggcctttgctgaatacgcaaggctctgttttcaagagctgggccatcatgtaaagctgtggattacaatgaacgagccctacactagaaacatgacttattcagcaggtcataaccttctgaaggcgcacgccctcgcatggcacgtgtataatgaaaaattccgccatgcacagaatgggaagattagcatcgccctgcaggctgactggatagagcctgcatgccccttcagccagaaggataaagaagtcgcagaacgcgtcctcgagttcgacattgggtggctggcggagccaattttcgggtccggagactacccatgggtgatgagggattggctgaaccagagaaacaacttcctgttgccatactttactgaggatgaaaaaaaactgatacaagggacattcgactttcttgccctgtcacattacactacgattttggtggactctgagaaggaagatcccatcaagtacaatgactatttagaggtacaagagatgacagatataacatggttaaactctccaagccaggtggccgtagtgccttgggggcttaggaaagtgctgaattggctgaagtttaaatacggggacctcccaatgtatataatctcgaatgggatcgacgatggtctgcacgccgaagatgatcaactgcgggtgtattatatgcagaactatatcaatgaagccctgaaggcccacatccttgacggcatcaatctgtgcggttattttgcctacagctttaatgatcgtaccgcacccaggttcggtttatatagatacgctgccgaccagtttgagcccaaggcaagcatgaaacattatcggaaaataattgactccaacggcttcccaggcccagagacccttgagaggttttgtccagaagaatttactgtctgcaccgagtgtagctttttccatacaaggaagtccctgcttgcctttatagcctttctcttttttgcctcaatcatttcattgtccctcattttctactactccaaaaaaggtcgccgctcttataaa

SEQ ID NO: 149699 - DNA, 3036 bp, Artificial Sequence
  derived and/or modified sequence
atgcccgcatccgcccccccccggagaccccgtccccccccaccttctttgagtcttcttttggtgctgctcggcttgggtggaagaaggctccgggccgagcctggggacggcgcccagacttgggcccgctttagccggcctccagcccccgaagcagctggcttgttccagggcacctttccagacgggttcctgtgggccgtgggctccgctgcctaccagacagagggcgggtggcagcagcatggtaagggcgcgagtatctgggacacgttcacacaccaccccctggcccctccaggtgactcaaggaacgcatccctccctctgggggccccttcaccgctccagccggcaaccggcgacgtcgcctcggactcttacaataacgtgttcagggacaccgaagcacttagggagcttggcgtcacgcattaccgcttctctatctcttgggcccgggttctgccaaacggcagcgcaggcgtccctaacagggagggcctgaggtactatcgcaggctccttgaacgtcttcgagaactgggagtccagccagtggtgactctgtaccattgggatctcccacagagattgcaggatgcatatgggggatgggccaatcgggctctcgcagaccatttccgagattatgccgaactgtgctttcggcactttggcggacaggtgaagtattggatcactattgacaacccctatgtggtggcctggcacggatacgccacaggccgcctggcacctgggattcgaggctccccccggctggggtacctggtggcccacaacctgctgcttgcacacgctaaagtgtggcacctgtataacaccagctttagacctacccagggaggccaagtttccatcgcactctcctctcactggattaatccccgccggatgactgaccacagcatcaaggagtgtcagaagagtctcgacttcgtgttgggttggtttgccaagcccgtgttcatcgatggggactatcctgaatcaatgaagaacaatctgtctagcattctcccagactttactgagtctgaaaaaaagttcattaaaggcacagcggacttcttcgcactgtgtttcggccccactctttccttccagctattggacccgcacatgaagttccgacagctggaaagccctaatctgcggcagctgctgagctggatagacctggagttcaatcaccctcaaattttcatcgtggagaatggctggtttgttagtggcaccaccaaaagggatgatgccaagtatatgtactacctgaagaagttcattatggaaacgctgaaggctattaagctggacggcgtagatgtgatcggctataccgcctggtccctaatggacggctttgaatggcacagaggttacagtattagacggggactgttttacgtcgacttcctgtctcaggataagatgctccttcccaagtcctcggccctgttctaccagaaactcattgaaaaaaacggattcccccctctgccagagaatcagcccttagaaggcaccttcccgtgcgactttgcgtggggagtcgtcgacaactacatacaggtggataccactctttctcagttcacagacttgaatgtttacctctgggatgtgcaccattccaaaaggttgatcaaagttgatggcgtggtcacgaagaagcggaagtcctattgtgtggatttcgcagcaattcaacctcaaattgcactccttcaagagatgcatgttacacattttcgcttttcccttgactgggccctgatcctgccgctcgggaaccagagtcaagtaaatcataccatactccagtactatagatgtatggcttctgagttggtgagggtcaatatcacaccggtcgtggccctatggcagccaatggcgcccaatcagggcctgccaagactgcttgcgaggcagggcgcctgggagaatccctatacggcgctggcatttgcggagtatgccagactttgctttcaagaattaggtcatcatgtaaaactgtggatcacaatgaacgagccatacacccgtaacatgacatactcggccggacataatctgttgaaagcgcacgcgttagcatggcacgtttacaacgaaaagtttcgtcacgctcagaacggcaaaatcagcatcgcacttcaagcagactggattgaaccggcatgccctttttcccagaaggacaaggaggtcgccgagcgggtactcgaattcgacattggatggcttgccgaacctatttttggaagtggagactacccctgggttatgcgtgactggctaaatcagcggaataacttcctcctgccttactttacagaagacgaaaagaaactgatccaaggtacatttgattttctggctctgagccattacactacaatcctggtcgacagcgagaaagaagatcccatcaagtacaacgactaccttgaagtacaggaaatgacagacatcacctggctcaattccccaagccaggtggctgtggtgccctggggacttagaaaagttctaaactggttgaaatttaaatacggcgacctgccgatgtacatcattagcaacggcatcgatgacggtcttcatgccgaggacgatcagcttagggtctactacatgcaaaactacattaacgaggctctgaaagcccacatactcgacggtattaatctctgcggctactttgcctattccttcaacgaccgcaccgctcctcgattcggattgtaccgctatgcggctgaccagttcgaacccaaggccagtatgaagcactaccgtaagatcatcgatagcaatggattccccggaccagagaccttggaacggttttgcccggaggaattcaccgtgtgcacggagtgttcttttttccatacccgaaaaagcctcctggcattcattgcctttctgtttttcgcctcgatcattagcctaagtctcattttttattatagcaaaaaagggagacggtcttataaa

SEQ ID NO: 149700 - DNA, 3036 bp, Artificial Sequence
  derived and/or modified sequence
atgccagcaagcgcgcctccccgcaggcctcgaccgcctccgccaagcctgagtctactcctcgtcctactgggcctgggtggccggaggttgcgcgcagagcccggcgatggtgcccaaacgtgggcacgtttttcacgcccgcccgcacctgaggcggccggtctatttcaaggtacgtttccggacggctttctgtgggcagtgggtagcgcggcctatcaaaccgaaggtggctggcagcagcatggtaaaggtgcaagcatctgggacactttcactcaccacccacttgctccgccaggtgactctcgcaatgcgagcctcccgttgggggcaccgagcccgttgcaacctgctacaggcgacgtcgcttccgatagctataacaatgtgtttcgcgacactgaggctttgcgtgaactgggtgttactcactaccgcttctcgatctcttgggcgcgtgttctgcctaatgggagcgccggtgtgccaaaccgcgagggacttcgctactataggcgcttgctcgaacggcttagagaacttggtgtgcaacctgtggtgactctgtatcactgggatctcccacagcgcctgcaagacgcatacggcggctgggccaaccgcgcgttggcggaccattttagagattatgccgagctctgttttcgacacttcggaggtcaggtgaagtattggattaccatcgacaatccatacgtggttgcctggcatggctatgcaacgggtagactggccccaggtattcgtggcagccctcgcttgggctatttagttgcccataatctgctcttagcccacgctaaggtctggcacctctacaacaccagcttccgcccgacgcaagggggtcaggttagcatcgcgcttagctctcactggatcaatccacggaggatgaccgaccacagcattaaagagtgccaaaaaagcctggattttgtcctgggttggtttgcgaaacccgtatttatcgacggggactatccggaaagcatgaaaaacaatctgtcaagtatcctgcctgatttcaccgaaagcgagaagaaatttattaagggcaccgcggacttttttgccctctgcttcgggccgaccctgagcttccagctgctggacccacacatgaagtttcgccaattggaaagccctaacctccgtcagctgttgagctggatcgatctcgagttcaatcacccacagattttcatcgtggaaaatggttggtttgtttccggcactacgaagcgtgatgacgccaaatatatgtactacctgaaaaagttcattatggagactctgaaagctattaaactggatggcgttgatgtcatcggctacactgcctggtccttgatggatggttttgagtggcatcgtgggtactcgatccgccgcggtctattttatgttgattttctgtcacaagataaaatgttgctgccgaaatccagcgccctgttttaccaaaagctaatcgaaaaaaacggttttcctccgttgccagagaatcagccactggagggcactttcccttgcgattttgcatggggtgtggtcgacaattatattcaggttgataccaccttgagccagtttaccgacctcaacgtctacttgtgggatgttcaccactccaaacgcctgattaaggttgacggtgtcgtcacaaagaagagaaaaagctactgtgtggattttgcagccatccagcctcaaatagctctgttacaggagatgcatgttacccatttccgcttctctctcgattgggctctgatcctccctcttggcaatcagagtcaggtgaaccataccatcctgcaatattaccgctgtatggcatccgaactggtacgcgttaacatcaccccagtggttgcgttgtggcagcctatggcgcctaaccagggacttccacggttgctggcccgacaaggtgcttgggaaaacccttacaccgccttggcattcgctgagtacgcccggttatgcttccaggagcttggtcatcacgtgaaactttggatcaccatgaacgagccgtatacccgcaacatgacatattcagccgggcacaatctgctgaaggcacatgccctggcttggcacgtctacaatgagaagtttcgccatgctcaaaacggcaaaataagcattgctctgcaggcagattggatcgaaccggcctgcccgtttagccaaaaggacaaagaagtggccgagagagtgctggagttcgatattggctggttagcggaaccaatatttggcagcggcgattacccatgggtcatgcgtgattggcttaatcagaggaataatttcctcctgccttatttcactgaagatgaaaagaagctgattcagggtaccttcgactttctggcactgtcccattacacgaccatcctggtggatagcgagaaggaggatccaatcaaatataacgattacctggaagttcaggaaatgactgacattacctggctcaacagcccaagccaggtggccgttgtcccatggggtctgaggaaggtcctgaactggttgaagttcaagtatggcgacctgccgatgtacattatcagcaatgggatcgacgatggcttgcatgccgaagacgatcagttacgtgtgtactatatgcagaattatattaacgaggccctcaaggcgcacattctggatggcatcaacttgtgtggctactttgcgtacagcttcaatgacagaacagcaccccgcttcggcctgtatcgctacgcagcggaccaatttgaacccaaggcatcaatgaaacattaccgtaaaatcatcgatagcaatggtttcccgggcccggagactctggagcgcttttgtcccgaggagtttaccgtgtgcactgagtgtagtttttttcacaccagaaagagcctgctggcgttcatcgcattcctcttttttgccagtatcatttcgctgtccctgatattctactactccaagaaaggtcggaggagctacaaa

SEQ ID NO: 149701 - DNA, 3036 bp, Artificial Sequence
  derived and/or modified sequence
atgccggcttcggcaccccctcggcgcccgcgtcccccgccgccgagcctgtcgctgctgctggtgctcctcggactcggcggtcgcagactgcgtgctgaaccaggggacggcgcgcagacctgggcacgcttcagcaggccccccgcacctgaggctgcgggacttttccagggtacctttcctgacggcttcctctgggcagtgggctccgctgcgtaccagactgagggagggtggcagcagcatggaaagggagcatccatctgggataccttcactcatcatccgctggcccctccgggagattcccgcaacgcttccttgccgctcggggccccatcccctctgcagccggcgactggcgatgtggcgtctgactcctacaataatgtgttccgggataccgaagccctgcgcgagctcggagtgacccactaccgcttttcgattagctgggctcgcgtccttccaaacggatcagccggcgtgccaaatagggaaggcctgcgctactaccgccgcctgcttgagcgcctgcgcgaactgggagtgcagcctgtggtgactctctaccattgggatctgccacagcggctgcaagatgcctacgggggatgggccaaccgggccctcgctgatcactttcgcgattatgcagagctgtgcttccggcactttggaggtcaggtgaaatactggatcaccatcgacaacccatacgtcgtggcttggcatgggtacgcaactggacgcctggcgcctggaatcaggggctccccgagattgggatacctcgtcgctcacaatttgctcctcgctcacgccaaggtctggcacctttacaatacctccttcagaccgacgcagggtggccaggtgagcatcgctctgtccagccactggatcaaccctcgccggatgaccgatcattcgatcaaggagtgtcaaaagtccctcgacttcgtgctgggttggttcgccaagcctgtgttcatcgacggggactacccagaatcaatgaagaataacctctcgtcaatcctccctgacttcactgaaagcgagaagaaattcattaagggaactgctgatttctttgccctgtgtttcggtccgacgctgtccttccaactgctggacccccacatgaaattccgacaactcgaatccccgaatctccgccaacttctgtcatggattgatctggagttcaaccatccacagatcttcatcgtggaaaacggatggttcgtcagcggcactaccaagcgcgacgacgctaagtatatgtactatttgaaaaagttcattatggagacgttgaaagcgatcaaactcgatggagtggatgtgatcggctacactgcttggtcgctcatggacggattcgagtggcatcgcggttactccatcagacggggacttttctacgtcgacttcttgtcgcaggataagatgttgctgccgaaatcgtctgccctcttttaccagaagctgatcgagaagaatggattccctccgctgcccgagaatcaacctttggaaggcacttttccctgtgacttcgcctggggagtggtggacaactacatccaggtcgacaccactctgtcccagtttaccgacttgaatgtctacctttgggacgtgcaccattctaaacggctgatcaaggtggacggcgtggtcactaagaagcgaaagagctattgcgtggatttcgccgcgatccagccgcagatcgcgctgctgcaggagatgcacgtcactcatttccgcttctccttggattgggcgctcatccttccgctcgggaatcaaagccaagtgaatcacaccatcctgcagtactaccgctgtatggcttccgaactggtgagagtgaacatcactcccgtggtggcgctctggcagccaatggcacctaatcaggggcttccgaggctgcttgcacggcaaggagcgtgggaaaatccgtacaccgcgctggcgttcgcggaatacgcgagactctgcttccaagagttggggcatcacgtcaaactgtggattactatgaacgaaccttacacccggaacatgacttactcggctggacacaatcttctgaaggctcatgccctggcttggcacgtttacaatgaaaagttcagacacgcgcaaaacgggaaaatctcgattgcgctgcaggcagactggatcgagccagcctgccctttctcacaaaaggataaggaggtggccgaacgcgtcctggaatttgacatcggatggctggcggagccaattttcggatccggagattacccgtgggtgatgcgtgactggttgaatcagcgcaacaacttcctcctcccgtacttcactgaggacgaaaagaaacttatccaaggaacttttgacttcctcgcactgtcgcattatactaccatactcgtcgattcggaaaaagaggacccgattaagtacaatgactacctggaagtgcaagagatgaccgacattacctggctgaattccccgtcgcaggtggcagtggtgccgtggggactgcgcaaggtcctcaactggctgaagtttaagtacggtgacctgccgatgtacatcatatcgaatggcatcgatgatggtttgcacgcggaagatgaccaattgcgggtgtactacatgcaaaactacattaacgaagcgctcaaggctcacatcctcgatggcatcaacctgtgcggttacttcgcttactcatttaacgaccgcactgcccccagatttggactctaccgctatgccgccgaccaatttgaaccgaaggccagcatgaagcattaccgcaagatcatcgactcgaacggattccctggacccgaaaccctggagcggttttgccctgaggagttcaccgtttgcaccgaatgttcgttcttccatactcgcaaatcacttctggccttcatcgcctttctgttctttgcgtcgatcatctcgctgagcctgatcttctattactccaaaaagggccggcgctcctacaag

SEQ ID NO: 149702 - DNA, 3036 bp, Artificial Sequence
  derived and/or modified sequence
atgccagcaagcgcacctcctcggagaccgcggcccccccctccatcgctgtcattactcctcgtgctgctgggacttggaggtcggagactgcgcgcagaacccggagatggagcccagacgtgggcgcgtttctctcggccaccagcccccgaggctgcaggactcttccagggcacattccccgatggattcctctgggccgtaggctcagcggcttaccagactgagggcgggtggcagcagcatggaaagggcgcttccatttgggatacgtttactcatcacccgctggctccaccaggagacagcagaaatgcctctctgccactgggggcaccctctccccttcaaccagctaccggcgatgtggcgtccgacagttacaacaacgtcttcagagacactgaggctctgcgggaactgggcgtgacacactatcgctttagcatctcttgggcccgagtgctgcccaatggatctgcgggagtgccaaaccgagaggggctcaggtactaccgcagactactggagcggctcagggagctcggggtacagcccgtggtgacattgtatcattgggatctgccccagcgattgcaggacgcttatggcgggtgggccaatagagctctggctgaccacttcagggactacgcagagttgtgtttccggcattttggcggccaggtgaaatattggattacaatcgacaatccgtacgtagtggcatggcacgggtacgctactgggagactggcccccgggattcgaggctcaccgcgtctcggatatcttgtggcacacaacctattgttggcgcacgcgaaagtgtggcacctctacaatacctcattcagacccacgcagggcgggcaagtatccattgccctttcgtctcattggataaacccccgtcggatgaccgaccactcaatcaaggagtgtcagaaaagcctggattttgttttaggctggttcgctaaacccgtgttcatcgatggggattacccagagagtatgaagaacaaccttagttcaattcttcctgacttcacggagtccgaaaagaagttcataaaagggaccgcagacttcttcgccctatgcttcggaccaaccctttcttttcaacttctggatcctcatatgaaattccggcaattagagagccccaacctgcgacagttgctcagctggatcgacctcgaattcaatcatccgcagatctttatcgttgagaacggctggtttgtgtcaggcacaacaaaaagggacgatgctaagtatatgtactacctgaaaaagtttatcatggagaccctgaaagcaatcaagctcgatggagtggacgtgattggctacacggcgtggtcgctcatggacggctttgagtggcacaggggctacagcatcaggaggggtctattttatgtggattttctgtctcaggataagatgttgctgcctaaatccagcgccttattttatcagaagctgatcgagaagaacggattccctcccctcccagagaatcagcctcttgaggggaccttcccctgtgattttgcttggggcgtggtcgacaattatattcaggttgatacaacactgagtcagtttactgacttaaatgtgtacttgtgggatgtgcatcactcaaaaagactcatcaaagtggatggggtcgtaactaagaagagaaagtcttattgcgtcgattttgccgctattcagccccagatagcgctgctccaagagatgcacgtgacacactttcggttcagtctggattgggctctgattttgccgctcggcaatcagtctcaagtcaatcatacgatcctgcagtattatcgctgtatggccagcgagttggtgagggtaaatatcacacctgtcgtggcattatggcagcccatggctccgaaccaagggttaccccgactgctggcccgccagggagcatgggaaaatccttacactgcactagctttcgccgagtatgccaggctctgtttccaagaacttggtcaccacgtgaaattgtggataacaatgaatgaaccctacacccgcaatatgacctacagcgcggggcataacttgctgaaagctcatgcccttgcctggcacgtatataatgagaaattccggcacgctcagaacggaaaaatctctattgccctccaggccgattggatcgagcctgcatgtccttttagccagaaagataaggaggtcgctgagcgagtcctagaatttgacatcgggtggctggcagaaccaatctttggatccggggactacccctgggtgatgcgggattggctgaatcagcggaataatttcctgctgccgtattttaccgaggacgaaaaaaaactaattcagggtacattcgacttcctcgccttaagccactacacaacgattcttgtcgattctgagaaagaagaccccatcaaatataatgactacttggaggtgcaggaaatgacagacataacctggctcaactcaccgagccaggtagcggtggtcccgtgggggctcagaaaagttctcaattggctcaaatttaaatatggggacttacccatgtacatcatttctaacggcattgacgacggactgcacgctgaagacgaccaactccgtgtgtattacatgcaaaattacatcaacgaggctttaaaagcccacatccttgacggcataaatctgtgtggctactttgcatactcctttaacgatcgtacagcccccagattcggcctgtatagatatgccgcggaccagttcgagcccaaagcctctatgaagcattataggaagattattgatagcaatggatttcccgggcctgagacgctggaaaggttttgcccagaggaattcactgtgtgcactgagtgtagcttctttcacaccagaaagtctctcttagccttcattgctttcctatttttcgcttccatcatcagtctaagccttatattttactattcaaaaaaaggtcggaggtcatataag

SEQ ID NO: 149703 - DNA, 3036 bp, Artificial Sequence
  derived and/or modified sequence
atgccggcgtcagcccctccacgccgccctagaccgcctcctccgtcgctctcgctgcttctggtgctgctcggactgggcggacgccggctgcgggcggaaccgggggacggcgcccagacctgggcgcgcttcagcagaccgccagcacccgaagcggcagggctcttccaagggacttttccagacggctttctgtgggccgtcggatctgcagcctaccagactgagggaggctggcagcaacacggcaagggagcatcgatctgggatacctttactcatcacccactcgcgccgcccggtgactccaggaatgcgagcctgccactgggagctccatcgcctttgcagccggcaaccggggatgtggcctccgattcctacaacaacgtgttcagagataccgaggccctgcgggagctgggcgtgacgcactaccgcttcagcatctcatgggcgcgcgtgcttccgaacggtagcgccggagtgccgaatagagagggattgagatactacagacggcttctcgagcggctgagagagctgggcgtccaacctgtggtaactctctatcactgggatcttcctcaacggctgcaggatgcctacggaggatgggccaacagagcactcgccgatcacttccgagattacgccgaactgtgcttccggcatttcggaggacaggtgaagtactggatcactatcgataatccgtacgtggtggcatggcacggatacgccacgggaaggctggctcccggaattcgggggtccccgaggctcggctacctggtcgcacacaacctcctcctcgcccacgcgaaagtttggcatctttacaatacttccttccgccctacccagggtggacaggtgtccatcgctctgtccagccactggataaatcctcgccggatgactgatcattcaatcaaggaatgccagaagagtctggacttcgttttgggctggttcgccaaaccagtctttattgacggagattacccagagtccatgaagaacaacctgtcgtcaattttgccggacttcaccgagtcagaaaagaagttcatcaaagggaccgccgacttctttgcactgtgtttcggcccgactctgagtttccaactgcttgatccgcacatgaagtttcgacagctcgaatcccccaatctgagacagctgctgtcgtggatcgacctcgaattcaatcacccgcagatcttcatcgttgagaatggatggtttgtgtcaggaaccactaaacgtgatgatgcaaagtatatgtactatctgaagaagttcataatggagactctcaaggcaattaagctcgatggtgtcgacgtcatagggtacacggcctggagcctgatggacggtttcgaatggcatcggggatatagcatccgcaggggcctcttttacgtggactttctctcgcaggataagatgctgctgccgaagtcgagtgcgctgttctaccaaaaactgatcgaaaagaacggatttccaccactgcccgagaaccagccgctggagggaactttcccgtgcgacttcgcctggggtgtggtggataactacattcaagtggacaccaccttgtcccagttcacggacctgaacgtgtacttgtgggacgtgcatcactctaagcgcctgatcaaggtcgacggcgtcgttaccaaaaaacggaagtcctattgcgtggacttcgccgctatccaaccccagattgcactgcttcaagagatgcacgtgacccatttcagattcagccttgactgggcgctgatcctgccgcttgggaaccagtcacaagtgaatcataccatcttgcaatactacagatgtatggcctcggagttggtgcgggtgaacatcactcccgtcgtggcactgtggcaaccaatggcccccaaccaaggactgccacgcctcctggccagacagggagcttgggaaaatccttacaccgccctggctttcgcggaatatgcgagactgtgttttcaggaactgggtcaccacgtgaagctctggatcaccatgaacgaaccctatacccggaacatgacctacagcgctggccataacctcttgaaagcccatgccctcgcctggcatgtgtacaacgagaagtttcgtcatgcgcagaacggaaagatctccatcgccctgcaggcggactggattgaaccggcttgccccttctcgcaaaaggataaggaggtcgcggaacgggtgttggaattcgacattggatggcttgccgaaccaatcttcggctcaggagactacccctgggtaatgagagactggcttaatcagcgcaataactttctcctgccttacttcaccgaggatgagaagaaactgatccagggtacctttgactttctcgcactgtcccactatacgactatccttgtcgactcagaaaaagaggaccccatcaaatacaatgattacctggaagtccaggaaatgactgacatcacttggctcaactcgccgagtcaggtcgcggtggtgccatggggtctgcgcaaggttctgaactggctcaagtttaagtatggagatctgccgatgtacatcatctcgaacgggatcgacgatgggctgcacgcagaggacgaccagctcagagtgtactatatgcagaactacatcaatgaagccctcaaagcccatatcctggacgggatcaacctgtgcggatacttcgcttactccttcaatgaccgcactgcaccacgcttcggactgtaccgttacgctgcggaccaattcgagcctaaagcgtcaatgaagcactaccgcaagatcatcgactcgaacggctttccgggaccagaaaccctggaacgcttttgcccggaggaatttactgtgtgtactgaatgcagctttttccacaccaggaagtcgctcctggcgttcatcgctttccttttcttcgcatctattatctccctctcactgatcttctactacagcaagaaaggtaggcgcagctacaag

SEQ ID NO: 149704 - DNA, 3036 bp, Artificial Sequence
  derived and/or modified sequence
atgcccgcatcagctccaccccgacggccccgtcctcctccaccaagcttgtcactcctgctcgtgttattggggttgggcggacggcggcttagggctgagcccggtgatggggcccaaacatgggcaagattctcacgccctcccgctcccgaagccgcgggtctgttccagggaacctttcccgatggcttcttgtgggctgtgggctccgccgcctaccagacggagggaggctggcagcagcatggtaagggcgcatctatatgggacacattcactcatcatcccttagcaccccccggggatagcagaaatgccagccttccgcttggagcaccgagtccacttcagccagccactggagatgttgcatcggacagctacaataatgtgttcagggatacagaggccctccgcgaattaggcgtgactcactatcgcttttccatttcatgggccagggttttgcccaacggcagtgccggagtacccaacagggaggggcttcgctactacagaaggttgctcgaacggctgagggaattgggcgtgcagccggttgtgacactctatcactgggatctgcctcagaggctccaggatgcctacgggggctgggcaaatcgggctctcgcagaccattttagagattacgcagagctgtgttttagacacttcggtggacaagtgaagtactggataactattgataacccctatgtcgttgcctggcatgggtacgccacaggccgactcgctcccggcattcgcggctccccacgccttggctatcttgtggcacataacttgctgctagcacacgccaaagtgtggcacctctacaacacctctttcagaccgacacagggcgggcaggtctccatagcactatctagtcattggattaacccccgacgcatgacagaccactccataaaggagtgccagaagtcactagacttcgtcctgggttggttcgctaaacccgtcttcatcgacggcgactatcctgagtcaatgaagaataacctgagttctatcctacctgattttactgagtctgaaaaaaagtttatcaagggtaccgcagattttttcgctctctgctttgggcctaccttgtcgttccagctgctggatccccacatgaagttccgtcagctagagtcgcccaaccttcgtcagctgctgagctggattgatttggagtttaatcacccccagatcttcattgtggaaaatggatggtttgtgagcggtacaacaaaacgggatgatgccaagtatatgtattacctgaaaaaatttataatggagaccctcaaggctatcaagttagacggggtcgacgtgatcggatacaccgcgtggtccctaatggacggtttcgaatggcacagaggctatagtattaggagaggacttttttacgtggactttcttagccaggataaaatgctcttgcccaaatctagtgctttgttttatcagaagttaatcgagaagaacgggttcccaccactccccgaaaaccaacctctggagggcaccttcccatgcgacttcgcatggggagtggtcgataactatatccaggttgacactacactcagccagtttacagatttgaacgtttatctgtgggatgtacaccatagtaaaagactgatcaaagtggacggcgtggtgaccaaaaaaaggaaatcttattgtgtggacttcgcagcaattcaaccacaaattgctctccttcaggaaatgcacgttactcacttccgattttcactggactgggcactgatcctcccactggggaaccagtcccaggtgaaccacaccatccttcagtactaccgatgtatggcgagcgagttggttagggtgaatatcacccccgttgtggctttatggcagcctatggcccctaaccaaggcctgcctagactcctcgctcgccaaggcgcttgggaaaacccttacaccgcattggcctttgccgagtacgctcggctgtgcttccaagagctgggacaccacgtgaagctctggataacaatgaatgaaccttatacacgaaacatgacatatagcgccggccataatttgttgaaagcccacgccctggcgtggcacgtctataacgagaaattccggcacgcacagaatggtaagattagcatcgcactgcaggccgattggatcgagccagcttgtcccttcagtcagaaggacaaggaggtggcagagagggttctggaatttgacatagggtggcttgctgaaccgattttcggatcaggggactacccatgggtgatgagagactggctgaatcagcgcaataactttttgctcccctacttcacagaagatgaaaagaagctgatccaaggaacgtttgattttttggcactgagtcattacacgacgatcctagtcgactcagagaaggaagatcctataaagtataacgactacttggaagtacaggagatgacagatatcacatggttaaactcccccagccaagtcgctgtggttccttgggggttgcggaaagtgctcaactggctgaaattcaaatatggcgacttgcccatgtacattatcagtaatgggatcgacgacggcctccacgcagaggatgaccagcttcgggtctactacatgcaaaactatattaatgaagctctcaaggctcacattctcgacggtattaacctttgtggatattttgcctactccttcaatgataggacagctcccaggttcggtttgtatcgatacgcagcggaccagttcgagccaaaagcaagtatgaaacattatcggaagattatcgactccaatggcttcccgggccccgagaccttggaacgtttctgccccgaggagttcactgtgtgtacagagtgttctttttttcacacacgcaagtcgctgctcgcattcattgccttccttttcttcgcctcaataataagcttgagtctgatcttctattattcaaagaaaggacgtcgctcttacaaa

SEQ ID NO: 149705 - DNA, 3036 bp, Artificial Sequence
  derived and/or modified sequence
atgccagccagcgcccccccgcggagacctcgcccccctcctccctccctgagtctactcttggtcctgttaggtttgggaggccggcgactgcgagcagagccaggcgatggtgctcagacctgggcacgctttagcaggccccccgccccagaggccgccggcttgttccaggggacctttccggatggttttctttgggctgtgggttcggccgcctatcaaacagaaggcgggtggcagcaacatggaaagggcgcatccatttgggatacatttacccaccatcccttagccccacccggcgattccagaaatgcaagccttcctctgggcgcgccgtcacctctgcagcctgcaaccggcgatgtcgctagcgattcttataataatgtgttccgagataccgaggccctaagggaactcggcgtgacacattatcgattcagtatttcatgggccagagtcctcccaaatgggagcgcaggtgtgccgaatcgagagggactgcggtactatcgaagactattagagaggctacgggaactgggcgttcagcccgtggttacgctgtatcactgggatttgccacagagactgcaggatgcctacgggggttgggctaatcgagcgctggccgaccatttccgggattacgctgagctctgctttagacactttgggggacaagttaaatactggattacaatcgacaacccttacgtcgtagcttggcatggatatgccaccggaagactggccccaggaatcaggggatcccccagactaggctacctggtggcccacaacttgttactggcgcatgccaaagtgtggcatctttataacacaagcttccgtcctacacaggggggacaggtctcaattgctctgagctcccactggatcaacccccgccgcatgaccgaccatagcataaaagagtgccaaaagtccctggatttcgtactgggatggtttgccaagccagtattcattgatggcgattatccggaatcgatgaaaaacaacctgagttcaattctgcctgatttcaccgaatccgaaaagaagttcatcaagggcacagcagacttttttgcactgtgcttcggccctacactgtctttccagctcttagacccacatatgaagttcaggcagcttgagtcacctaacttgcggcagttactttcctggatcgaccttgaattcaatcacccccagatttttatagtcgaaaatgggtggtttgttagcggtaccaccaagagggacgacgcaaaatacatgtactacctcaaaaagttcatcatggaaacactgaaagccataaaactggacggagtagacgtaataggatacaccgcttggtctctcatggacgggttcgagtggcacaggggctattcaattcgtaggggactattttacgtcgacttcttaagtcaggataaaatgctactgcccaagtcatcagcgctgttctaccaaaaactcattgagaagaatggatttccaccgctgccggaaaaccagcctttggagggaactttcccttgcgactttgcctggggcgtggtcgataactatatacaagtggacacgacactctcccagttcacagacctcaatgtttatctatgggacgttcaccacagcaagagattaataaaggtggatggcgtggttactaagaaacgcaagtcctattgcgtggacttcgcggcgattcagccacagatcgccctacttcaggagatgcatgtgacccactttcgattttcactggactgggcgcttatcctccctctgggcaatcagagccaggtcaatcataccattcttcagtattatcggtgtatggcctccgagcttgtcagagtgaatatcacgcccgtcgtggcgctctggcagccaatggcgccaaatcaggggctacctcgccttctcgctagacagggtgcatgggaaaatccatatacagcgttggccttcgctgaatacgcacgtctatgcttccaagagctggggcatcatgtgaagctatggatcacaatgaacgagccatataccaggaatatgacttacagtgccgggcacaatctccttaaggcccatgctttagcctggcacgtgtacaatgaaaaatttcggcacgcccaaaatggcaagatctccatcgcactccaggccgactggatcgagcctgcgtgccccttttcacagaaggacaaggaagtcgctgagagggtgctcgagtttgacataggctggctggccgaacccatattcggatccggcgattatccatgggtgatgcgagactggctgaatcaaaggaacaattttttattgccctacttcaccgaggacgaaaaaaaactgattcaggggacgttcgactttcttgcactgtcacattatacgaccatcctggtggactccgagaaggaggatccaatcaaatacaacgactacctagaggtccaggaaatgactgacattacctggcttaattccccaagtcaggtcgcggtggtgccttggggactgcgcaaagtgctgaattggttgaaattcaaatacggcgacctgccaatgtacatcatctcaaacggcattgacgacggcctgcatgctgaggatgaccaactgagagtgtattacatgcaaaactatattaatgaggcactcaaagcccacatcctggacggcattaacctgtgcggctacttcgcatacagttttaatgaccgaactgcacctcggttcggcctgtaccgctatgccgccgaccagttcgagcccaaggcttccatgaagcattataggaaaattatcgacagtaacggtttccctggccccgagaccctggagcgtttctgtccagaggagtttaccgtgtgcaccgagtgttcatttttccatacccgcaaatccttactcgccttcatcgcgttcctcttctttgcttctataatctctttgtcacttatcttctattatagtaagaaaggccgccggtcatataaa

SEQ ID NO: 149706 - DNA, 3036 bp, Artificial Sequence
  derived and/or modified sequence
atgcctgcgtccgcgccaccgcgcaggcctcgcccgccgcccccttccctgtccctgctattggtgttactgggcctaggcgggaggcggctgagggctgagcctggtgacggggcccagacatgggccaggttcagcaggcccccagctcccgaggcggctgggctttttcaaggtacctttcctgatggattcttgtgggcggtcgggagtgcagcctaccagactgagggcggctggcagcagcacggaaaaggcgccagcatctgggacacattcacgcaccatcctctagcgccccccggtgactcaagaaacgcgagcctgcctttgggcgcccccagccctttacagccagcaaccggcgatgtggccagtgacagttacaacaacgtattccgggatacggaagcccttcgtgaactgggcgtgacccattatcgctttagtatcagttgggcacgggtactgcctaatggctctgctggcgttccaaatcgggagggccttaggtactatcggaggctcctggaacgactccgggaactcggcgtgcagccggtggtgactctataccactgggatctcccccagaggctgcaagatgcttacggagggtgggcgaacagggccctggccgatcactttcgagattatgccgaactgtgtttccgccacttcggggggcaagtgaaatactggatcaccattgataacccttacgtcgtggcttggcacggctatgcaacgggcaggttggcccccggaattcggggatctccccgcctgggctatttggtggcacacaacctgctcttggctcatgcaaaggtgtggcatctctataacacatccttcaggccaacccaggggggccaggtgagtatcgctttgtctagtcattggataaacccacgccgtatgactgatcacagcataaaagagtgccagaaaagccttgatttcgtgttaggttggttcgccaagcctgtgttcattgatggcgattatcctgaaagcatgaagaacaatttatcctcaatcctgcctgacttcaccgagagtgagaagaagttcatcaaaggcactgccgatttcttcgcactgtgtttcggacctaccttatcatttcaactcttggaccctcacatgaaattcaggcagctggagtcccccaacctgcggcaacttctaagctggattgacctcgaattcaatcatccccagattttcatagtcgagaatggatggttcgtgagcggcactactaagcgggacgacgctaagtatatgtactacctgaagaagttcataatggagaccctaaaagccataaagcttgatggcgtggacgtcatcggttacaccgcctggtctcttatggacggattcgaatggcatagaggttacagcatcagaaggggcctattctacgtagactttctgtcccaggacaaaatgctgctccctaagtccagcgcgttattctaccagaagttaattgaaaagaatgggttcccacctttgcctgaaaaccagcctctggagggaacttttccatgtgactttgcttggggagtggtggacaactacatacaggtggatacgactctgtctcaatttaccgatcttaatgtgtatttgtgggacgtgcaccatagtaaaagattaataaaggttgatggggtcgtaactaagaagcgcaaatcatattgtgtggacttcgccgccatccaaccacagattgccctcctacaagagatgcatgtgacccacttcaggtttagtctggactgggcgctgatactccctctcggcaatcaaagccaggtgaatcatacaatcctgcagtactatcgctgcatggcaagcgagctggtaagggtgaatatcacccctgttgtggcgctctggcagcccatggctccaaaccagggactcccccgattgctcgctcgacagggagcatgggaaaacccctatactgctctagcattcgccgaatacgcgaggttgtgtttccaggagctgggacatcacgtgaagctgtggatcacaatgaatgaaccctacacccggaatatgacatattcagccgggcacaatctcttgaaagctcatgccctggcatggcatgtatacaacgagaagtttcggcatgcccagaatggtaaaattagtatcgcgctgcaagccgactggattgagcccgcctgcccattcagtcaaaaggacaaagaagtggcggaaagagtgcttgaattcgacattggatggttggcggagcccatcttcggtagtggagactatccttgggtaatgagagactggcttaatcagcgaaataactttctcctgccatacttcactgaggacgaaaaaaaactgatccagggaacatttgactttcttgcactgagccattacactaccatattagtcgactccgagaaagaggaccccattaaatataacgattatctcgaagttcaggagatgaccgatatcacctggctgaactccccgtctcaggtggcagtggtgccttggggtctccgaaaggtcctaaattggctgaagttcaagtacggggacttacccatgtatatcataagtaatggaatcgatgatggactgcacgcagaagacgatcaacttcgggtatactatatgcagaactacatcaatgaggctctcaaagcacatattttagatggtattaacctgtgtggctacttcgcttattcctttaacgacaggacagccccccggttcgggttgtataggtacgccgcggatcagttcgagcccaaagctagtatgaagcactatagaaagataatcgacagcaatggctttcctggtcctgagacgctggagcgattttgtccagaggaattcacagtttgcactgaatgtagcttttttcatactcggaaatcgcttctagcgttcatcgcgttcctcttcttcgcaagcattatttctttgtctttgatcttctactatagcaagaagggtaggcgcagctacaaa

SEQ ID NO: 149707 - DNA, 3036 bp, Artificial Sequence
  derived and/or modified sequence
atgcccgcgtctgctcccccgagacgtcccaggcctcctccacctagtttgagtctgcttctggtccttctgggccttggtggtcgaaggctgagggctgaaccaggtgacggagctcagacgtgggcccgattttccaggcctccggcgcccgaagcagctggactctttcagggcacttttcccgacggatttctgtgggccgtgggctctgccgcataccaaactgaaggtggctggcagcagcacggcaaaggtgcttccatctgggatacgtttactcaccatccactggccccccccggtgactcacggaacgcttccttaccattgggggctccctcacccttgcagcctgcaacaggagatgtggcgtcggatagttacaacaacgtgttcagagacacggaggccctgcgggagcttggcgttacgcactatcgtttcagcatctcttgggcaagggtgctgcccaacggcagcgcgggcgtacccaatcgtgaaggtcttcgttattaccgtcgcctcctcgagcggttgagggagcttggtgtgcagcccgtggttacactttatcactgggacctccctcaacggctgcaggacgcttacggaggatgggctaaccgagccttagccgatcacttccgggactacgcagagctgtgctttcgccatttcggaggacaagtgaaatattggatcaccatagacaacccgtacgtggtagcatggcacgggtacgccactgggcggttggctccggggatccggggaagtcctagactagggtacctggtggcgcataacttgctgttggcacatgcgaaagtctggcacctgtacaacaccagctttcgccccactcaagggggccaggtttccatcgctctgtccagccactggattaacccgaggcgcatgacagaccactcaattaaagagtgccaaaagtcattagactttgtactcggatggttcgctaagcccgtgtttatagacggggactaccccgagagcatgaagaataatttaagcagtatcctacctgactttacagagagcgagaaaaaatttataaagggaacagccgactttttcgccctgtgcttcgggcctactctaagctttcagctgctcgatccacatatgaagtttaggcagctggagtcacccaatctgagacagctgctgtcctggattgatttggagtttaaccacccccaaatctttatcgtggaaaatggttggttcgtgagtggcactaccaaacgagacgatgctaagtacatgtattatctaaagaaatttatcatggagactttgaaggcaatcaagctcgacggcgtggatgtcattggctacaccgcctggagtctgatggacgggtttgaatggcataggggttacagcattcgcagaggcttgttttatgtggatttcctgtcacaggacaaaatgctcttgcccaagagctctgcactgttttaccaaaaactgatcgagaaaaacgggtttccccccttacccgagaatcagccactcgaaggaacatttccttgtgacttcgcctggggcgtggtcgataactacatacaagtggatactactctctcacagttcaccgatctgaacgtttatctgtgggatgttcatcattccaagagactaatcaaagtagatggcgtggtgacaaagaaacgcaagagctattgcgtcgatttcgcggccattcagccccagatcgccctgctccaggaaatgcacgttacccactttcgcttctcccttgattgggctctgatacttccccttggaaaccaatctcaggtgaaccacactatcctgcagtactacagatgtatggccagcgagctggtgcgtgtaaacattacacccgttgtggccctatggcagcctatggcccctaaccagggactgccacgcctgctggccaggcagggggcgtgggagaatccatataccgcattagctttcgccgaatatgctaggctgtgcttccaggagctgggacatcacgtcaagctctggataacaatgaatgagccgtacacccgaaacatgacctatagcgcaggccacaacctgctgaaagcacacgcgctcgcctggcatgtgtacaatgagaagtttcgccatgcccagaatgggaagattagtattgccctgcaagccgattggatagagccagcgtgccccttctctcaaaaggacaaagaggtggctgagcgcgtgcttgagttcgatatcggttggctcgccgagcctatattcgggtcaggggactatccatgggtgatgcgtgattggttgaatcagcggaacaactttttacttccttactttacagaggacgagaaaaagctgattcagggtacctttgacttccttgcattgtctcattacacgactatccttgtggattccgagaaagaggatccgatcaaatataatgattacctggaggtccaggagatgacagacataacatggctgaattcccccagccaggtggccgttgtgccctgggggctaaggaaagtgctgaactggttgaaattcaaatacggtgacctgccaatgtatataatctccaatggtattgacgacggcctccatgccgaggatgaccagctgcgggtgtactacatgcagaattacataaatgaagcgctcaaggctcatatcctggatggaataaacctctgcgggtactttgcttactccttcaatgatagaaccgcacctcggttcgggctctatcggtatgcagctgaccagttcgagcccaaagcaagcatgaagcactatcgcaagatcatcgatagcaatgggtttccgggtccagagactttggagcggttttgtccggaggaatttaccgtgtgtaccgagtgctcctttttccacacgcgcaagtctcttctggctttcatagcgttcttgtttttcgcgagcatcatttctctctcgcttattttctactattcgaagaagggccggaggagctacaaa

SEQ ID NO: 149708 - DNA, 3036 bp, Artificial Sequence
  derived and/or modified sequence
atgccagcctccgcgccccctcgccgaccacgacctccgccgccctccctgtctttattgctcgtcttactgggacttggtgggagacgactgcgagcggagcccggtgatggagcccagacttgggcccgattcagccgcccccccgctcccgaagcagccggcctgttccaaggcactttccccgacggattcctgtgggccgttggttcggcagcttatcagactgagggtggatggcagcaacatgggaagggggcttcaatttgggacacattcacccatcatcctctcgcgccaccaggtgatagcagaaacgccagtttgccgttgggggctccatctccgctgcaaccagcgactggcgatgttgcgagcgactcgtacaacaatgtattcagggacaccgaggcacttcgcgagctaggtgtcactcactatcgattctcaatctcatgggctagggtactgcctaacggcagcgccggggtgcccaacagggaaggcctccgatactacagacgtctgcttgaaaggctacgtgaactgggcgtgcagccagttgtgacattgtaccactgggatcttccgcagaggctgcaagatgcgtatggtggctgggccaatcgggctttagccgatcacttccgagattacgcagaattgtgtttccgacactttggtggtcaggtcaagtattggattactatcgacaatccctatgttgttgcgtggcatggatacgccaccgggcgtttggcacctgggatccggggcagtccgcggcttggctacctggtggcgcacaatttgttgttggcacacgcaaaggtttggcacctgtacaacacgtcatttcgaccaacacaggggggtcaggtatccattgccttgtcaagccattggattaatccacgccggatgacggatcattccataaaggaatgtcagaagagcttggattttgttctcggctggttcgccaagcccgttttcatagacggtgattaccccgagtccatgaagaataacctatcaagcatactccctgatttcactgaatcggaaaagaagttcatcaagggcacggcggatttctttgcgctttgtttcggaccgaccttatcatttcaactgctggatcctcacatgaaattcagacagctggagtctcccaatctccggcaactcctttcctggattgacctagagtttaaccatcctcaaatctttatcgtggaaaacggctggttcgtgtctggaaccaccaaacgggatgatgctaaatacatgtactacctgaagaaattcatcatggagacgctgaaggccatcaagcttgatggcgtcgatgtgatcggctatacagcttggtctctcatggatggctttgagtggcatcgcggctattcaattcgtcggggtcttttctacgtggactttctttcacaagacaaaatgctgcttcctaaatcctctgccttgttttatcaaaaactgatcgagaagaacggctttccaccccttcccgaaaatcaacctctcgaaggaacgtttccatgcgacttcgcatggggggtcgttgacaattatattcaagtcgacaccacactctcgcaattcaccgatctcaatgtttatctttgggatgtccatcactctaagcggctcatcaaagttgacggagtggttaccaagaaacgcaagagttactgtgttgatttcgctgccatccaaccgcagatcgcactcttacaggaaatgcacgtcactcactttagattcagcttggattgggcattgattttgccgcttgggaatcagtcccaggtcaaccataccattcttcaatattaccgttgcatggcgtccgaattggtccgggtgaacatcactccggtggtcgctctgtggcagcccatggcgcccaatcaaggcctcccaagactactagcccgacaaggcgcctgggagaacccgtacacggctcttgccttcgctgagtacgccaggttgtgcttccaggaactcggacatcacgtgaaactgtggattactatgaatgagccttacacccggaacatgacgtattctgccggccataatctgctcaaagcccatgctctggcgtggcatgtctacaacgaaaagttccgccatgcacaaaatggaaagatctccattgctctgcaggctgattggattgaacccgcatgcccatttagtcagaaagataaggaggttgcggaaagggtcctggaattcgatattggttggttggcagagccgatcttcggttccggagattatccgtgggtgatgcgggattggctgaaccaacgtaacaatttcctgttaccatatttcacggaagatgaaaagaagctaattcaaggcacgtttgattttcttgcgttgtcacactatacaaccattctggtggattcagaaaaggaagaccctatcaagtacaacgactatctggaggttcaagagatgaccgatattacgtggttgaatagtccaagccaagtcgcagttgtgccttgggggctccgaaaggtccttaattggctcaaattcaagtatggggatctgcctatgtacattatttcgaacggtattgatgacggtctgcatgccgaagatgaccagcttcgggtctactacatgcagaactatataaatgaggcccttaaagcacatatcttagatggcataaacctttgcggatacttcgcctatagctttaacgaccgaaccgctccacggttcgggctgtacaggtacgccgcagaccaatttgaacctaaggcttccatgaagcactataggaagatcatcgattctaacggctttccgggacctgaaaccctcgagaggttctgccccgaggaattcaccgtgtgcaccgagtgttccttctttcatactaggaagtcccttctcgcattcatcgcttttctttttttcgcgagtatcatctccctgtcactgatcttctactactcgaaaaaggggcgccgcagctataag

SEQ ID NO: 149709 - DNA, 3036 bp, Artificial Sequence
  derived and/or modified sequence
atgccggcctcggcgccgccaagacgcccgcgccctccgccgccttcactttccctgctcttggtgctgttgggactgggaggccggcgattgcgcgccgaaccgggagacggtgcacagacctgggctcgcttcagcagacctcccgccccggaagcagcaggactctttcaaggaactttccccgacggctttctgtgggctgtgggatcggccgcgtaccagaccgagggcggctggcaacagcacgggaaaggagcctcaatctgggacacctttacccatcatcccctggcgccaccgggtgatagccgcaacgcgtcgctgccactcggagccccctcgccactgcagcctgccactggagatgtagcaagtgattcctacaacaacgtgttccgagacaccgaggctctccgcgagctgggcgtcactcattatagattctccatctcgtgggcccgtgttctcccgaacggctcggccggtgtgccaaacagagaaggactgagatactaccggagactcctggaaaggctgcgggagctgggagtgcagccagtggtgaccctctaccactgggatcttccccagcggctccaggacgcatacggtggatgggcgaaccgcgccctggcagaccacttcagggactacgctgaattgtgcttccggcatttcggagggcaagtgaagtattggatcaccattgacaatccctacgtggtcgcttggcacgggtacgcaaccggacggctggcgccggggatccgtggctcaccaaggcttgggtacctggtcgcccacaatctgctgctcgcccacgccaaggtctggcatctttacaacacctcctttcggccgacccagggtggacaggtgtctatcgctctctcgtcgcactggatcaaccctcggcgcatgacggatcattcaatcaaggagtgccagaagtcccttgatttcgtgctgggatggttcgccaaacctgtgttcatcgacggtgattacccagaatcgatgaagaataacctgtcctcgatcctgccagacttcacggagtcggagaagaagtttattaaggggaccgcagacttttttgccttgtgcttcggacccactctcagcttccaactcctggacccgcacatgaagttccgccaactggaaagcccgaacctccggcagctgttgtcctggatcgatctcgaattcaatcatccgcaaatcttcatcgtggaaaacggttggttcgtgtcaggtactactaaacgcgacgatgccaaatacatgtactatctgaaaaagttcatcatggaaactctcaaggcaatcaagctggacggcgtcgacgtgatcgggtacactgcgtggagccttatggacggattcgagtggcatagaggctatagcatccgcaggggtctgttctacgtcgactttctgtcccaggacaagatgctgctccctaaaagctcagcactcttttaccaaaaactcatcgagaagaatggcttcccgccgcttcctgagaatcagccactcgagggaaccttcccgtgcgattttgcttggggagtcgtcgacaattacatacaagtggacactactctctcccaatttaccgaccttaatgtgtacttgtgggatgtgcatcacagcaagcggctgatcaaggtcgacggcgttgtgactaagaagagaaagtcctactgtgtggatttcgccgccatccaaccgcagatcgcgctgctgcaagagatgcatgtgacccacttccggttctcgctggattgggcgctcatcttgcctctcggaaaccagagccaggtcaatcacactatcctgcaatactacaggtgcatggcctccgagttggtgcgggtcaacatcacgccagtggtcgcactctggcagccaatggccccgaatcagggcctgccgcgcctgctggctagacagggcgcctgggagaatccatacactgctctggcttttgccgagtacgcccgcctctgtttccaggaactgggccaccacgtgaaactgtggattactatgaacgaaccttacaccagaaacatgacgtacagcgctgggcacaacctgctgaaggcccacgcccttgcatggcacgtctacaatgagaagttccggcatgcccagaacgggaaaatctctattgcgctgcaagcggactggatcgaaccagcgtgccccttcagccaaaaagataaggaagttgccgaacgagttctggaattcgatatcggatggctcgcggaaccaatcttcggcagcggagactacccttgggtgatgagagactggctgaatcagagaaacaacttcctgctgccgtacttcactgaggacgagaaaaaacttattcagggaacgtttgactttctcgccttgtcccattacaccaccatcctcgtggattcagaaaaggaggacccgatcaagtacaacgactacctggaagtgcaagaaatgactgatatcacctggctcaatagcccttcacaggtggcagtcgtcccgtggggactgcgcaaagtgctgaactggctcaaattcaagtacggagatctgccgatgtacataatctcgaacggaattgacgacggactgcacgcggaagatgaccagctccgggtgtattacatgcagaactacatcaatgaggccctgaaggcacatatcttggatggcattaacctttgtggatacttcgcgtactcattcaacgatcgcaccgcgccgcggttcggactctacaggtacgctgctgaccagttcgaacccaaggcctccatgaagcactaccgcaaaattatcgattccaacgggttcccgggaccggaaactctggagcgcttctgcccagaagaattcaccgtgtgcaccgaatgctcattcttccacactcggaagtcgctgctggcatttatcgcgtttttgttcttcgcgtccattatctccctttcgctgatcttttactactcaaagaagggacgcaggtcgtataag

SEQ ID NO: 149710 - DNA, 3036 bp, Artificial Sequence
  derived and/or modified sequence
atgccggcttccgcaccaccgcggcggccgcggcctcccccgccatcactgtcgcttcttctggtgctgctggggcttggaggacggagactgcgggctgagccaggcgacggagcacaaacctgggcgagattttccagacccccagctccggaggctgccgggctgtttcaggggactttccccgacggcttcctctgggctgtggggagcgcggcgtaccagacggaaggaggatggcagcagcatggaaaaggcgcgtccatctgggacaccttcacccaccaccccctcgccccgccgggagattcccgcaacgccagcctgccactcggggcgccgtcaccgctgcagcctgcaaccggagatgttgccagcgattcatacaacaatgtgttccgggacactgaagcactgagagaacttggcgtgacgcactatcgattctccatctcttgggcccgcgtgctcccgaacgggtcggcgggcgtgccaaaccgggaaggcctgcgctactacaggaggctgttggaacggctcagggagctgggtgtgcagccggttgtcacgctgtaccactgggacctgcctcaacgccttcaagatgcatacggaggctgggctaatcgggccctggccgaccatttccgagactatgctgaactttgtttccgccacttcggaggtcaagttaagtactggattaccattgacaacccgtatgtcgtggcctggcacggatacgccaccggacgtctggctccaggcatccgaggaagcccaagactgggatacctggtggcgcacaacttgctcctggcgcacgcgaaggtctggcacctgtacaatacttcgttccgccctactcagggtggccaggtgtcgattgctctctcctcccattggatcaaccctcgccgcatgactgaccattccatcaaggaatgccaaaagtccctcgatttcgtgctgggatggttcgccaaacccgtgttcatcgatggagattacccggaatcgatgaagaataacctttcttccattctcccggactttactgagagcgaaaagaaattcataaagggtaccgcggatttcttcgccctgtgtttcgggcccactctctcctttcagctgctggatcctcacatgaaattccggcagctcgagtcacctaatttgcgccaactgctgagctggatcgacttggagtttaaccacccccagatcttcatcgtcgaaaacggctggtttgtttcaggtactacgaagagggacgatgcaaaatacatgtactaccttaagaaattcatcatggaaaccctcaaggcaatcaagctggacggtgtggacgtcatcggatatactgcctggtcgcttatggatggcttcgagtggcatcgcggatactcaatccggcggggactgttttacgtcgacttcctgtcgcaggacaagatgctcttgcctaagtcctccgccttgttctaccaaaagctgatcgagaagaatgggttcccgccactcccggagaaccagccactcgaaggaactttcccgtgcgacttcgcttggggagtggttgataactacatacaagtggacaccactttgagccaattcaccgacctgaatgtgtacctctgggacgtgcaccatagcaagagactgatcaaggtggacggcgtcgtgaccaagaaacgcaagtcgtactgcgtcgacttcgctgccattcaaccccaaatcgcactcctccaagagatgcacgtgacccatttcaggttctccctggactgggcgcttattctgccgttggggaaccaaagccaagttaaccatactatcctccagtattacaggtgcatggcgtcggagctggtccgggtgaacatcactcctgtcgtggccctgtggcagccaatggccccgaaccagggactgcctaggcttctggctagacagggcgcgtgggaaaatccatacaccgccctggcttttgcggagtacgcgcgtctttgctttcaagaactcggacaccacgtcaaactgtggataaccatgaacgaaccatacacccgaaacatgacctactcagccggacacaacctcctcaaggcacacgcgcttgcatggcacgtctacaatgagaaatttcgccatgcccaaaatggaaagatttctatcgcgttgcaggcagattggattgaacccgcttgtcccttttctcagaaagacaaggaggtggcggagcgagtgctggaattcgatattggctggctggcggagcccatcttcggtagcggtgactacccttgggtgatgcgcgactggctgaatcagcgcaataacttcctgctgccttacttcaccgaagatgaaaagaaactgatccagggtacttttgacttccttgccctcagccattacacgactatcctcgtggactccgagaaagaagatccgatcaagtacaatgattatcttgaagtccaggaaatgaccgatatcacctggctcaattcaccgtcgcaggtggccgtggtgccttggggactgcggaaagtgctgaactggctcaagttcaagtacggggatctgccgatgtacattatcagcaacggaatcgacgatgggctgcatgcagaggacgatcagctgcgggtttactacatgcagaactacatcaatgaggcgctgaaggcccacatcctggacggtatcaacctctgcggctacttcgcatactcgtttaatgaccgcaccgcaccacggtttgggctctacagatacgcagccgatcaattcgagcctaaggccagcatgaaacattacagaaagatcatcgattcgaacgggtttcctggcccggaaaccttggaaaggttttgcccggaggaattcactgtctgcacggaatgctcattcttccatacccgaaagtccctgttggcattcatcgcgttcctcttttttgccagcatcatctctttgtcactgattttctactactcaaaaaagggccggcggtcgtacaag

SEQ ID NO: 149711 - DNA, 3036 bp, Artificial Sequence
  derived and/or modified sequence
atgcccgcatccgcaccccccagacggcccagaccaccacctccaagtctttctcttctgctggtcctgcttggcctcggagggcgcagacttcgcgcagagcctggggatggggcacagacttgggctagattctctcgaccaccggctcccgaggctgccgggctgttccagggtacgttccccgatggcttcctgtgggccgtaggatcagcggcctatcagacagagggggggtggcagcagcacggcaagggagcctccatatgggataccttcacacaccaccccctggctccgcccggggattcacgaaatgcttcgctacctttgggcgccccctcgccactgcagcctgccaccggcgatgtggcttcagattcctataacaatgtgttcagagataccgaggccctgcgggagctcggagtcacccactaccgcttttccatcagttgggccagagttctgcctaatgggagcgcaggcgtgccgaatagagaaggcttgaggtattaccgtcggctgctcgagcgcctccgcgagctgggagtgcagccagttgtgaccctctaccattgggatctgcctcagcgcctgcaggatgcttacggcgggtgggcgaacagggccttggccgatcacttccgcgactacgctgagctgtgttttagacacttcggcggccaagtgaagtactggatcacaatcgataacccatacgtagtagcctggcatggttacgcaacgggtaggctggcacccggaatccgcggcagtcctcgcctggggtacctggtggcccacaaccttctcttagcccacgccaaagtctggcatctgtataacaccagcttccggcctacacaggggggccaggtgtccattgctctgagtagtcactggataaaccctagacggatgaccgatcactctattaaagagtgtcaaaaatctttagatttcgtgctaggatggttcgcaaagccggtctttatcgatggggattatcctgaaagtatgaagaataatctgagctcaatcctgcctgactttacggagagcgagaagaagttcatcaagggcactgctgacttcttcgctctgtgtttcggcccgaccttatcatttcagcttttagatcctcacatgaagttcagacaattggagtcacccaatctccgacagcttttgagctggatcgatctggagttcaatcacccccagatcttcattgtagaaaatggctggtttgtgtctgggactactaagcgtgatgacgctaagtacatgtactacctcaaaaagttcatcatggagacgctcaaagccatcaagctggatggcgtagacgtgattggctacaccgcctggagcctcatggatggatttgaatggcatcggggctactctattcgcagaggactgttttacgtggatttccttagccaggataaaatgctactaccaaagtctagcgccttattctaccagaaactgatcgagaaaaacgggttcccgcccctgcccgagaaccagcccctggaaggaacatttccttgtgatttcgcgtggggagttgtggataactacattcaagttgatacaacactgtcgcaattcacggatctcaacgtgtacctatgggatgtgcaccacagtaagcgcctgattaaggtggatggcgtagtgactaaaaagagaaagtcttactgcgtggactttgccgcgattcaacctcagattgccttgctgcaggaaatgcacgtcacccattttcgctttagcttagattgggctctcatactgcctcttgggaaccagtcccaagtgaaccacacaatattacagtactataggtgcatggcgtctgaacttgtgagggtcaacatcacacccgtggtggccctgtggcaacctatggctcctaaccaggggctcccaaggctgctggcgcgccagggcgcttgggaaaatccatacaccgcccttgcctttgcagagtacgctagattgtgcttccaggaactgggtcaccacgtaaagctctggatcacaatgaacgagccttatactcgcaatatgacgtactctgctggacacaacctgttaaaggcacatgccctggcgtggcatgtgtacaacgagaagttccgacacgcccagaatggaaaaatttccatcgccctacaggctgactggatcgagcctgcatgtccttttagccagaaagataaggaggtggcggagagagtgttagagttcgacatcgggtggctcgcggagcctattttcgggagcggcgattacccatgggtcatgcgggattggttgaatcagcggaacaatttcctgctaccttacttcacagaagatgagaaaaagttaatccaaggtacatttgactttctggccctgagccactatactaccattcttgtggatagcgaaaaggaggacccaataaagtacaatgactatctcgaagttcaagagatgaccgacatcacttggctcaactctcctagccaggtggccgtggttccgtgggggttgcgcaaagtcctgaattggctcaagttcaaatacggagacctcccaatgtacattatttctaacgggatcgatgatggattgcacgccgaggacgaccagctgcgtgtatactacatgcagaactacatcaatgaggccctcaaggcacacatcctggatggcatcaacctgtgcggatattttgcttactcctttaacgaccgcacagccccaagatttgggctgtacagatatgctgcagatcaatttgaaccaaaggccagcatgaaacattatagaaaaatcattgattcaaatggatttcctggcccagagactctagagcgcttttgtccggaggaattcacagtgtgtaccgagtgttccttcttccacacccgaaaatctttattggcattcatagcttttctattcttcgcctcgatcatctcattgtcactgatcttttactactcaaagaagggtcgtaggtcctacaaa

SEQ ID NO: 149712 - DNA, 3036 bp, Artificial Sequence
  derived and/or modified sequence
atgccggcatcagcgccgccacgccgcccgcggcctcccccgccctcgctctccctcctgctcgtcctgctcggactgggagggcgcagattgcgcgcggaaccaggagacggagctcaaacttgggctcggttctcgcgcccaccagccccggaggcagctggacttttccagggtactttcccggacggtttcctgtgggccgtggggagcgccgcctaccaaactgaaggaggatggcaacagcacggaaaaggcgcgtcgatctgggatactttcacccatcaccccctggcaccaccaggcgactcccgaaatgctagcctgccgctgggtgcaccctcccctcttcaaccagctactggagacgtggcaagcgactcctacaacaacgtgttcagggacaccgaagccctgagagagctgggtgtgactcattaccgcttttctatctcatgggcgcgcgtcctgcctaatggctcagcaggagtacctaaccgggaaggactgcggtactaccgcaggctcctggaacgtctgcgggagctcggagtgcagccagtggtgactctgtaccactgggatctgccgcaacggctccaggatgcttacggaggatgggctaaccgggccctggcggatcacttccgcgactatgccgaactctgcttcaggcacttcgggggtcaggtgaagtactggatcacgatcgataacccgtacgtggtggcctggcatggttacgccaccgggcgcctcgcccctggaattcggggatcgccacggctgggttacctcgtggcccataacttgttgttggcgcatgcaaaggtgtggcatttgtacaacacgtccttccgcccaacccagggaggacaagtatccatcgccctcagctcacattggatcaacccaagacgaatgactgaccattcgatcaaggagtgccaaaagagcttggactttgtgttgggatggtttgccaagccagtgttcatagacggcgactacccagaatctatgaaaaacaatctgtcatccatcttgccagacttcaccgagtctgaaaagaagtttatcaaaggaactgctgacttctttgcgttgtgttttggcccgactttgagcttccagctgcttgatcctcatatgaagttcagacagttggaatcacccaacctgagacagctgctcagctggattgacctggagtttaaccacccgcagatcttcatcgtggaaaatggatggttcgtgtcggggaccaccaagcgcgacgacgcaaagtatatgtattacctgaagaagttcatcatggagactctcaaagccatcaagctggatggcgtggacgtcatcggatataccgcgtggtcgctcatggatggattcgaatggcatagaggatactccatccggcgcggcctgttctacgtcgattttctgtcgcaagataagatgcttcttcctaaatcgagcgcactgttctaccaaaagctgatcgagaaaaacggattcccgccgctgcctgagaaccagccgctcgagggaaccttcccgtgcgattttgcctggggagtggtcgacaactatatccaagtcgacaccactctctcccagttcacggatttgaatgtttacctgtgggacgtgcaccacagcaagcgtctcatcaaggtcgacggtgtcgtcacgaagaaacgcaagtcatactgcgtggacttcgcggccatccaaccgcaaatcgccttgctgcaggaaatgcacgtcactcattttcggtttagcttggattgggccttgatcctgccgttggggaaccagtcacaggtgaaccacaccatcttgcagtattaccggtgtatggcctcagagctcgtcagagtgaacattaccccggttgtggccctctggcaaccgatggctcctaaccaaggcctgcctcggctcctcgctagacagggtgcctgggagaatccctacaccgctttggcattcgcagagtacgccagactctgtttccaggaattgggacaccacgtgaagctctggataactatgaacgagccttacactaggaacatgacctactcggcggggcataatctgcttaaggcccacgcgctggcgtggcacgtctacaatgaaaagttcagacacgcccagaatggcaagatctcgattgcactgcaggcggattggatcgaaccggcttgcccattctcccagaaggacaaggaagtggcggaacgagtgctggagtttgacatcggctggctcgccgaaccgatcttcggcagcggggactacccatgggttatgcgggattggcttaatcagcgcaacaacttccttctgccctacttcactgaggatgagaaaaaactcatccaggggaccttcgactttctggccttgtcccactacactaccatcttggtcgacagtgaaaaagaagatccgatcaagtacaatgactacttggaggtgcaggaaatgaccgacatcacctggcttaactcgccttcccaagtggctgtagtgccttggggcctgaggaaagtgctgaattggctcaagttcaagtacggagacttgccgatgtacatcatctcaaacggcattgacgatggactgcacgctgaagatgaccagctccgcgtctactacatgcagaactacattaatgaggcgttgaaggcccatatcctggacggaatcaatctgtgcggttacttcgcctactcatttaacgacaggacggcgcctagattcggactctaccgttacgcggccgatcaattcgaacccaaggcgtcaatgaaacactaccgcaaaatcatcgattcgaatggtttccccggcccggaaaccctggagcgcttttgcccggaagaattcaccgtgtgcaccgaatgttcgttcttccacacgcggaagagcctcctcgcgttcattgcattcctgtttttcgccagcatcatctcgctgtctctgatcttttactattccaagaaggggcgccgatcatacaaa

SEQ ID NO: 149713 - DNA, 3036 bp, Artificial Sequence
  derived and/or modified sequence
atgccagcgtccgcaccgccaagaaggccacgacctccacctccgtctctgtcactgctcctggtgctcctgggactggggggcaggaggctgagagcagaaccaggggacggcgcccaaacctgggccaggttctcccgacctcctgctccggaagctgccggcctctttcaggggacctttcccgatggtttcttgtgggcagtggggtcagcagcctaccagacagaaggggggtggcagcagcatggcaagggtgcttccatctgggacacttttacacatcatcctctcgcccctccgggggacagcaggaacgcctctctcccgctgggcgctccctctcctctgcagcccgcgacaggggacgtggcatccgactcttacaacaatgtgtttcgtgatacggaggctctgcgcgagctgggagtgactcactacaggttcagcatatcctgggcacgggttctacctaacggatctgccggtgttcccaatagagaggggcttaggtactatcggaggctcctggaacgcctaagggagcttggagtgcagcccgttgtaaccctgtatcattgggatctgccccaaaggctccaggatgcatatgggggctgggcgaatcgcgccctcgccgaccatttcagggactatgctgagctctgtttcagacattttggagggcaagtaaagtactggatcaccatcgataacccgtacgttgtggcatggcacggatatgccacgggacgactggcccctgggattcgcgggagccctaggctgggttatctggtcgcgcataaccttctgctggcccatgcaaaggtgtggcatctctacaacactagtttcaggccgacacagggggggcaggttagtatcgctctatcttcccactggattaatcctcgaagaatgacggatcactccattaaggaatgccaaaagtctctggacttcgtcctcgggtggtttgctaagcctgtctttatagatggcgattaccccgagagtatgaagaataatcttagttctatactgccggattttaccgaatcggagaaaaagttcatcaaaggaactgcagacttctttgccctgtgttttgggcccacgctgtcttttcagctgctggatccccatatgaaatttagacagctcgagagccctaatcttcggcagctgctctcttggatcgatctggagttcaatcatccacagatcttcatcgtggaaaatggctggtttgtctctggcaccaccaagcgcgacgacgctaaatacatgtactacctcaagaaatttattatggaaacactcaaggctattaagctcgatggagtcgacgtgatcgggtacacagcctggtccctgatggatggattcgaatggcatagagggtattcaattcggagaggcttgttttatgtcgacttcctgagccaagataagatgttacttcccaagtctagcgccctgttctaccaaaaactcatcgagaagaacggttttcctcctctgccagaaaatcagcccctggaaggaacatttccttgtgactttgcctggggagtggtagataattatatccaggtcgataccacactctcccagttcaccgacctcaacgtgtacctttgggacgtacatcactctaaaaggctcattaaggtagatggtgtggtgacgaagaaaagaaaaagctactgtgtcgattttgcagcaatccagccacagatagcacttctgcaagaaatgcacgtcactcactttcgattttctcttgactgggccctcattctgcccctgggcaatcagtcccaggtcaatcataccattctacagtactaccgatgcatggcatctgagctggtgcgcgttaacataacaccagtggtggcactgtggcagcctatggcaccaaatcaagggctgccacggctcttggccagacaaggcgcgtgggagaatccttatacagctcttgcctttgcggagtatgcgcgactgtgtttccaggaactaggacaccacgtgaaattgtggatcacaatgaacgaaccttataccagaaatatgacatacagcgccgggcacaatttgctgaaggcgcacgcactggcttggcacgtctataatgaaaagtttaggcacgcccaaaacggaaagataagtatcgctctccaggcagactggatagaacctgcttgcccattttcacagaaagacaaagaagtggccgaaagggttttggagttcgacataggctggctagccgagccaatctttggctcgggggattacccatgggtcatgcgtgattggcttaatcagcggaacaactttctgctgccttatttcacagaagatgaaaaaaagttaatccaaggaacgtttgattttttagcactctcccactatacaacgattcttgtggatagcgaaaaagaggatccaatcaaatataacgactacctggaggtgcaggaaatgacagatatcacttggctgaactcgccctcccaagtagccgtggttccatggggactgcgcaaagtgctgaactggctcaaattcaaatacggcgacttgccaatgtacattatatcaaatggcatcgacgacggactccatgcagaggacgaccagctgagagtgtattatatgcagaattacattaacgaggcactgaaggcacatatcctcgatggaatcaatctttgtggttactttgcgtacagcttcaacgacagaacagctcctaggtttggtctttaccgttatgccgccgatcagtttgaacctaaggcctccatgaaacattaccgaaagatcatcgattcgaatggattcccaggccccgaaacccttgagcggttctgtccggaagagttcacagtgtgcaccgagtgctccttcttccacaccaggaaaagcctgctagccttcattgcctttttattctttgcttcaataatatccctctcgttaatcttctattactctaagaagggcagaaggtcctacaag

SEQ ID NO: 149714 - DNA, 3036 bp, Artificial Sequence
  derived and/or modified sequence
atgccagcttcagctcctccaagacgaccaagacccccgccaccatctctatcactgttgttggtcttgctaggcttaggaggacgaagattacgtgccgaaccaggtgatggagcccagacatgggctagattttcacgccccccagcacccgaagcagctggactgtttcaaggaacgttccctgatggtttcctatgggctgttggttctgctgcatatcaaactgagggaggatggcaacaacacggaaaaggtgcatcaatttgggatacgtttactcatcatccactcgctccaccaggagattcccgtaatgcaagcttacccttgggtgccccttcgccactccagccagcaaccggggacgttgcttccgattcttataataatgtctttcgtgatacggaagcgcttagagaacttggagttactcattacagattcagcataagctgggctagagttttgccgaacggtagtgctggagtgcctaatcgggagggtctaagatactaccgcagacttcttgaacgtcttcgtgagctaggagtccaacctgtggttactctctaccattgggatttgccacaacgtttgcaagatgcctacggaggatgggccaatcgcgctcttgctgatcactttagagattatgccgagctgtgcttccgccactttggagggcaagtaaaatactggatcacaattgataatccatatgtagttgcatggcacggttacgccactggacgtcttgccccgggaatccggggcagtccgcgtctcggctaccttgttgcgcataacctgctgctcgcccatgcgaaggtttggcacctttataacacttcgtttcgtccaactcaggggggacaagtcagtattgccctcagcagtcattggatcaatccacggcgcatgacagaccatagtatcaaggagtgtcaaaaatcacttgactttgttttgggctggtttgcgaagcccgtatttattgatggcgattatccagagtccatgaagaataatctatctagcatcctcccagatttcactgaatctgaaaaaaaatttattaaaggaactgcagactttttcgccctttgttttggaccgactctatcttttcaactgcttgatccacatatgaaatttcgacaactcgaatctccgaacttgaggcagcttctatcttggattgatctggaattcaatcatccacaaattttcatcgtcgagaatggatggtttgtcagcgggacaacgaagcgggatgatgccaagtatatgtattacctaaagaagttcattatggagacactgaaggcgatcaaactggacggagtcgacgtgataggatacacagcttggtcactaatggatggatttgaatggcacagaggttacagtatcagacgtggtctcttctatgttgacttcctttcccaagataagatgttgttgccaaagtcaagtgctcttttttaccaaaagcttattgaaaaaaacggcttcccaccacttccagagaaccaaccactggaggggacattcccttgcgattttgcctggggagttgttgataactacattcaagttgatacgaccctatcacagttcactgatttgaatgtgtatctttgggatgtgcatcactccaaacggcttattaaagtagacggcgttgttaccaagaaacgaaagagctattgtgtagactttgcagccattcagccacagattgccctgctgcaagagatgcacgttacgcacttccgtttctcgctcgactgggctctaatcctccctcttggaaaccagtcacaagttaatcatacaattttgcagtactatcgctgtatggccagtgaactggttcgcgtgaacattactcccgtggttgcattatggcaaccgatggctccgaaccaaggattaccaagactacttgcgagacagggagcgtgggaaaatccgtataccgcactcgctttcgctgagtatgctagattgtgtttccaagagttaggacatcatgttaaattatggattacaatgaatgaaccgtatactaggaacatgacttattctgctggccacaaccttttgaaggctcatgctttggcttggcatgtttacaatgaaaagttccgccacgctcaaaatggcaaaatttcaattgccctccaagccgattggattgaaccagcctgtccatttagtcaaaaagacaaggaagtagctgagagagtccttgagttcgacattggatggctcgcggaacctatctttggtagcggagattatccatgggttatgagagactggttgaatcaacggaacaatttcctccttccatattttacagaagatgaaaaaaaattgattcaaggaaccttcgattttcttgcgttgtcacactatactacaatattagtcgattctgaaaaagaagaccctattaagtacaacgattaccttgaagtccaagagatgaccgacattacctggcttaactcgccatcccaagtggctgttgttccatggggacttcgaaaggtgttaaattggcttaagttcaaatatggagatcttccaatgtatatcatcagcaacggtatagatgacggactacatgcagaagatgaccaattgagggtctattacatgcaaaactatatcaatgaggcgttgaaggcacatattcttgacggtatcaacctctgcggatattttgcttacagttttaatgatagaacagcgccaagattcggactgtacagatacgcagctgatcaattcgaaccgaaagcttcgatgaaacattatagaaaaattattgattcgaatggatttccaggacctgaaacgttagaaagattctgcccagaagagtttacagtttgtacagagtgttccttttttcatacacgcaaaagtttgttggcttttatcgcatttctttttttcgcttcaataatatctctatcgctcattttttactattctaaaaagggtcgtaggtcttacaaa

SEQ ID NO: 149715 - DNA, 3036 bp, Artificial Sequence
  derived and/or modified sequence
atgccagcgtccgctccgcctcgcagaccgcggccgccgccgccttccctgtcgctgctgctcgtcctgctgggcctcggaggaagaaggctgcgggccgagcccggtgatggagcgcaaacttgggcacgcttttccaggccgccggccccggaggccgcaggcttgttccaaggaaccttcccggatggcttcctctgggccgtggggtccgctgcctaccaaactgaaggaggctggcagcagcatggaaagggtgctagcatctgggacaccttcacccaccatccgctcgctcccccgggtgactcaaggaacgcctcgctgccgctgggagcaccctcaccactgcaaccggccactggagacgttgcgtcggactcgtacaacaacgtgttccgggatacggaggcgctcagggagctcggagtgacccactaccggttctcgatctcctgggcacgggtgctcccgaacggatcagcgggggtgccaaacagagagggactcaggtactacagacgccttctcgaaaggctgcgcgaacttggtgtccaaccggtcgtgactctgtaccactgggatctgccgcaacgcctccaggatgcctatggggggtgggcgaatcgggccctggccgatcatttccgggactatgccgagctctgtttccgtcacttcggagggcaggtgaagtactggatcaccattgacaacccgtacgtggtggcatggcacggctacgccactggacgcctggcacctggcatccgcggctcgcccagattgggatacctcgtggcacacaatctcttgctggcgcatgccaaggtgtggcacctctacaatactagctttcggcctacccagggtggccaggtcagcatcgcgctgagctcacactggatcaatccgagacgcatgaccgatcactcaatcaaggaatgccagaagagcctggatttcgtcctgggatggttcgccaagcctgtgtttatcgacggagactatccggaatcaatgaagaacaacctgagtagcattcttccggattttactgaaagcgaaaagaagttcatcaaagggactgccgacttctttgccctgtgcttcggtcctactctgagctttcagctgctcgaccctcatatgaaattccgccagctcgaaagccctaacctgcggcagctgttgagctggatcgatctcgagtttaaccatcctcagatctttatcgtcgagaacggttggtttgtgtccggtactactaagcgggacgatgctaagtacatgtattacctgaagaagtttatcatggagactctcaaagccatcaaactcgatggcgtcgatgtcatcggatacacggcgtggagcttgatggacggattcgaatggcatagaggctacagcatcagaaggggtcttttctacgtggacttcctgtcccaagacaagatgctgctgccgaagtcctcagcgttgttctaccagaaactcatcgaaaagaacggattcccaccattgccggaaaaccaacctctggaaggtactttcccatgcgattttgcgtggggagtggtggacaattacattcaggtggatactaccctctcacagttcactgatctgaatgtgtacctctgggatgtgcaccacagcaaacggctgatcaaggttgatggagtggtgaccaagaaacggaaatcctactgcgtggattttgcagcgatccaacctcagatcgccctgctgcaagaaatgcacgtcactcatttccgcttcagcctggactgggcactgatcctgccactgggtaaccagtcgcaggtcaatcataccatcctccaatactaccggtgcatggcctcagagctggtgcgcgtgaacattaccccggtggtggccctctggcagccgatggcccctaaccagggtttgccgcggttgttggcacgccaaggggcctgggagaacccatataccgcccttgcgtttgccgaatacgctagactctgctttcaggaactcggacaccatgtgaaactgtggatcaccatgaacgaaccctacacccgcaatatgacttactcagccggacataacctcctcaaggcccacgccctggcctggcatgtgtacaacgagaaattccgtcacgcccaaaacggaaagattagcatcgccctgcaggcggactggatcgagcccgcttgccctttcagccaaaaagataaggaagtggctgagagggtcctcgaattcgacatcggatggctggctgagcctattttcggatcgggcgactacccgtgggtgatgcgcgattggctcaaccaacggaataacttcctcctgccatacttcaccgaagatgaaaagaagctgatccagggtactttcgactttctggcactgtcccactacactaccatcctggtggactccgagaaggaagatccaatcaagtacaatgactacctcgaagtccaggagatgaccgatatcacttggctgaactcaccgtcccaagtggccgtggtgccgtggggactccggaaggtgctcaactggttgaagttcaagtacggtgacctgccaatgtacatcatctccaatggaattgatgatggactccatgccgaggacgaccagctgcgcgtgtactacatgcaaaactacatcaatgaagccctgaaggcacacatattggatggaatcaacttgtgcggatacttcgcatactcgttcaatgaccggactgcgccgcgctttggcctgtacagatacgctgcggaccaatttgaaccaaaggcctcgatgaaacactaccgcaagattatcgacagcaatggattcccaggcccagagactttggaacgcttctgcccggaggaattcaccgtgtgtaccgagtgtagcttcttccacacgcggaagagcttgctcgcgttcatcgccttcctctttttcgcctcaataatctcactttctctgatcttttactactcgaagaagggccgtagatcgtacaag

SEQ ID NO: 149716 - DNA, 3036 bp, Artificial Sequence
  derived and/or modified sequence
atgccagcatcagcacctcctagacggccccgcccccctccccctagcctctctttgttactcgtattgcttggtctaggaggacggcgactgagggcagaaccaggggatggcgcccagacttgggccagattctcccgcccacccgcaccagaagcggccgggctgttccaagggacattccccgacgggtttctgtgggctgtagggagcgccgcgtaccagactgagggaggttggcagcagcacggaaagggcgcctccatttgggacacttttactcatcatcccctcgccccacctggggatagccgaaacgcttcgttgccgctgggagctccaagtcccctgcagcctgccacaggggatgtggcgtcagacagctacaacaatgtattccgggacacagaggccctccgtgaactcggagtcacccactaccgcttctctatctcttgggccagggtgctgcctaatggatccgccggggtgcctaatcgcgaggggcttcgttactataggaggttattagagagactgcgggaacttggcgtccagcccgtagtgactctgtatcattgggatcttccacaacgattgcaggacgcctacggagggtgggccaacagagctctggccgaccatttcagggattacgctgaactgtgctttcgacacttcggcggacaggtgaagtactggatcacgatcgataacccctatgttgtggcttggcacgggtacgctacgggccggctggcgcctggcattagaggcagtccccgtttgggatacctggtcgctcataacctgctcctggcacacgcgaaggtgtggcacctgtataacacatcatttcgtccgacgcagggaggtcaggtcagtatcgccctgtcttcacattggatcaatccaaggcggatgacggaccactcaatcaaggaatgccagaaaagcctggattttgtacttggctggtttgctaagccagtatttatcgatggtgactatccagagtcaatgaaaaataacctgtcatctatcctcccagactttacagagtcagaaaagaaatttataaagggcactgctgatttctttgccctgtgttttgggcccacactcagttttcagttgttggaccctcatatgaaattccgccagctcgagtcccctaatctgcggcagctgctttcatggattgatctagaatttaatcacccacagatttttatagtggagaatggatggttcgtttcggggaccaccaaaagagatgatgctaaatacatgtactatctcaaaaagttcatcatggagacactgaaggcaataaagcttgatggcgtcgatgtgatcgggtataccgcgtggtcacttatggatggcttcgagtggcacagaggctacagtattcgcagaggattgttttacgtagactttcttagccaggacaagatgctacttcccaagagtagtgccttgttttatcagaagcttatagaaaagaatggattcccacccctgcccgagaaccagccactggaggggactttcccctgcgactttgcgtggggcgtcgtggataactacattcaggtggacacaactctctcgcagttcactgacctgaatgtctatctatgggacgttcaccattccaaaaggctaatcaaagtcgacggagtggtaacaaagaagaggaaatcctactgtgtcgacttcgcagccatccagccccagatcgcccttttgcaggagatgcatgtgacccactttaggttttcattagactgggcactgatcctgcccttggggaaccagagccaggtgaatcacactattctacagtattaccggtgcatggcctcagagctcgtccgtgtgaacataacacccgtggtcgccctctggcagccgatggccccaaaccagggcctaccacgactgctcgcgaggcagggagcctgggaaaatccatacaccgcactggcctttgctgaatatgctcgactttgctttcaggaattgggccaccatgtcaagctgtggatcactatgaacgagccttacaccaggaatatgacgtattcagctggtcacaaccttctgaaggcccatgccctggcttggcacgtttataatgagaaatttcggcatgctcagaacggaaaaatttcaatcgcactccaggctgattggatcgagcctgcttgtcccttttcgcagaaggataaggaagtggcagaacgggtcctggagttcgacatcggctggctggccgagcccatcttcggcagcggcgattacccttgggtgatgagagactggctaaaccagcggaacaatttcttgttaccatattttacagaggacgagaagaagctaatccagggtacttttgattttctcgcactttcccactacaccaccatattggtcgactcagagaaggaggatccaatcaagtataatgattacctggaagtgcaagagatgacggatattacttggctgaacagtcctagtcaagtcgccgtagtgccctggggcctgcgcaaggtcctgaactggctgaagttcaagtacggggatctgccaatgtacattattagcaatgggatcgacgatggcctgcacgcagaggacgatcagctcagagtatattacatgcagaactatataaatgaggccctcaaggcacacattcttgacggcatcaatttgtgcggttatttcgcctacagttttaacgatagaaccgctccgcggtttggcttgtataggtacgccgccgatcagtttgagcctaaggcttctatgaaacattaccgcaagataattgacagtaacggatttcccggcccagagacactagagcgcttttgtccagaggaattcactgtgtgcacggaatgcagtttcttccacacaagaaagtcactcctggcctttatcgctttccttttcttcgcatccatcatttcactgtcattaatcttctactacagcaaaaaagggagaagaagttataag

SEQ ID NO: 149717 - DNA, 1647 bp, Artificial Sequence
  derived and/or modified sequence
atgcctgcatcagctcctccccgcaggcctagacctccaccccctagtctctcactgttgctcgtcctcctgggactgggtggaaggcgcctgcgcgctgaacctggagacggcgctcagacttgggctcgcttctctaggccaccagccccagaagcagccggcctgttccagggcacttttcccgatggtttcctgtgggccgtaggtagtgccgcttatcagacagagggcggttggcaacagcacggcaaaggcgctagcatttgggatacctttactcatcacccacttgcaccaccaggcgattcacgtaacgcctccctgccactcggcgctccatcacctcttcaacctgccaccggagatgttgctagcgactcttacaacaatgtgttccgtgatacagaagctttgagagagctgggagttacccactaccgctttagtattagttgggctcgtgtgctgcccaacggaagtgcaggcgtgccaaacagggagggactccgttactacaggagactgctcgagagacttcgtgaattgggcgtgcaacccgtcgtgactctgtaccactgggatctgccccagagactccaggacgcctacggtggttgggcaaatcgtgcactggctgaccactttagagactatgcagagctttgttttagacacttcggtggacaggtgaagtattggatcaccatcgacaacccctacgtggtggcatggcatggctatgctaccggccgccttgcccctggaatccgcggctctccccgcctgggatatctcgtcgctcacaacctgctcttggcccatgccaaagtttggcatctctataatacatccttccgccccactcaaggtggtcaggtctctatcgccctgtcttcacactggattaaccctaggcgtatgactgaccatagcatcaaagagtgccagaagtcccttgattttgtgttgggatggtttgctaaacccgttttcatagatggcgattatccagaatctatgaagaacaacttgagttctattctgccagacttcactgaaagcgaaaagaaattcattaagggtactgccgacttctttgctctgtgcttcggtcctaccctgtccttccaactgctggatccacatatgaaattcaggcagctcgagtcccctaacttgcgccagctgctcagttggatcgacctggaatttaaccatccacagatcttcatcgtcgagaacggttggttcgtatctggaactactaagcgcgatgatgctaagtacatgtactacttgaagaagtttatcatggagaccctcaaagctattaagcttgacggagttgatgtcattggctatactgcttggtccctgatggatggtttcgagtggcataggggttacagtatacgccgtggtctgttttacgtcgacttcctctctcaggataagatgctgctccctaagtcatcagccctgttctaccagaagttgatcgaaaagaatggattccctccactgcctgaaaaccaaccactggagggtaccttcccctgtgacttcgcctggggcgtggtggacaattacatccaggtcagtcagcttaccaaacctatttcctctctgaccaaaccataccac

SEQ ID NO: 149718 - DNA, 1647 bp, Artificial Sequence
  derived and/or modified sequence
atgccagcaagtgcaccaccacgtagaccacgtccacctccaccaagtttatcacttcttttagttttattaggacttggtggacgtcgattaagagctgaaccaggagatggagctcaaacttgggcaaggttttctagacctcctgcacctgaagctgctggtctttttcaaggaacatttccagatggtttcctttgggcagttggatctgcagcttatcaaactgaaggaggatggcaacaacatggaaaaggagcttctatttgggatacttttactcatcatccattagcaccaccaggtgattctagaaatgcttcattacctttaggtgcaccatcaccattacaaccagcaactggagatgttgctagtgattcatataataatgtttttagagatactgaagcacttagagaacttggagtaactcattatagatttagtatttcttgggcacgtgttttaccaaatggtagtgccggagtaccaaatagagaagggttaagatattatagaagattacttgaaagattaagagaattaggagttcaacctgttgttactctttatcattgggatttaccacaacgtcttcaagatgcatatggaggatgggctaatagagctttagcagatcacttcagagattatgctgaattatgttttagacattttggtggtcaagttaagtattggataacaattgataatccatatgtcgtagcttggcatggttatgcaactggaagattagcacctggaattaggggttcaccaagattaggttatcttgtcgcacataatttgttattagcacatgctaaagtatggcatttatataatacttcatttagaccaacacaagggggacaagtttcaattgcattatcaagtcattggataaacccaaggagaatgactgaccattctattaaggaatgtcaaaaaagcttagactttgttttgggttggtttgctaaacctgtttttattgatggagattatccagaatctatgaaaaataatttaagtagtatattaccagatttcaccgaaagtgaaaaaaaattcataaaaggaacagctgatttttttgctttatgttttggtccaactttatctttccaattattagatccacatatgaagtttagacaacttgaaagtccaaatcttagacaattattatcctggatagacttagaatttaaccatccacaaatatttatcgttgaaaatggatggtttgtttcaggtactactaaaagagatgatgctaaatatatgtattatttaaaaaaatttattatggagactttaaaagcaattaaattagacggtgtagatgttattggatatactgcttggtcattaatggatggatttgaatggcatagaggatattcaataaggaggggattattttatgttgattttttaagtcaagataagatgttacttcctaaaagttctgccttattttatcaaaaacttattgaaaaaaacggatttcctccacttccagaaaatcaaccacttgaaggaacatttccatgtgactttgcatggggtgttgttgataattatatacaagtttctcaattaactaaaccaatcagttcattgacaaaaccatatcat

SEQ ID NO: 149719 - DNA, 1647 bp, Artificial Sequence
  derived and/or modified sequence
atgccagcatcagccccgcctcgacggccacgaccaccacctcctagcctctcccttctccttgtgctgctgggacttggagggcggcgactccgggcagaacctggtgacggtgcccagacctgggccaggttttccaggcccccagcccctgaagcagcagggcttttccagggtactttccctgacggctttctctgggcggtgggatccgctgcataccaaactgaaggcgggtggcaacagcatggaaagggagcctccatttgggacacgtttactcatcaccccttggcccctcccggagattcgcggaacgcgtcacttccactgggcgcaccttcgcccctccaacctgccaccggagatgtcgcctccgactcttataacaatgtgttcagagacaccgaggcacttagagagttgggggtgactcactaccggtttagcatctcgtgggcgagggtgctgcccaacggtagcgcaggagtgcccaacagagaaggtttgaggtactaccggcgcctcctcgagcgcctccgagagctgggcgtccaaccagtcgtgacgttgtatcattgggacctgcctcaacgccttcaagacgcatacggtggctgggcaaatcgtgcactggcagatcacttcagagattatgccgagctgtgtttccgccattttggggggcaagtcaagtactggattaccattgataacccatatgtcgtcgcatggcatggttacgcaactggcagacttgcacctggtattcggggtagcccaaggctgggatacctcgtggcacataacctgctgctcgcacatgcgaaagtttggcatctctacaatacctcgttcaggcctacccagggcggtcaggtgtcgattgccttgtcctcacattggattaaccctagaaggatgacggatcatagcattaaggaatgtcaaaagtcgctggactttgtgctcggatggtttgcaaaacctgttttcattgacggagactaccccgagtcgatgaagaataatctttcgagcatactgccagacttcactgaatccgagaagaagtttatcaagggcaccgcggatttctttgcactttgcttcggaccaacgctttcattccaactgctcgatccccatatgaaattccggcagctcgagtcgccaaacctgaggcaactcctgagctggatcgatctcgaattcaaccacccgcagattttcattgtggaaaatggttggttcgtgtcgggaaccacgaaaagagatgatgcgaaatacatgtactacctcaagaagttcattatggaaacccttaaggccattaagctcgatggtgtggatgtgattggttacactgcatggtccctgatggatggatttgaatggcatagagggtactcaattcgaagagggctgttttacgtggatttcctgtcgcaggataagatgctgctgcctaagtcctcggcactgttttaccaaaagctgattgagaagaacgggtttccgccgctgcccgaaaaccagcccctcgaaggtacctttccatgcgactttgcatggggagtggtcgacaattacattcaagtgtcgcagcttaccaagccaatctcatcgctcactaagccttatcac

SEQ ID NO: 149720 - DNA, 1647 bp, Artificial Sequence
  derived and/or modified sequence
atgccggcaagcgcccccccacggcgaccccggccgcctcctccaagcctgagcctgctgctcgttctattaggccttggcgggaggcggctcagagctgaacccggagacggcgcacagacatgggcccggttctcccgacctccagctccagaggcggctggtctgtttcagggaactttccccgatggtttcctctgggccgtgggcagtgcagcttaccagacagagggcggctggcagcaacacggcaagggtgcctccatctgggataccttcacgcatcatcctttggcaccgcccggggattcacggaatgcctccttacctctaggcgctccctctcccctgcagccagctactggagacgtggccagcgattcatacaacaatgtgttcagagatactgaagccttaagagagcttggggttactcactatcgcttttctatttcctgggctcgggtcctgccgaacggcagtgcaggggtccctaacagggaaggactgcggtattaccggcgactcctggaacggctcagagagttgggagtgcagccggtcgtaactctttaccactgggacttgccacagcgactgcaggatgcctatggtggctgggctaatcgggcactggctgatcacttccgcgattacgcagaactgtgcttccgccacttcggaggtcaggtaaaatattggataacaatcgataacccctacgtggtggcctggcatggctacgccacaggtcggttggcaccaggcatcagggggagtccccgattgggatatcttgtggcacataacctgctgctggcgcacgctaaagtctggcacctgtacaacacgagtttcagacctacacagggcggccaggtgtcaatagcccttagtagccattggatcaatcctcgcaggatgaccgaccatagtattaaagagtgtcagaaatcactggacttcgtgttgggctggttcgcgaagcccgtattcatcgacggcgattaccctgagagcatgaaaaacaatctgtcttccatcctgcctgattttaccgagtctgagaagaagttcattaagggcacagccgacttcttcgccctgtgtttcggccctacgttgtcctttcagttgctcgaccctcacatgaagttccgtcaattggagtcacccaacttacggcaactgctaagctggatcgacctggagttcaatcacccccagatcttcatcgttgagaacggctggtttgtatcaggtacgaccaagcgggacgatgcaaagtatatgtactatcttaaaaaattcattatggaaaccctcaaggccattaagcttgacggggtggacgtgataggatatacagcctggtctctgatggatggctttgaatggcacagagggtattctattagaagggggttgttctacgttgattttctcagccaggataagatgcttctgcccaagtcttctgcccttttctaccagaagttgatcgaaaagaatggcttcccacctctgccggagaaccagccactggagggtacgttcccttgcgatttcgcctggggagtagtggataactatatccaggtgagccaactaacaaaaccaattagctccctgacaaaaccttatcac

SEQ ID NO: 149721 - DNA, 1647 bp, Artificial Sequence
  derived and/or modified sequence
atgccggcatcagcaccgccccggaggccacgcccgccgccacctagtttgtctcttttgttggtgctccttggccttggcggcagacgcctgcgggccgaaccaggtgatggggcccagacttgggctcgcttcagccgcccaccagccccggaagccgccggactgttccaggggactttccctgacggtttcctgtgggcggtggggtccgcggcttaccagactgaaggggggtggcagcagcacggaaagggagcttcgatttgggacaccttcactcatcacccattggcccctcccggagacagccgaaatgcttcgctgccgctcggagctccatccccattgcaacctgctacgggcgacgtggcctccgacagctacaacaatgtgtttagagacaccgaggcgctgcgcgagctgggtgtgacccattaccgcttctcgatttcatgggctcgggtgctccctaacggatcagcgggagtgccaaaccgcgagggactcagatactacaggagattgctggagagactgagggaactgggagtgcagccagtggtgactctctaccactgggacctgccgcaacgcctgcaggatgcgtacggaggatgggctaatcgggcgctcgcagaccactttcgcgattacgctgaactgtgcttccggcacttcggcggtcaggtcaaatactggatcactatcgataacccgtacgtggtggcctggcacggatacgcaaccggccgcctggcgcctggaatccgcggaagcccgcgcctcggatacctcgtcgcgcacaacctgctcctcgctcacgcaaaagtctggcacctgtataacacttcattccgcccgacccagggcggacaggtgtcgatcgccctctcttcgcattggatcaaccctcgcagaatgaccgatcactcgatcaaggaatgccaaaagtcgctggactttgtcctgggctggttcgccaagccagtgttcattgatggagactacccggagtcgatgaagaacaacctgagctccatcctgccagatttcactgaatccgagaagaagttcatcaagggcaccgctgacttcttcgcgctgtgcttcgggcccactctctctttccaattgttggacccccacatgaagttccggcagttggagtcccctaacctccgccagctcctctcatggatcgacctcgagttcaatcacccacaaatcttcatcgtggaaaatgggtggttcgtctcgggaaccactaaacgcgacgatgccaagtatatgtactacctcaagaaattcattatggaaaccctgaaagcgatcaagctggacggtgtggatgtgatcggatacactgcctggagcctgatggatggatttgaatggcacagaggctactcgatccggcgcggactgttctatgtcgacttcttgtcccaagataagatgctgttgccgaagtcatcggctctgttttatcagaagctgattgagaaaaatggatttccaccgctgccggaaaatcagccactggagggcacgttcccgtgcgacttcgcgtggggcgtcgtcgataactacatccaagtctcacaactgaccaagccgatctcgtcgctgaccaagccataccat

SEQ ID NO: 149722 - DNA, 1647 bp, Artificial Sequence
  derived and/or modified sequence
atgcctgcctccgccccaccacgtcggccacgacctccacccccttccctttccttgctgctggtcttactgggattaggaggtagaaggttgagggccgagccaggcgacggtgcacaaacctgggcccgattttccagaccacctgcaccagaagccgcgggcctcttccagggaaccttcccagacggcttcctgtgggctgtggggtctgccgcatatcaaacagaggggggctggcagcagcacgggaaaggggcctccatatgggatactttcacccaccacccgttggcacctccaggtgatagtcgcaacgcctctctgcccttaggggcccccagcccattgcagcctgccacaggggacgtcgcctccgactcttacaacaacgtgtttagagacaccgaggctttaagagagttaggagtgacccattatcgcttttccattagctgggccagagtgcttccaaacggaagtgcgggtgtgccgaacagggagggactgagatattacagacgattgctggaaagactccgggaactcggagtccaacccgtagtcacgctttaccactgggatctgcctcagcggctccaggacgcctacgggggctgggcaaatcgtgcgctggccgaccacttcagagattacgctgagctgtgttttcggcactttgggggacaggtaaagtattggatcacgatcgataacccatatgtggtggcatggcatggctatgccaccggaagactcgcccccggtatacggggatcccctagattgggatacctcgttgcccacaatttgttgttggctcatgccaaggtgtggcacctttacaacacgagctttaggccaactcaaggaggacaggtgtccatcgcactgtcatcacattggattaatcccagacggatgacggatcactctatcaaggaatgtcagaagtctctggacttcgtgctaggttggttcgccaagcctgtgttcattgacggagactaccctgaatccatgaagaataacttgagcagcatccttcctgacttcacagagagcgaaaaaaaattcattaagggaactgccgactttttcgccttatgtttcggtccaacactgagctttcaactgctggacccccatatgaagttccgccagctggaatctcccaatctgcgacagctcctctcctggattgacctggagttcaatcatccacagatctttatcgtggaaaatggatggttcgtaagcggcacaacaaagagggatgatgccaagtacatgtactacctgaagaaattcataatggagaccttgaaggccataaaactggacggcgtggatgtcattggatacactgcttggagccttatggatggcttcgaatggcaccgcggctattccatcagaagaggtctattctacgtggactttctctctcaggacaagatgctcttacccaagtcttccgccctgttctatcagaaactgatcgagaagaatggctttccacccctgcccgagaaccagccacttgagggcacttttccctgcgatttcgcctggggagtggtggacaattatattcaggtgagccagctcaccaaacctatctcctcgcttactaaaccatatcac

SEQ ID NO: 149723 - DNA, 1647 bp, Artificial Sequence
  derived and/or modified sequence
atgccagcctccgcccctcctcgccgtccacgacctcctccgcctagtttgtccctgctgcttgtgctgctgggcctgggtggcaggcgtcttcgagcagaaccgggcgacggtgcacagacctgggctcgttttagccgcccacctgcacctgaggcagcggggctgtttcagggcacgttcccagacggcttcttgtgggcagtgggtagcgccgcctaccagactgaaggtggttggcagcaacacggtaaaggcgcgtcaatctgggacacttttacccatcacccgctggcaccgccaggtgacagccgcaacgccagtctgccgcttggtgccccttcgccactccaaccagctaccggtgacgttgcatctgatagctataataacgtatttagggataccgaggctctgcgtgaactgggtgttactcactaccgtttttctattagctgggctcgtgttctgccaaatgggagcgcgggcgtaccaaatcgcgagggcctccgctattacaggcgtctgctggaacgtttgcgcgaactgggcgtccagccggtggtgacactgtaccactgggacctgccacaacgcctccaggacgcgtatggtggttgggcaaaccgcgcactggcggaccacttccgggattacgcggaactgtgcttccggcattttgggggccaggtaaaatactggattacaattgataacccatatgtggtggcatggcacggctatgcaacgggccggctagcaccgggtattcggggctctcctcgcctgggttaccttgtcgcccacaatctcctgttggcacacgctaaagtctggcatctgtacaacaccagcttccgcccaactcagggcggtcaggttagcatcgccctcagctcccattggattaacccaaggaggatgacggatcacagcattaaagaatgccagaagtcgctggatttcgtgctgggctggttcgccaagcctgtgttcattgacggcgattaccctgagtccatgaaaaacaacttgagttccattttgcccgatttcaccgaaagcgagaagaaatttattaaaggcactgcagacttcttcgctctctgctttggccctaccctgagcttccagctcctggatccacacatgaagttccgacagttggagtccccaaatctgcgccagctcctgtcatggatcgacctggaattcaatcatcctcagatctttatcgtagagaatggatggttcgtttccggtaccaccaaacgcgacgacgctaagtatatgtactacctgaagaagtttatcatggaaacactaaaagcaataaagcttgatggtgttgatgtgattggctataccgcctggtctcttatggatggtttcgagtggcaccgtggttactcaatccgccggggactgttttacgtagatttcctgtctcaggacaagatgctgctgccaaaatccagcgcgctgttctaccagaagttgatcgagaaaaacggttttccgcctctgccggaaaaccagcctctggaggggaccttcccgtgtgatttcgcatggggtgttgttgataactatattcaagtgagccagctgacaaagccaatctcttctctgacgaagccttaccat

SEQ ID NO: 149724 - DNA, 1647 bp, Artificial Sequence
  derived and/or modified sequence
atgccagcgagcgccccgccgagacggcccagaccgcctccgcctagcctgtcgctcttgctggtcctgttgggcctcggcggacgccggctgcgagccgagccaggtgatggcgcgcagacctgggctagattctccagaccgcccgcgcccgaagctgcgggactgtttcaaggtactttccctgacggattcctgtgggccgttgggtccgcggcctaccagaccgaaggcgggtggcagcagcatgggaaaggagccagcatctgggataccttcactcatcatccgctggcgccacctggagattcccgaaacgcaagcctccccttgggagccccctcgcctctgcaaccggccaccggggatgtggcaagtgattcatacaacaacgtgttcagggatactgaggctctccgtgagttgggcgtgacccattaccggttctccatctcgtgggcgcgcgtcctgccgaacggctccgctggagtgccgaatcgggagggcctcaggtactaccggagactcctggagcgccttcgggaactgggagtgcagccggtggtgacgctctatcactgggaccttccacagaggctccaagatgcctacggaggatgggccaaccgcgcactcgcggaccactttagagactacgcggaactgtgctttaggcactttgggggacaggttaagtactggatcaccattgataacccgtacgtggtggcatggcacggatatgccactggacgcctggctccagggatcagggggagcccgagattgggatacctggttgcacataatctgctgctcgcccatgcgaaagtgtggcatctgtataacacttctttccggccgactcagggaggacaagtgtccatcgccctctcaagccactggatcaacccaagacgcatgactgatcactcgatcaaggaatgccagaagtcgcttgatttcgttcttggttggttcgcaaagcctgtattcatcgatggagattacccggagagcatgaagaacaacctgtcctccattctcccggactttacggaaagtgagaagaagttcattaaaggaactgcggactttttcgcattgtgcttcgggccgaccctgtcctttcagctcctggatccccacatgaagtttcggcaactcgagtcgccgaatctgaggcaactgctgtcctggatcgacctcgagtttaaccacccccagatctttattgtcgaaaacggatggtttgtgagcggaacgaccaagcgggacgatgctaaatacatgtactacctcaagaagttcatcatggagactctcaaagccatcaagctggacggagtggacgtgatcggatacactgcgtggtcattgatggacggattcgagtggcacaggggatactcgataagacgcggactgttctacgtggacttcctgtcgcaggataagatgctgttgcccaagtcgagcgcccttttctaccaaaagctgatcgagaaaaacggcttcccacctctgcctgaaaatcagcccttggaaggcacctttccgtgcgatttcgcctggggcgtggtcgacaattacatccaagtgtcgcaactgaccaagccgatcagctcgctgaccaagccataccac

SEQ ID NO: 149725 - DNA, 1647 bp, Artificial Sequence
  derived and/or modified sequence
atgccggcttcagcgccgccacgccgtccgcgtcctccgccgccctcgttgtcactgctcttggtcctgcttgggcttggagggcgccgcctgagagctgaacccggtgacggggcccagacctgggccagattttcaaggccgccagccccggaagccgctggattgttccaaggaaccttcccagacggattcctttgggccgttgggtcggctgcctaccaaaccgaaggcggatggcagcaacacggcaagggcgcatcgatttgggatactttcacccaccatcccctggcaccccctggcgactcccgcaatgcgtctctcccactcggagccccttcgcctctgcagccagctaccggagacgtggcctcggactcctataacaacgtgttcagggataccgaggccctccgcgagttgggcgtgactcactacagattttctataagctgggcgcgcgtgctgccgaatgggagcgccggtgtgcctaaccgggagggactgcggtactaccgacgcctgctggaacgcctgcgggaattgggagtccagccggtggtcacgctgtaccactgggatctgccacagcggctgcaggatgcatacggcggctgggcgaacagagcactggctgatcactttcgcgactacgcggagctttgcttccggcatttcggcggacaggtcaagtactggatcactatcgacaatccgtacgtggtggcctggcatggttacgcgactggtaggctcgcgccagggatacgcggcagtcctcggctgggatatctggttgcacacaatctcctcctggcacacgcgaaggtctggcatctctacaatacgtcatttaggccgacccaaggaggccaggtgtcgattgcgctgtcctctcattggatcaaccctcgacggatgactgatcattcaatcaaagaatgccagaagagcctggacttcgtcctgggatggttcgctaaacccgtgtttatcgacggtgactacccagaatcgatgaaaaacaatctgtcgtccatcttgccggacttcacggaatcagagaagaagtttatcaagggtaccgcagatttcttcgctctctgctttggaccgactctgtcattccagctgctggacccgcacatgaagttccggcagctcgaatctccgaatcttcggcaactcctcagttggatcgacctcgagttcaaccacccgcagatattcattgtggaaaacggatggtttgtgtccggaactactaagcgggatgacgccaaatacatgtactacctcaagaagttcatcatggaaaccctcaaagccattaagctggatggagtcgatgtgatcggatacaccgcctggtcgttgatggatggcttcgagtggcatcgcggatacagcatcaggagaggattgttctacgtcgacttcttgtctcaagacaagatgctgcttccgaagtcaagcgccctgttctaccaaaagttgatcgagaagaacggcttccccccactcccggagaaccagccactggaaggtacctttccatgtgacttcgcatggggagtggtagacaactacatccaagtgagccagctcactaaacctatctcctcgctcaccaaaccatatcac

SEQ ID NO: 149726 - DNA, 1647 bp, Artificial Sequence
  derived and/or modified sequence
atgcctgcatcggcccctcctcgccggccaagacctccaccaccctcacttagccttcttctggtcctgcttggacttggaggtagacggcttagagcagaaccgggtgacggcgcgcaaacctgggctcgcttttcccgtcctcctgcacctgaagcagccgggcttttccagggtacgtttccagacggtttcctgtgggcagtgggtagcgcagcctaccaaactgagggcggttggcaacagcatgggaagggcgcatccatttgggatactttcacgcaccaccctctggcaccgcctggtgattcaagaaacgcatcgctccctctgggcgcaccttcgccactccagccagccacgggggatgtggcaagcgattcctataacaacgtgttccgtgacactgaagcactgagggaactgggggtcacccattacagattcagcatctcgtgggctagggtccttcccaatggctcggcgggggtgccgaatagagagggtctgaggtactatagaagattgctggagagactgcgggagctgggagtgcagcccgttgtcactctgtaccattgggacctccctcaacgactgcaggatgcgtacgggggctgggcgaatagggcgctggcagaccattttagagactacgcggagctttgttttcggcacttcggaggtcaggtgaagtattggataactatcgacaacccttacgttgtcgcatggcacggatacgcaaccgggcgacttgctcctgggatccgcggttcgcctagattgggttacctggtggcgcataatctgcttcttgcgcatgccaaggtgtggcatttgtacaatacctcatttcgacctacccagggtggccaagtctctattgcactgtccagccattggatcaatccaaggagaatgacggatcactcaattaaggagtgtcagaaatccctcgatttcgtgctcggttggttcgccaagcctgtctttatcgacggagattacccggagagcatgaagaacaacctctcctcgattctgccagattttaccgagtcggaaaagaagttcattaagggaaccgcggatttctttgctctctgtttcgggcctaccctctcctttcagctgctggatcctcatatgaaatttcggcagctggaatcgcctaacctgcgccaactgctctcctggattgatctggaattcaaccatccccagatctttattgtggagaatggttggtttgtctcaggcaccaccaagagagacgacgccaagtatatgtattacctgaaaaagtttatcatggaaacccttaaggccatcaaactcgatggagtggacgtgattggatacacggcgtggtcgctgatggacggattcgaatggcaccggggctacagtattaggagaggtctgttttacgtggatttcttgtcacaagataagatgctgcttccaaagtcctccgcacttttctaccaaaagctcattgagaaaaacgggtttccgccactgcctgagaaccaaccactcgaaggaacgttcccctgtgactttgcatggggagttgtggataactacattcaagtgagccagctgaccaaacctatttcgtcgctcaccaaaccataccat

SEQ ID NO: 149727 - DNA, 1647 bp, Artificial Sequence
  derived and/or modified sequence
atgcccgcttctgcgcctccccggcgtcctcgccctcctcctccgtcactgagtttactgctggtattactgggcctgggaggtaggcggctgcgagccgagccaggagatggcgctcagacttgggccagattctctcgcccacccgccccagaagctgcaggactgtttcagggtaccttcccagacggctttttgtgggccgtagggagcgccgcgtaccagaccgaaggaggatggcagcagcatggaaagggcgcgtccatttgggacaccttcacacaccatcccttggctcctccaggggatagtaggaatgccagtctgcccttgggtgcccccagccctctgcaacccgcgaccggagatgtggcgtcagactcatataacaacgtcttcagagataccgaagcgctgcgggagctcggggtcactcattaccggtttagcattagttgggcgcgggtgttacctaatggcagtgccggcgtgccaaatcgggaggggctgaggtactaccgacgactgctagaaagacttcgggagttaggcgtgcagcccgtggtcaccctatatcattgggacctgccacagcggcttcaggatgcctacggcgggtgggccaatagagctctggcagatcatttccgggactacgccgaactgtgtttcagacattttggaggtcaagtgaaatactggatcaccattgataatccctatgttgtggcctggcatgggtacgccactggaagattggcccccggcatcagaggctctccaagattaggatatttggttgcccacaacttactgctggcccacgccaaggtgtggcacctgtataatacctctttccgacccacccagggaggccaagtttcaattgccctgtctagtcattggataaacccaaggaggatgacagatcattcaatcaaggagtgtcaaaaatcgctggattttgtgctagggtggttcgcaaagcccgtgtttatagacggcgattaccctgaatcaatgaaaaataatctgtctagcattttgccagatttcaccgaatcggaaaaaaagttcattaagggcacggcagactttttcgcgctgtgctttgggccgacattgagcttccagctcctcgatccacatatgaaatttcgccagttggagagtcccaatctgcggcagctgctctcctggatagacctggaattcaaccaccctcagatctttatagtggagaatggttggttcgtgtcagggaccacgaaaagggatgacgctaagtacatgtattacctgaagaagtttatcatggagacactgaaggccataaagctggatggggtagacgtgattggatacaccgcctggtcactaatggacggtttcgagtggcatcgcggatatagcataaggagggggctgttctacgtggattttctgagccaggacaagatgctgttacctaagtcatctgccctgttctatcagaagctgatagagaagaacgggtttcccccccttccggaaaaccagcctctggagggtaccttcccctgtgatttcgcctggggtgtggtagacaattacatccaagtgagccagctcactaaacctattagctcccttacaaagccataccat

SEQ ID NO: 149728 - DNA, 1647 bp, Artificial Sequence
  derived and/or modified sequence
atgccagcgtcagcaccacctagacggcccaggcccccccccccgtccctctcactgcttttggttctgttaggcctgggcggccgtcgtttgcgagccgagccaggcgacggcgctcagacttgggcacgtttttcacgaccgccagctccggaggcggccgggctgttccagggcacgtttcctgacggtttcctgtgggcggtcgggagcgccgcataccaaacagagggcggttggcagcagcatggaaagggtgccagcatatgggatactttcacccatcaccctttggctccgcccggagactctcggaatgcttccctgcctctaggcgcaccctcaccactccaacccgctacgggtgatgtggcctccgactcttataataacgtgttccgtgatactgaggcccttagagaattgggcgtgacacattaccggttttctatctcttgggcaagggtgctcccaaatggatcggccggcgtgccaaatcgggagggcttacgctattatagacgactcctcgaaaggttgagggaactaggggttcagccagtcgtaaccctgtatcactgggatctgccacagcggcttcaggacgcatatggaggttgggctaatagagcgcttgcagaccattttagagattacgcagaactttgcttccgtcactttggcggtcaagttaagtattggatcaccattgacaacccttacgtggtcgcctggcatggttatgctacaggccggctcgcaccgggaatccgggggtcccctcggctgggttatttagtagcccacaacctgctcctagctcacgccaaggtgtggcatctatacaacacctccttcagacccacccaaggagggcaggttagcattgccctctccagtcactggatcaacccccggcgcatgacggatcactctatcaaggagtgccagaaaagcttggacttcgtgttgggctggttcgcgaagcctgtttttattgatggagactacccagaatccatgaaaaataacctcagcagtatactccccgactttactgagagcgagaagaaatttatcaagggtaccgccgattttttcgccctgtgttttggccctaccctcagcttccaactgcttgatccccatatgaagttcagacaactcgagtcaccgaacctgaggcagttgctttcctggatcgacctggagtttaatcacccccagatctttattgtggagaacgggtggttcgtgtccgggaccacaaaacgcgatgatgctaagtacatgtattacctcaagaaattcattatggaaacgctgaaagccatcaagctggatggggttgacgtcattggctatactgcatggtcattgatggacggatttgagtggcacaggggatactcgatccgccgcggcctcttctatgtcgattttctgtcccaggacaaaatgctgctgccaaaatcttccgcactgttctaccagaagttgatcgaaaagaatggcttcccccccttgcctgaaaatcaaccattggagggaacgtttccttgtgatttcgcttggggcgtggttgataattacattcaggtgagccagctaaccaagcctattagctcgctaaccaagccctaccat

SEQ ID NO: 149729 - DNA, 1647 bp, Artificial Sequence
  derived and/or modified sequence
atgcccgcctcggcccctcctcggcgaccgcgtcccccacctccctctctgtctctgctgctggtgctgcttggactcgggggacgtagattgagagccgaaccaggagatggagcccaaacgtgggcacgcttttcgcggcctccggcgcctgaagcagctggactcttccaaggcacgtttcctgatggctttctttgggcagtgggctcagccgcgtaccaaaccgaaggaggctggcaacaacatgggaagggtgcctcgatttgggatacttttactcaccatccactggcgcccccaggcgatagccgcaacgcttcattgcctctgggtgcaccatcacctctgcaaccggcaaccggtgacgtcgcaagcgattcgtacaacaatgtgttcagggatactgaagcactgcgggaacttggggtgactcattacaggttctcaatctcatgggcaagggtgctgccaaacggttcagccggtgtgcccaacagagagggacttcgctactaccggcggcttctcgagagacttcgtgaacttggtgtgcagccagtggtcaccctgtaccattgggatctgccccagcgcctgcaggacgcttacggtggttgggcaaatcgggcgcttgcagatcattttcgtgattacgcagagctctgttttaggcatttcggaggacaagtcaagtactggataaccattgataatccgtacgtcgtcgcatggcatgggtacgcaaccggccgcttggcacctggaattagaggaagccctagacttggatacctcgtggcacataatctcctgctggcccatgcaaaagtttggcacctttacaacacttcattccggcctacccaaggaggtcaggtgtccatagcacttagctcccactggatcaacccaagacggatgactgatcactccataaaggagtgtcaaaaatccctcgattttgtgctcggatggttcgcaaaaccagtgtttatcgacggagattaccctgagagcatgaaaaacaacctgagctcgatcttgcccgattttaccgaatcagagaaaaagtttatcaagggtaccgcagacttttttgccctctgttttggaccaaccttgtcttttcaacttctcgatccacacatgaagttccgacaactggaatcgcctaacctccgccagcttctttcgtggatagatcttgagttcaaccatcctcaaatctttattgtcgaaaacggctggtttgtatcgggtaccaccaaaagagatgacgccaagtatatgtactacctcaaaaagttcatcatggaaacccttaaagcaatcaagctggatggtgtcgacgtgatcggatatactgcctggtcgctgatggacggctttgagtggcaccgcggatactccattcggagaggactgttctacgtggatttcctttcccaggacaagatgcttctgcctaagtcgagcgcacttttctatcagaagctcatcgaaaagaacgggttccctccacttcccgaaaaccaacccctggaaggtacctttccctgtgattttgcttggggtgttgtggataactacattcaggtgagccagctcactaagcccatttcgtcccttaccaaaccttatcat

SEQ ID NO: 149730 - DNA, 1647 bp, Artificial Sequence
  derived and/or modified sequence
atgccggctagcgccccacctcgtagacccagaccacctcctccttctctttcgttgcttctcgtgttgctgggacttggaggtagacgcctccgagccgaacctggcgacggggcacaaacctgggcaaggttttccagaccacccgctccagaagccgcaggactgtttcaaggcacctttccggacggattcctctgggcggtgggttcagcagcctaccaaacggaaggtggctggcaacagcatgggaagggtgcatccatttgggataccttcactcatcatcccctggcaccgccaggggattcgcgcaacgcctcactgcctctcggagcaccatccccgttgcagcctgctactggagacgtggcctcagatagctacaataatgtgttcagggacaccgaggcgctcagggagttgggggtgactcattacagattttccatttcgtgggcacgggtgcttcccaacggctcggccggggtcccaaaccgagaaggcctcagatactaccgcagacttcttgagcggttgagggagctcggagtgcaacccgtggtgaccctttaccactgggaccttccacagagactccaggatgcatacggggggtgggctaaccgggctcttgcagatcattttcgagattatgcagaattgtgttttagacattttggaggtcaagtgaagtactggattactattgataatccttacgtggttgcttggcacggttacgccactgggcgtctggcaccagggattcgtggatcgccccggctgggttatttggttgcacacaaccttctgctggcacacgcaaaggtgtggcatctctacaataccagctttagacctactcagggaggacaggtgtcgatagcgttgtcatcccactggattaaccctaggaggatgaccgatcattccattaaagaatgccaaaagagcctggatttcgtcctcggctggttcgcgaagcctgtctttatcgacggtgactatcccgaatccatgaagaataatctttcgtcgattcttcctgactttactgaatcagaaaagaagtttatcaagggaaccgcagatttcttcgccctttgctttggtccaacgctctccttccagctgcttgatccgcatatgaaattccgccaactggagtcgccaaacctgagacaattgctttcttggattgatcttgagtttaaccacccccaaatcttcatcgtggaaaatggatggtttgtgagcggaaccacgaaaagagacgatgcgaagtacatgtattacttgaaaaagttcatcatggagactctgaaggcaatcaagctcgatggagtcgatgtgatcggatacactgcctggtcgcttatggacggctttgaatggcatcgggggtactcgattcgtagagggcttttctatgtcgactttctgtcacaagacaagatgctgctgcctaagtcgagcgcactgttctaccagaaacttatcgagaaaaacgggtttccacccctgccagagaaccaaccgcttgaaggtacctttccttgtgattttgcatggggagtggtcgataactacatacaagtctcgcagctgaccaaacccattagctctcttaccaagccataccat

SEQ ID NO: 149731 - DNA, 1647 bp, Artificial Sequence
  derived and/or modified sequence
atgccagcgagtgcccctccccggagacctagaccgcccccccctagcctgagcctgttgctggtgctgctgggcctgggtggccgacgcttgagggcagaaccaggggatggcgcccagacttgggctaggtttagtcggccccctgctcccgaggcagccgggctgtttcaggggacatttccagacggattcctctgggcagtgggatctgctgcctatcagacagaagggggctggcaacaacacgggaagggagctagtatctgggatactttcactcatcaccctctggcaccacccggcgacagcaggaatgcatcactgcctttgggagcaccctcaccacttcagcctgccaccggtgatgtggcatccgatagctacaacaatgtgttccgcgatacagaggccctgcgcgagctcggcgtgactcactaccgatttagcatctcatgggctcgggtgctgcctaacggatctgcgggggtgcccaatagggagggactgcggtactaccgacgactgttggaaaggttgcgagagctcggcgtccagccagtcgtgaccctgtatcactgggacctcccacagagactccaggacgcttacggcggatgggcaaatcgggctctggcagatcacttccgcgactatgccgagctgtgttttcgccacttcgggggccaggtgaagtactggattaccattgacaacccctatgtggtggcctggcatggctacgccaccggcagacttgcccctggcatccgaggctcacctagattgggctacctggtagcccataaccttcttctggctcacgccaaagtgtggcatctttacaacacaagtttccgccccactcaaggcggccaggttagcattgccttgagttcacactggataaaccctaggagaatgaccgaccattctatcaaagagtgccaaaaaagtcttgacttcgtactgggatggttcgccaagcctgtgttcatcgatggcgattatcccgagtcaatgaagaataatctctcttccattctgccagactttacagaatccgaaaagaaattcatcaaaggcactgctgacttcttcgcactgtgttttggccccacactgtccttccagctcctggatcctcacatgaaattccggcaattggagtcacccaacctgcgacaactgctgtcttggattgatctcgaattcaaccatccccagatcttcatagtggagaatggttggttcgtatctgggactaccaagcgcgacgatgccaaatacatgtactatctgaagaagtttattatggaaactcttaaagcgattaagctggacggagtggacgttatagggtacaccgcatggagcctgatggatggttttgaatggcatcggggatacagcatacgccggggactgttctacgtagatttcctgtctcaagacaagatgcttctgcctaagagctcagctctgttttatcagaagttgatcgaaaaaaacggcttcccacctttgccagagaaccagcccctggaggggacattcccttgcgactttgcatggggtgtggtggacaattacatccaggtcagccagctgactaagccaatctccagcctgactaagccctaccac

SEQ ID NO: 149732 - DNA, 1647 bp, Artificial Sequence
  derived and/or modified sequence
atgcccgcttcagctccgcctcgacgcccacggcctccccctccatctctgtcgctcctcctcgtacttcttggactcgggggaaggcgcctgagggctgagcctggggatggcgctcagacttgggcccgttttagcagaccacctgcaccggaggcagctggactgttccagggaacatttcctgatgggtttctgtgggccgtggggtcagctgcctaccagacagaggggggctggcaacagcatggaaagggagcctcgatatgggatacttttacccaccatcccctggcaccccctggcgacagtcgcaatgctagcctcccacttggagctccgagtccattgcagccggccaccggagacgtcgcgtcagactcatacaacaacgtgtttcgagatacagaagcccttagggagctcggggtcacccactaccgcttctccataagctgggctagggtcctgcctaatggtagcgctggggtgcccaatagagaaggcctccgctactatcggcggctgctcgagcgtctacgtgaactgggggtccagccagtggtgaccctctaccactgggacctcccgcagcggctgcaggacgcttacggcggctgggcgaacagggctctggcagatcattttagggactatgcggagctgtgttttaggcattttggcggacaggtcaaatattggattaccatagataacccctatgtggtcgcatggcacggttatgccacagggaggttagcaccaggcattagagggtcaccaaggctcggttacctggttgctcataacttgctattagcccacgccaaggtgtggcacctctataacacttccttcaggcccactcagggaggccaggtcagtatagccctcagctcccactggattaatccacgccgcatgacagatcattccataaaagaatgccagaagtcactggactttgtgctcggctggttcgccaagcccgtattcattgacggagactatcctgaaagtatgaagaataacctgtcctctatactgccggactttactgaatccgagaagaagtttattaaaggtacagccgattttttcgctttgtgctttggcccaacactgtccttccagttgcttgacccacacatgaagttccggcagctggagagccccaacctcagacagctgttgtcctggattgacctggagtttaatcaccctcagatcttcatcgtggagaacgggtggtttgtctctgggactaccaaacgtgatgacgctaaatatatgtactacctcaagaagtttatcatggagacgctgaaagccattaaactcgacggagtggacgtgattggctataccgcttggtctctcatggacggcttcgaatggcatcggggatacagtattaggcgtggattgttctacgtggattttctgagccaggataagatgttgctgcctaagtccagcgccttgttctaccaaaagctcattgaaaaaaacggatttcccccacttcccgagaatcagcctctggaaggaacttttccatgcgatttcgcgtggggcgtagtcgacaattacattcaggtgtctcaactcaccaagccgattagctctcttactaagccataccac

SEQ ID NO: 149733 - DNA, 1647 bp, Artificial Sequence
  derived and/or modified sequence
atgcccgcgagcgctccgccccggcgccctcggccgcctccacccagcctctcgctgctcctcgtccttctgggccttggaggccgacggctcagagccgaacccggcgacggagctcagacttgggcgcggttctcgcgtccacccgctccggaggccgccggacttttccagggaaccttccctgatgggtttctctgggcagtgggaagcgcagcttaccagactgaaggaggatggcagcaacacggtaagggcgcctccatatgggacaccttcactcatcaccccctcgccccacccggagactcccgcaatgcatcattgccgctgggggcaccatcgccgctccagccggccactggggacgtcgcctcggattcctacaacaatgtgttccgcgacactgaggctctccgcgaactgggcgtgacccactatcgcttcagcatcagctgggcccgggtgctgccaaacggaagcgctggcgtgccgaaccgtgaaggtctgcgctattaccgccgcttgctggagcggctccgagaactgggtgtccaaccggtcgtgacgctctaccattgggatctgccacagcggctgcaggatgcgtacggtggatgggccaaccgggcgctggccgaccacttccgggattacgcagaactctgcttccgccactttggaggccaggtgaagtactggattaccattgacaatccgtacgtcgttgcgtggcatggctacgccaccggccgcctggccccgggcatccggggaagcccgcgcctgggctaccttgtggcgcataatctgctgcttgcccatgctaaggtgtggcatctctacaatacttccttccggccgacgcagggcgggcaagtctcaatcgcgctctcatcccactggattaacccgaggcggatgacggaccatagcattaaggagtgccagaagtctctcgacttcgtgcttggatggttcgcaaagcctgtgttcattgacggagactaccctgaatcgatgaagaataatctgtcgtcgatcctcccagattttactgaatccgagaagaaattcatcaagggcaccgccgacttcttcgccttgtgcttcggcccaaccctgtcgtttcaattgctggatccgcatatgaaattccgccagctggagagcccgaatctccgccagcttttgtcctggattgatctggagttcaaccatccgcaaatcttcatcgtcgaaaatggatggttcgtaagcggaactactaaacgggatgacgcaaaatacatgtactatctgaagaagtttatcatggagacgctgaaagcaatcaagctcgacggagttgacgtcatcggatataccgcgtggtcactgatggacggcttcgaatggcaccgcggctactccatcagaagggggctcttttatgtcgactttctgtcacaggataagatgcttcttccaaagtcctcggccttgttctaccagaagctgattgaaaagaacgggtttcctccactgccggagaatcagccgcttgagggcaccttcccgtgcgacttcgcgtggggggtggtggataactacattcaggtgagccaattgactaagcctatctcgtctctcacgaaaccataccac

SEQ ID NO: 149734 - DNA, 1647 bp, Artificial Sequence
  derived and/or modified sequence
atgcccgcatccgcaccaccgaggagaccaaggccgccgcccccttctcttagcctcctcctggtcctgctgggtctcggcggccgcaggctgcgggccgaacccggcgacggtgcccagacatgggcccgattttctcgcccacccgccccagaagccgcagggctcttccaggggactttccctgacggcttcctttgggctgtgggttccgccgcgtatcagacggagggaggctggcagcagcatggaaaaggtgcctctatctgggataccttcacacaccaccccttggcccctcctggggattctagaaacgcctcccttccattgggtgcaccctctcccctccagccagcaaccggcgacgtcgcctccgatagttacaataatgtctttcgcgatacagaggctttgagagagttaggggtgacccattaccgattttccatctcctgggcaagggtgctgcctaatggatcagcgggggtacccaatcgcgagggcctcagatactacaggagacttcttgaaaggctgagggagcttggcgtgcagcccgtggttactttataccactgggaccttccccagcgcctccaagacgcgtatggcggctgggccaatagagccttggctgaccacttccgtgattacgcagaactgtgctttcggcactttggcggccaggtgaagtattggattaccatagataatccatacgtggtggcatggcacggatacgcaaccgggaggctcgcacctgggatccgcggcagccccaggctcggctacttggtagcccacaatcttctcctggcccatgcaaaagtttggcatttgtataacaccagcttcagacccacacagggtgggcaggtctcaattgcattatcctctcattggattaatcctagaagaatgacagaccactcgataaaggagtgccagaaatcactggacttcgttctcggctggttcgctaagcccgtatttatagatggtgactaccctgaatctatgaaaaataacttgtcgagcatcctgccagactttactgaatccgaaaagaagtttatcaaaggcaccgctgatttttttgctctgtgcttcggccccacgctcagtttccagttactggatcctcacatgaagtttaggcagctggagtctcccaatctccggcaactgctttcctggatcgacctggaattcaaccatccacaaattttcatcgtagagaatggatggttcgtctctggcactaccaaacgggatgatgcaaagtacatgtattatctcaagaagttcattatggagacacttaaagccatcaagctcgatggcgttgatgtcataggctatacagcctggtcactgatggatggctttgaatggcatcgtgggtatagcataaggcgcggacttttttacgtggattttctgtcacaggacaagatgctgttacctaaaagcagtgcactgttttaccagaagctgatcgagaagaacggtttccctcccttgccagagaaccagcctctagagggaacattcccctgtgatttcgcttggggagtagtggataactatatccaggttagtcagctaaccaaacctataagttccctgacaaagccctaccac

SEQ ID NO: 149735 - DNA, 1647 bp, Artificial Sequence
  derived and/or modified sequence
atgcccgccagcgctccgccgagacggccaagacctccgcctcctagcctctccctgcttctggtcctcctcggccttggcggccgtcggcttcgggctgaaccaggagatggtgcgcagacttgggcgcggttttccagaccaccggccccggaagctgctgggctgttccaaggaaccttccccgacggattcctctgggccgtgggctcagcggcctaccagactgagggtggctggcaacagcacggaaaaggcgcctcaatctgggacacttttacgcatcatccgctcgcaccgccgggcgattcgcggaacgcctcactgccgctgggggctcccagcccgctgcaacctgcgaccggcgatgttgcctcggattcatacaataatgtctttagggacaccgaggcattgagggagttgggagtgacccattatcgcttcagcatttcctgggcgagagtcctgcctaacgggtcggcaggagtcccgaatcgggagggcttgcgctattaccgccggttgctcgagcgattgcgcgaacttggagtgcagccagtcgtgacgctgtaccattgggacctgccgcagcggctgcaggatgcatacggaggttgggcaaaccgcgccctcgcggaccacttccgcgactatgccgaactgtgctttagacacttcggaggtcaagtgaagtactggatcaccatcgacaacccttacgttgtggcctggcacggatacgcaacgggacgtttggccccaggtattaggggaagccccaggctggggtacctggtggctcacaacctgctgttggctcatgccaaggtttggcacctgtacaatacttctttcagaccaacgcagggaggacaagtgagcatcgcactgtcctcgcattggattaacccgcgccggatgactgaccactccatcaaggagtgtcagaaatccctcgatttcgtgctcgggtggttcgcaaaacctgtgtttatcgacggggactaccctgaatcgatgaagaataacctgtcatcaatcctgcctgatttcaccgaatctgagaaaaagttcatcaagggtactgccgacttttttgccctttgcttcggaccgaccctttcgtttcagttgctcgacccgcatatgaaattccgccaactcgaaagccccaacctccggcagcttctgtcgtggatcgacctggagtttaaccacccccaaatcttcatcgtcgaaaatggttggttcgtgtcgggaaccactaagcgcgatgacgctaagtacatgtattatctgaagaagttcatcatggagactttgaaggcaatcaagctggacggcgtcgacgtgatcggatacaccgcgtggtcactgatggatggattcgaatggcaccgagggtactccatccgtagagggctcttctacgtggatttcttgtcgcaagataagatgctgctgcctaagtcctctgccctcttctaccagaagctgatcgagaaaaacggattccccccacttccggaaaatcagccgcttgaaggcactttcccatgtgacttcgcgtggggagtggtggacaactacatacaggtgtcccagctgaccaagcccatatcgtccctcaccaaaccataccac

SEQ ID NO: 149736 - DNA, 1647 bp, Artificial Sequence
  derived and/or modified sequence
atgcctgcttctgctccccctcgacgtccaagacccccaccgccgtcattgtccttgttactcgtgctactggggttgggcgggaggcgcctgcgggctgagccaggcgacggagcccagacctgggccagatttagcaggccccccgccccagaagccgccggcctgttccagggaacctttcccgacgggttcctctgggccgttggcagcgccgcctaccagactgaaggaggatggcagcagcatggcaagggtgccagcatatgggacacatttactcatcacccactggcgcctcccggcgatagtcggaacgcctcccttcccctgggagcccctagccccctgcagcccgccacaggggatgttgcctccgactcttacaacaacgtgttccgagacacagaagccttgcgcgagctgggggtgacgcactatcgcttctcgatctcctgggctcgagtgctacccaatgggtcagctggcgtccccaaccgggagggactgcgctattatcggagattgctggagcgcctgagggaactgggagttcagccggtggtgacactatatcactgggaccttccccagcggctccaggacgcctacggggggtgggctaaccgggcacttgctgaccattttcgggattatgcagagctttgctttcgccactttggtggccaggtgaaatactggatcacaatcgataatccgtacgtcgttgcgtggcatggctacgctaccggtcgcttggcacccggtattcggggttcccctaggctgggctacttagtggctcacaacctgctgctcgcccacgcaaaagtgtggcatctgtacaacacgtcctttcgaccgacacagggcggccaggtatcaatcgctcttagcagccactggattaatcctaggcggatgactgaccatagcattaaagaatgccagaagtctcttgattttgtgctggggtggttcgccaaaccagtttttatcgatggggactatcctgaatccatgaagaataatctgagcagtattctcccagacttcacagaatccgaaaaaaagtttatcaaaggcaccgccgacttcttcgctctgtgtttcggccccaccctgtctttccaactcctcgaccctcacatgaaatttcggcagctggaaagtccaaatctccgccagctcctctcctggatcgacctggagtttaatcatcctcagatctttatcgtggaaaacggatggtttgtgagtggaacaaccaaaagggacgacgccaagtacatgtactatctgaagaagtttatcatggagacactcaaagcaataaagcttgatggagttgatgtgataggctatacagcgtggtcccttatggatggctttgagtggcaccgagggtactccatccggaggggacttttctatgtggatttcctctcgcaggataagatgttgctgccaaagagtagtgcactcttctaccagaagctgatcgagaagaacggctttccgcctctgccagagaaccaacccctagaggggacgtttccctgcgattttgcatggggagtcgtcgataactatatccaggtttcacagttaacaaagccaatctcatccctaactaaaccataccat

SEQ ID NO: 149737 - DNA, 1647 bp, Artificial Sequence
  derived and/or modified sequence
atgccagcgagcgctcctccccgccggccacggccaccccctccttctttgagcttgctcctggtccttctgggacttggagggcgccgcttgcgcgccgaacccggtgatggagctcagacctgggcaaggttctctagaccacccgccccagaagccgctggactgttccagggaacatttccggacggctttctatgggcagtcggctccgcagcctatcagacagagggggggtggcaacagcacggtaagggcgccagtatttgggatacgtttacgcatcaccctctcgcacctccgggggatagtaggaacgcctcattgccattaggcgctccgtccccgctacaacctgccactggtgatgtcgcatccgactcctacaataatgtctttagagacacggaggctcttagagagctgggcgtaacccattaccgattcagcattagctgggcaagggtgctgcctaatgggtccgccggagttcctaatcgggaaggcctgcggtactataggagactcttggagagactgagggagctgggagtgcagcccgtcgttacattgtaccattgggacttgccccagaggttgcaggatgcttatggcggctgggctaaccgggctcttgccgatcattttcgggattatgcagaactttgtttccgacactttggtgggcaggtgaagtactggatcacaatagataatccatatgtggttgcctggcacggctatgctaccggccgcttagctccaggaattcggggaagccccaggctcgggtatcttgtggcacataaccttctactggcacatgccaaggtttggcacctatacaatacatcctttagaccaacacagggcgggcaggtgtccatcgccctttcatcacattggatcaatccacggcggatgacggatcacagcattaaggagtgccaaaagagcctggatttcgtgttaggctggtttgcaaagcctgtctttattgacggagattaccccgaaagtatgaagaacaacctttcaagcatactgccggactttacagagagcgagaagaaattcataaaggggacagctgactttttcgccctctgtttcggaccaaccctctccttccaactgctggatccacacatgaagtttcgtcagctggagtctccaaacctgagacagctgctttcttggatcgacctggaattcaaccacccccagattttcatcgtagaaaatggctggttcgtgtctggtaccacaaaacgggacgacgccaagtacatgtattacttgaagaagttcatcatggagaccctgaaagctataaaactggacggcgtggacgtgatcggatacaccgcctggagtttaatggatggttttgaatggcacaggggctactctattaggaggggtctgttctacgtggatttcctgtcccaggataagatgctgctaccaaagagtagcgctctgttttatcagaagctgattgagaagaacgggttccccccactccccgaaaatcagccactggaaggtacctttccatgtgatttcgcttggggagtggtggacaactatattcaggtgtcacagctcacaaagcccatctcatcactgaccaaaccatatcac

SEQ ID NO: 149738 - DNA, 1647 bp, Artificial Sequence
  derived and/or modified sequence
atgccagcgtcggctccgccacggcgcccacggccgccccctccctcccttagcctcttgctggtgctgctggggctcgggggaagaaggctgagggcggagccgggggacggagctcaaacttgggcacgcttctcgcgccctccggctccggaggcagccggattgtttcaaggcacgttcccggacggtttcctttgggccgttggatcggccgcataccagaccgaaggagggtggcagcagcacgggaaaggcgcatccatctgggataccttcactcaccatccgctggccccgccaggagactcgcggaacgcctccctgcccctgggtgcaccgtcccctctgcagccagccactggcgacgtggcgtccgactcatacaacaacgtattcagagacactgaagcgctccgggaactgggagtcacccattacaggttctccatctcatgggcacgcgtgctccccaacggatcggcgggggtcccgaaccgggaggggcttcggtactaccggcggctcctcgagagactgcgcgagctcggggtgcaaccggtggtgaccctgtaccactgggatcttccacaacgcctgcaggacgcatatggaggatgggccaaccgagccttggccgatcacttcagggactacgcagagctgtgcttccgccatttcggaggacaggtcaagtactggatcaccatcgacaatccatacgtggtggcgtggcacggctacgccactggtcgcctcgccccgggaatccgcggatccccgcgcctgggctatctggtcgcccacaacctcctgctcgcgcacgccaaggtgtggcacctgtacaacacctcattccggccaacccagggaggtcaggtgtccatcgccctgtcctcgcattggatcaatcccagacgcatgactgaccactcgatcaaggagtgccagaagagcctggattttgtgctgggctggttcgccaagcctgtgttcatcgatggagattacccagagtctatgaagaataatctctcctcaatcctgccggatttcacggaatccgagaagaagtttatcaagggaaccgccgacttctttgcactgtgctttggtccaaccctctccttccagctcttggacccccacatgaagttcaggcagctcgagtcaccgaacttgcgccaattgctttcatggatcgatctcgaattcaaccatccacagattttcatagtcgagaatggttggttcgtgagcggcaccactaagagagacgacgctaaatacatgtactacttgaaaaagttcatcatggaaaccctgaaggcgatcaaactggatggcgtcgacgtgataggatacactgcttggtcccttatggatggcttcgagtggcaccgaggatacagcatccggcggggactcttctacgtggatttcctgtcgcaagataagatgctgctccccaagagctccgcgctgttctaccagaaactgatcgaaaagaacggattcccccctctcccggaaaaccagccccttgaaggcacctttccgtgcgacttcgcctggggcgtcgttgacaattacattcaggtgtcgcaactgacgaagccaatctcatccctgactaagccataccat

SEQ ID NO: 149739 - DNA, 1647 bp, Artificial Sequence
  derived and/or modified sequence
atgcccgcctcagcccccccccggcggccacgacctccaccgcctagtctctctctccttctcgttctcttggggctcggagggcggcggctaagagctgaaccaggggatggagcacagacatgggctcgattctcacggcccccagcgcctgaggcagcagggctgtttcaagggacttttcctgatggatttctttgggccgtggggtccgcagcctatcagacagagggggggtggcagcaacacgggaaaggggcttcaatctgggatacatttacacaccaccccctcgccccacccggggatagtaggaatgcttcgctacctctcggagccccatcccccctacaaccagccacaggagatgttgcttccgattcctataacaatgtcttcagagatactgaggctctccgcgaattgggggttacacactatcggttttccatttcctgggcacgggtgctaccaaatggatcagctggagtacccaatagggaaggactccgatattataggcggctcctcgaacgacttcgggagctgggggtacagccagtagtaacactgtatcattgggatctgcctcagcggctccaggatgcatatggaggatgggccaatcgagccctcgccgatcacttccgagattacgccgaactatgctttaggcacttcggggggcaggtgaaatattggataacaatagataatccctatgtcgttgcttggcatgggtacgcgactggacgcctggccccagggattagggggtcaccccgcctggggtatctcgtggctcacaatctactattagctcatgccaaggtgtggcatctctataatacaagtttccgcccaactcaggggggacaggtgtccatagctctctcatcacattggatcaacccccggagaatgacggaccatagtatcaaagaatgtcagaaatccctggattttgtgctgggatggtttgctaaaccagtctttattgacggagattatcctgaatcaatgaagaacaaccttagttccatattacccgactttacagaatctgaaaagaaatttatcaaagggacagctgatttttttgccctctgttttgggcccactttgtccttccagcttctcgacccacatatgaaattcaggcagctggaatcccctaacctaaggcagttactttcatggatcgatttagaattcaaccacccacagatatttatcgtagagaacgggtggtttgtgtctggaacaacaaaacgggatgacgcgaagtatatgtactatcttaaaaaatttatcatggaaactctaaaagctatcaaactggatggagttgatgtgatcggatatactgcatggtcactaatggacgggttcgaatggcaccgggggtattccatcagacgaggactcttctatgttgatttcctatcccaggataaaatgctacttccaaaatcttccgccctcttctatcagaagctgattgagaaaaacggattccccccacttccagagaatcaaccactagaaggaactttcccatgtgattttgcctggggagtcgtggataactatatacaggtttctcagttaactaaacccatttcctcattaacaaagccatatcat

SEQ ID NO: 149740 - DNA, 1647 bp, Artificial Sequence
  derived and/or modified sequence
atgccagcgtcggccccaccaagacggccccgtccgccgccgccgtcactcagcctgctgctggtcctgcttgggcttggaggtcggagactcagggcagaacctggtgacggcgcacaaacttgggcacgattttctcggcctccagcacccgaagcggcaggactgttccagggaacctttccagacggctttttgtgggctgtcggtagcgcagcataccagacggaggggggatggcaacagcatggaaagggcgcttcaatctgggatacctttactcaccatcctcttgcaccccctggagactcgagaaatgcatcgctgccactgggcgccccaagccccctgcaacctgccaccggagatgtggcctcggacagctacaacaatgtgttccgtgacaccgaagctctccgcgagcttggagtgacccactacagattctcgatttcatgggcaagggtgctcccaaacggtagcgcaggagtgcctaaccgcgaggggttgagatactaccgtagactgcttgagcgccttcgcgaacttggcgtgcagcctgtggtgactttgtaccattgggatctgccccaaagactccaggatgcctacgggggatgggcaaaccgcgcactggccgatcatttccgcgattacgctgaactctgtttccggcattttgggggtcaggtcaaatactggattactattgataatccgtacgtcgtggcatggcatgggtacgcgactgggcgccttgcaccaggaattcgcggatcccctcgattgggctaccttgtggcacacaacctgcttctggcgcatgcaaaggtgtggcatctgtacaatactagcttccgaccaacccagggtggtcaagtgagcatagcactgagctcacattggattaacccccggaggatgacggaccacagcataaaggaatgtcagaagtcgctggattttgtgctgggctggttcgcaaaacctgtctttatagatggagattaccctgaatctatgaagaataacttgtccagcatcctgccggattttactgagtcagagaaaaagttcattaagggaacggcggatttcttcgcactttgttttgggcctactctgtcctttcaacttctggaccctcatatgaagttccgccaacttgaaagcccaaacctgcgccaactgctttcctggattgatctggaattcaaccatcctcagatattcatcgtagaaaacggatggtttgtctcgggtactacgaaaagagatgacgcgaaatacatgtactacctcaaaaagttcatcatggaaactctcaaagccatcaagctcgacggtgtggatgtgatcgggtacaccgcgtggtcccttatggatggatttgagtggcatcgcggttactcgattaggcggggtctgttttacgtggattttctgtcacaggacaagatgcttctgccaaagtcgtccgcactcttttaccaaaaactgattgaaaagaatgggtttcctccgctcccagagaatcagcctttggaagggaccttcccgtgtgactttgcctggggcgtggtcgataactacattcaggtgtcacaactgaccaagccgatatcttcacttaccaagccgtaccat

SEQ ID NO: 149741 - DNA, 1647 bp, Artificial Sequence
  derived and/or modified sequence
atgcccgctagcgcccctcctagacgacccagacctccccccccgtcactgtctcttctgttggtcctgctgggcctgggcggtaggagacttcgcgccgaacctggcgatggcgcccagacatgggctcgcttctcaaggcccccagcaccagaagccgctggactgtttcagggcacattccccgatggtttcctatgggccgtgggatccgccgcttatcagaccgaaggtggatggcagcagcacggcaaaggagcatccatttgggacacatttacccaccacccactggccccccccggagactcccgaaatgcaagcttgccgctgggtgcccctagcccgctccagcccgcgacaggggatgtcgcgtctgattcttataataatgtattccgagacaccgaggccctccgggaactgggcgtaacacattaccggttctctataagttgggcaagggttctcccgaatggtagcgctggggtgcctaatcgggagggtctgcggtactaccgtcgtttgctggaacggcttagggagttgggggttcagcctgttgtgactttgtaccactgggacttgccacaacgcctgcaggatgcctatggcggctgggcaaatcgggccctggcagatcacttccgggattacgcagagttatgcttcagacattttggcggccaggtgaaatactggatcacaattgataacccatacgtggtagcgtggcacggttatgctactgggcgcctggctccggggattagagggtcgccccgcttgggatacctggtcgcacacaatctgctacttgcccacgcaaaggtctggcatttgtataacacaagcttcaggcctactcagggaggtcaggtcagtatagcacttagctcgcattggattaatccccgcaggatgacggaccattccatcaaggagtgccagaagtcgctggactttgtcctgggatggttcgcaaagcccgtctttatcgacggcgattatcccgaaagtatgaagaacaatctttcaagcatcttgcctgatttcaccgagtctgagaagaagttcataaaaggtaccgccgatttcttcgcactttgctttggacccacactgtcgtttcaactgctggacccccatatgaagttccgacaactggagtccccgaacctccggcagctgctgtcctggatcgacctggagttcaaccaccctcagatcttcatcgtcgaaaatggttggtttgtgtccggcactacgaagcgggacgatgccaaatacatgtactacctgaagaagttcatcatggaaaccttgaaagcaattaagctagatggcgtggatgtaattggctacaccgcctggagtttgatggatgggtttgagtggcatcgaggctattcgattcgacgaggactgttttacgtcgacttcttgtctcaggataagatgctcctcccaaagtcatccgccctgttctatcagaagttgatagaaaaaaacggattccctcccttgcctgagaatcaaccacttgagggaacattcccttgcgatttcgcgtggggcgttgttgataattatatccaggttagccaactcacgaagcccatttccagtctgacaaagccctatcat

SEQ ID NO: 149742 - DNA, 1647 bp, Artificial Sequence
  derived and/or modified sequence
atgccggcctccgcgcccccacgccggcctagaccgccgccaccgtccctgtctctgctgctggtgctcctggggcttgggggacggaggctgcgggccgaacccggcgacggggctcagacttgggcgagattttccaggccgccggcgccagaggctgctggattgttccaaggtacttttcccgacggattcctgtgggccgtgggaagcgccgcgtaccagactgagggaggctggcagcagcacggaaaaggagctagcatctgggacactttcacccatcatccgctggcaccgccgggagactcgcggaacgcctcccttccgctcggcgcaccctccccgttgcaacccgctacgggtgacgtcgcttcagactcatacaataacgtgttccgcgataccgaggcgttgcgggaactcggcgtcactcactacagattttccatcagctgggctcgggtgttgcctaacggaagcgcgggtgtgcccaatcgggaaggactgcggtattaccgccggttgctggagaggctccgggagcttggagtgcaaccagtcgtcaccctctaccattgggatctcccacagcgcctgcaggatgcgtacggaggctgggcaaaccgggccctcgccgaccacttccgggactacgccgagctgtgttttcggcacttcgggggacaggtgaaatactggattaccatcgataacccatacgtggtggcgtggcatggatacgctactggacgtctggccccgggaattcgcggatccccgagactcggttatctggtggcccacaacctcctgctcgcccacgctaaggtctggcatctttacaacacttccttcaggccaacccaggggggccaagtttcgatcgcactgagcagccattggatcaatccacggcgcatgaccgatcattccatcaaggagtgccagaagtcgctggacttcgtgctgggttggttcgccaaacctgtgttcattgacggcgactacccagaaagcatgaagaacaacctctcgtccattctcccggatttcactgaatcagagaagaagtttatcaagggtactgcggatttcttcgccctgtgcttcggacccacgctgtcgtttcagctgctcgatccccacatgaagttcaggcaactggaatcgcctaatctgcgccagctgctgtcgtggatcgacctggagttcaaccatccgcaaatcttcatcgtggaaaatggatggttcgtctcgggcactacgaagcgtgacgacgccaagtatatgtactacctgaagaaattcatcatggaaaccctcaaggctatcaaacttgatggcgtggatgtgatcgggtacactgcctggtcgctgatggatggattcgaatggcatcgaggatacagcatcagacggggcctcttctacgtcgattttctctcccaagacaagatgctcttgcctaagagctccgcgctgttttaccagaagctgatcgagaagaacggctttcctccgctgccggaaaaccagcctttggagggcacctttccatgcgacttcgcctggggggtcgtcgacaattacattcaggtgtcccagctgaccaagccgatttcttcgcttaccaagccataccat

SEQ ID NO: 149743 - DNA, 1647 bp, Artificial Sequence
  derived and/or modified sequence
atgcccgcttccgcgcctcctcggaggcctcgaccaccgcctccatcgctctcgctccttcttgtgctgcttggtcttgggggtcggaggctccgggcagaacctggtgatggcgcacagacctgggctagattttcaaggcctccagcacctgaagcagcaggtctgtttcaaggaacgttcccagatgggttcctttgggcagtgggctctgcggcttaccagactgaaggcggttggcagcaacatggaaagggagcctccatttgggatacctttactcatcatccactggcgcctccgggcgattcacggaacgcgtctcttccactcggagcaccatcgcctctccaacccgcaaccggggatgtggcatcagattcgtacaataacgtgtttcgtgatactgaggcactcagggaattgggagtgactcattacaggttctccatttcgtgggcaagagtcctgcctaacgggtcggcaggtgtccccaatagggagggactgagatactaccgccgactcctggaacgacttcgggagctgggagtgcagcctgtggtcactctttatcattgggacctgcctcagcgccttcaagacgcatacggtggatgggcgaatcgtgcactcgcggaccatttccgggactacgccgaattgtgcttcagacactttggaggtcaagtgaagtattggataacgatagacaatccatacgtggtggcctggcatggatacgcaaccggacggcttgcgccaggtattcgcggatccccgcgactgggatacctggtggcacataacttgctgctggcccatgcaaaggtctggcatctgtacaacacctcattccgtccaactcagggtggtcaagtctcaattgcgcttagctcgcattggattaacccacgaagaatgactgaccactcaattaaggaatgtcagaagtcgctggattttgtgcttggatggtttgctaagccagtgttcatcgacggcgactacccagaatccatgaaaaacaatctttcatcgatcctgccagatttcaccgaatcggagaagaagtttatcaagggcaccgctgatttcttcgctctctgttttgggccaaccttgtcctttcaacttctggatccgcacatgaagtttagacagcttgagagccctaacctgagacaacttctgtcatggattgaccttgagttcaatcaccctcagatctttatcgtggaaaacggatggtttgtgagcggaaccactaagagagatgatgccaagtatatgtactacttgaaaaagttcatcatggaaacgctgaaggccattaaactggacggcgtggacgtgatcggttacactgcgtggtcacttatggatggattcgaatggcataggggttacagcatacgtcgtggtttgttctacgtcgactttctcagccaggataagatgcttctgcccaaaagctcagcactgttttaccaaaagctgattgagaaaaatggctttcctcctctgccagagaaccaaccactggaaggtacctttccgtgtgatttcgcttggggagtggtggataactatattcaagtctcgcaattgaccaagcccatttcctcgctgaccaagccctaccac

SEQ ID NO: 149744 - DNA, 1647 bp, Artificial Sequence
  derived and/or modified sequence
atgccagccagcgcacccccgaggaggcctcggccaccgcctcctagtctatcactgcttctggtcctattgggattaggaggcagacggcttagggcggagcccggtgatggagctcagacctgggcacgtttctcccgccccccagctcctgaggctgcaggattgttccaaggtacgtttcccgatgggttcctctgggccgtgggttctgctgcttatcaaacagagggcgggtggcagcagcatgggaagggcgcgtctatttgggacacgttcacccatcatccactggccccaccaggcgattccaggaacgcctccctcccactcggggctccctcccctcttcagccagccacaggagatgtggcgtctgatagctacaataatgtgttcagggatacggaggcactgcgcgaactgggggtcacccactaccggtttagcattagttgggcacgagtgctccccaacgggagtgcaggcgttcccaatagggaagggctgaggtactacagacggctgttggaacggctgcgcgagctcggtgtgcagcccgtagttacactttatcactgggatctgccccagaggcttcaagatgcctacggaggttgggcaaatcgcgccctggcggatcatttcagagattatgccgagctctgctttaggcacttcggcggtcaggttaaatattggatcactatcgataacccgtacgttgtagcgtggcacggatacgcgaccggccggctggcccccggaattagagggagtcctaggcttggctacctggttgcccataacctgctgttggcacatgcgaaggtctggcatctgtataacacatcgtttcgaccaactcagggagggcaggtgtccatcgcattgtcaagccactggatcaaccccaggaggatgactgatcactccatcaaagaatgtcagaaaagtctggacttcgtgctcggctggtttgcaaagcctgtctttatcgatggggactatcccgagtcgatgaaaaacaatttatcctcaatactgccagattttactgaatctgagaagaaatttattaagggaacggccgatttcttcgctttgtgctttggacctactctctctttccagttgctggatccacacatgaagttccgacagttagaatcgccaaatttgagacagttgctctcctggatcgacctggaatttaaccatccacagatcttcattgtagagaacgggtggttcgtgtccggcactacaaagagagacgatgctaagtatatgtattatctgaagaaattcatcatggaaaccctgaaagccattaagctggatggtgttgatgtgatcggatacacggcttggtcactgatggatggatttgagtggcatcggggctactccatccgacgtgggttgttctatgtcgattttctgtcccaagacaagatgctgctaccaaagagtagcgcgctcttttaccaaaagctgattgaaaagaacgggttccctcctctccctgagaatcagccactagagggtacattcccgtgcgatttcgcctggggcgtggttgataattatattcaggtaagccagttgacaaagcctatctcttccctcaccaagccataccat

SEQ ID NO: 149745 - DNA, 1647 bp, Artificial Sequence
  derived and/or modified sequence
atgccagcaagtgctccccctagacgcccacggcctccgcctcctagcttaagcctgctgctggtgttactaggcttgggcggcaggcgcctgcgcgccgagcccggggatggcgctcagacctgggcccgattctcaaggccccccgcacccgaggccgccggcctgttccagggcactttccctgatggcttcctatgggccgtggggagcgctgcctaccagaccgaagggggctggcagcagcatgggaaaggggcttccatttgggatacctttacacaccatccgctggcccctcctggagactctcgcaacgcctctcttccgctgggcgcaccaagtcctctgcagcccgccaccggcgatgtagccagtgattcttacaacaatgtgtttagggacacggaggcgctacgcgaactcggggtgacccattatcgattctctatctcttgggcaagagttctgccaaatggcagcgctggggtgcccaatagggaggggttacgttactatcggcgtctactcgagaggttgcgggagctgggggtacagcccgttgtgacgctttaccactgggatctgcctcagcgtttgcaagacgcatacggaggctgggcaaatcgggctctggccgaccactttagagattatgccgagttgtgttttcggcactttggcggccaggtgaagtattggattaccatcgataacccctatgtcgtcgcttggcacggttacgctaccggccgcctcgcgccagggatcagaggcagcccccgactcggctacctagtcgcacacaacctgctcctcgcccatgcgaaggtatggcacctttataataccagctttaggccaactcaaggcggccaggtctctattgccttgtcatcccactggattaaccctcgaagaatgaccgatcacagcattaaggaatgtcagaagagtttggacttcgtgctcggctggtttgctaaacctgttttcatcgatggagactaccctgaatccatgaagaacaaccttagctctatattacctgacttcacagagagcgaaaagaagtttatcaagggcactgccgacttctttgcattgtgttttggacccaccctatcatttcagctgttggacccccacatgaagttcaggcaacttgaaagcccaaacctaaggcagctgctgagctggattgatctggaatttaaccatcctcagatattcatcgtcgagaatgggtggtttgttagcgggaccactaaacgggacgatgccaagtacatgtattaccttaagaaatttattatggagacacttaaggcgattaagctggacggtgtggacgttattggttacaccgcctggagtctaatggacggtttcgagtggcatagagggtatagcattcgccggggattattctatgtagactttctgagccaggataagatgctgctgccaaagtcatctgcactgttttatcaaaagctgattgaaaaaaatggctttccacctttgccagaaaaccaacccctggaggggacattcccatgtgactttgcctggggcgttgtagataattacattcaggtttcgcagttaacaaagcccatttcttcactaactaaaccatatcat

SEQ ID NO: 149746 - DNA, 1647 bp, Artificial Sequence
  derived and/or modified sequence
atgcccgcctctgctcctcctcgtcgcccaagaccacccccgccttctctctcgctccttctagtcttgctcggcctcggcgggcgaaggcttcgtgcggagccgggcgatggcgcacagacatgggccaggttttcacggccgcctgcgcccgaagccgctggcctttttcagggcactttcccagacgggtttctgtgggcggtgggtagtgccgcctatcagacagagggaggctggcagcaacacggcaagggcgcgtctatctgggacacattcacccatcaccccttggcccctccaggggattctcgtaacgccagcttgcctctgggcgccccatccccactgcagccggccactggagacgtggcctcggactcctacaacaacgtgttcagggatacggaggccctgagagagttgggtgtgacacactaccgcttctcaatcagttgggcccgagtcctgcctaacggctctgccggagtgcccaatagggagggtctccgatactaccggcgattgctggagcggttgcgggagctcggtgtccagccagttgtcacattgtaccattgggatctgccccagagattacaagacgcctacggcggctgggctaaccgtgccctggcagatcacttccgcgactatgctgagctgtgctttagacactttgggggtcaggtgaagtactggattactatcgataacccgtatgtggtggcatggcacggttacgctaccgggcgcctggcacccggtatcagaggctctcccaggctaggttatctggtcgctcataacctgcttttggcccacgccaaagtgtggcatctgtataatactagctttagaccaacacaaggaggtcaggtgagcatagcactcagctcacactggatcaacccacggagaatgacagaccattctatcaaagagtgtcagaaatcactagacttcgttttgggctggttcgcgaaacctgtgttcattgatggggactaccctgagtctatgaaaaacaacttaagctcgatcctccccgacttcacggagagcgagaagaaattcatcaagggaactgccgacttttttgccctgtgcttcggtcctaccctcagtttccaattgttggacccacacatgaaattcaggcaacttgaatcccctaaccttcggcagttgctaagttggatcgatctggagttcaatcatccccaaatctttattgttgaaaacggctggttcgtgagcggaacaacgaagcgcgatgacgcgaagtatatgtactatctcaagaagttcatcatggagactctgaaagctattaagctggacggggtggacgtgatcgggtacacagcatggtctctgatggacggttttgagtggcatcgagggtacagcatccgcaggggcctattctacgtggactttctttcacaggacaaaatgttgctgccaaagagctctgccctgttctaccagaagcttattgaaaagaacggctttcctcctctgcctgagaatcagcccctcgagggaaccttcccgtgcgatttcgcctggggtgtcgtggacaattacatccaggtgtctcaactgaccaagcctatctcttccctcacaaagccataccac

SEQ ID NO: 149747 - DNA, 1647 bp, Artificial Sequence
  derived and/or modified sequence
atgcccgcatccgcacctcctcgccgccctcgcccacctccaccgagcctttctctcttgcttgtccttttgggactgggcggtcgaaggctgagagcagaaccaggtgatggtgctcagacttgggcaagattctcaagaccacccgcaccggaggctgccgggctgttccaggggacttttcctgacggatttctttgggcagtgggttccgcagcataccaaactgaaggaggctggcagcagcatggtaagggagcgtcaatatgggacacttttactcatcatccactggcaccacccggagattccagaaatgcatcgcttcctctcggagcaccctctccgcttcaacctgcaaccggggacgtcgcgtccgacagctacaataacgtgttcagggatacggaagcactgcgggaactgggcgtgacccattatcggttttccatttcgtgggcccgagttttgcctaacggttcagctggtgttccgaacagagaaggtctgcggtactacaggcgtctcttggaaagactgagggaacttggtgtccagcctgtggtgactttgtaccattgggatcttcctcaacgattgcaagatgcatacggcggttgggcaaaccgcgctcttgcggaccactttcgcgactacgcagagctgtgctttaggcactttggaggccaggtgaagtattggattactattgataacccttatgtggtggcatggcatggatacgcaaccggaagattggcgccgggaattcggggcagtccacgtctggggtatcttgtcgcgcataatctcctgctggcacatgctaaagtctggcatctgtacaacacctcgtttcgtcctacccaaggaggacaggtttccattgcactgtcgtcccactggattaaccccaggcggatgaccgatcactcgattaaggaatgtcaaaagtcgctggattttgtgttgggatggttcgcaaagcctgtgtttatagatggcgactaccccgagtccatgaagaataacctttccagcattctccccgattttaccgaaagcgaaaagaagttcataaaaggaactgccgacttttttgcactttgttttggtcctactctctcgtttcagcttctggacccccacatgaaatttcgccaacttgaaagccccaatctgcgacaactcctgtcctggatcgatcttgaattcaaccaccctcagattttcattgtggagaatggttggttcgtgagcggaaccaccaagcgagatgatgccaagtatatgtactaccttaagaaattcattatggaaactctgaaggccattaagctggatggtgtggatgtgatcggatacaccgcatggtccctcatggatgggtttgagtggcatcgggggtactccatccgaagaggccttttctacgtggattttctctcacaggacaaaatgcttctgccaaaatcatccgcgcttttctatcaaaagctgattgagaagaacggtttcccacctctgcctgagaatcagcctctcgaaggaacttttccttgcgatttcgcatggggtgtggtggataactacatacaggtatcacaactcaccaagcctatttcgtcactcactaagccgtaccat

SEQ ID NO: 149748 - DNA, 1647 bp, Artificial Sequence
  derived and/or modified sequence
atgccagcttctgccccacctcggcggccccgcccccctccgccttcactcagcttactccttgtgctgcttggactgggcggaaggagattacgcgcagaacctggcgatggcgcccagacatgggcccgcttttcacggcccccagcccctgaagctgctgggctcttccagggaaccttccccgacggttttttgtgggcagtgggcagcgcagcgtaccaaactgaaggaggctggcaacagcatggcaaaggcgcctctatttgggatactttcacacatcatccccttgccccccccggcgattcgcggaatgcctctctgcccttaggcgcacctagtccgttacaaccagctaccggagatgtggcctctgactcttataataacgtctttcgcgacaccgaagctctgagagagctgggtgtgacgcactatcggttttctattagctgggccagggtgcttccaaacggatcagcaggtgtgcctaatagggagggtctacggtactacaggcgcctgctggagcgccttcgcgaactaggtgttcagcccgttgtgacgttatatcactgggatctgcctcagagactgcaggatgcgtatgggggctgggccaatagggcgctggcagatcatttccgggactacgctgaactgtgctttcgccattttggaggtcaagtcaagtattggatcacaatagacaacccctacgtagtggcatggcacggatacgccacaggtaggctggcgcccggcatcagggggagcccccggctgggttacctggttgcccacaaccttctgctggcgcacgcgaaggtttggcacctgtataatacttcgttcaggccaacgcagggcggacaggtctctattgcgctttcttctcactggattaaccctcgcagaatgaccgaccactctataaaggagtgtcagaagtcgctcgacttcgtgctggggtggtttgcaaagcccgtattcatcgacggggactatcccgagtctatgaagaataacctttcctccatactgccagattttaccgaaagcgagaagaagtttattaaaggtactgccgacttttttgctttgtgcttcggcccaacactgtcatttcagctcctcgaccctcatatgaagtttcgacagctggagagtcctaacctgagacagttgctgtcgtggatcgatctggagtttaatcatccccaaatctttatcgtagagaacggatggttcgtcagcgggaccacaaaaagggatgacgccaagtatatgtactatctgaaaaaattcatcatggaaactcttaaagccataaagctcgacggcgtcgacgtgattggctacacggcttggagcctgatggacgggttcgagtggcaccgaggatactcaatccgacgaggactgttctatgttgactttctgagtcaggataagatgttgctccctaaatcgtccgcactgttttatcagaaactaatcgaaaagaatggtttccctccactgccagaaaaccagcctctggaaggcacctttccgtgcgattttgcttggggcgtggttgataattatatacaggtaagtcagctgacaaaacctattagcagtttgacgaaaccctatcac

SEQ ID NO: 149749 - DNA, 1647 bp, Artificial Sequence
  derived and/or modified sequence
atgcccgcatctgcccctccccgtagacccagaccacctccaccttcgctttcacttctgcttgtccttcttggacttggcggacgcagactccgcgccgagcccggagacggagcacagacgtgggctcggtttagtaggccccccgcccctgaggcagcagggctctttcaaggaacgttcccggatggttttctgtgggccgtgggttcggcagcatatcagacggaaggaggatggcaacagcatggcaagggtgcgagtatctgggatactttcactcatcaccctcttgctccacccggagatagtcgaaatgccagtctcccactcggagcaccctcaccactgcagccagcaactggggatgtggcaagcgactcgtacaataacgtctttcgcgataccgaagcactccgtgagctcggagtgacccattacagattttcgatctcgtgggcacgggttctccctaacggaagcgccggggtgcctaaccgcgagggacttagatactaccgacggcttcttgaaagactgcgtgagcttggcgtgcaacctgtggtcactctgtaccactgggatctgcctcaacggctccaggacgcctatggagggtgggcaaatagagcacttgcggaccactttcgtgactacgcagagctgtgttttagacattttgggggacaggtgaagtactggattaccattgataatccatacgttgtggcgtggcatggctacgccaccggtcgcttggctcccggcattcgtggatcgcctaggttgggttacctggtggcacataacctccttcttgctcacgcaaaggtgtggcatctgtacaatacttccttcaggcctacgcagggtggccaggtgagcatcgctctgtcctcacactggataaaccctcgccggatgactgatcattcgatcaaagaatgtcaaaagagcctcgacttcgtgttgggatggttcgctaagccggtctttattgacggcgactaccccgaatccatgaaaaacaatctgtcatccattctgcctgactttaccgaaagcgaaaagaagtttatcaaaggaaccgcggacttttttgcactgtgtttcggaccaaccctgtcgtttcagctgctggatccccacatgaagttccggcaattggaatctcctaacctgagacaacttttgtcatggattgatcttgagtttaatcatccacaaatctttattgtggaaaacggttggttcgtctcagggactaccaaaagagacgacgccaaatacatgtactacctcaaaaagtttatcatggaaacccttaaagcaattaagctcgatggagtagacgttataggctacaccgcatggtcgctcatggatggttttgaatggcatcgaggatactcgattcggcgaggcctcttctacgtggatttcctgtcccaagataagatgctgctgcctaagagctcggcccttttctatcagaagctgatcgagaagaacggtttcccgccattgcccgaaaaccaacctcttgagggtacttttccttgcgatttcgcatggggtgtggttgataactatatacaagtctcgcaactgacgaagcctatttcctccctgaccaagccctaccac

SEQ ID NO: 149750 - DNA, 1647 bp, Artificial Sequence
  derived and/or modified sequence
atgccagcctccgccccacccagaaggcctcggccccctccaccatcactttccctgctgctggttctgctgggtctggggggcaggagattgcgcgccgaaccaggagacggtgctcaaacctgggcccggttttcgcggccccctgcacctgaagcagcaggattgtttcagggcacgtttcctgacggcttcctgtgggccgtgggatccgcagcgtaccagactgagggtgggtggcaacaacacggcaaaggtgcatcaatctgggacactttcacgcaccacccccttgcaccacctggagactcacgaaatgcctctctccctcttggcgccccttcgcccctgcagcctgcgaccggtgacgtcgcgtcggattcatacaacaacgtgtttcgcgacactgaagcactccgagaattgggcgtgacccactacagatttagcatctcctgggcacgtgtgctgcctaatggtagcgccggcgtccctaaccgggagggccttcgatactacagacggctgctcgaacggctccgggagctcggcgtgcaaccagtcgttaccctttaccactgggatcttcctcaacgactgcaagatgcttatggtggttgggcaaatagagccctggccgatcattttcgcgactatgctgaactttgctttcgccatttcggtggtcaagtgaaatactggatcacgattgacaacccctacgtggtggcatggcacgggtacgcaaccggacgtttggcccccggaattagaggatcgcctaggcttggttacttggtcgcacataatcttctgcttgcgcatgcaaaagtctggcatctttacaatacctcatttagacctactcagggtggacaagtctcgattgctttgagcagccattggattaacccgagacgcatgactgatcacagcataaaggagtgtcaaaagtcccttgatttcgtgctgggatggttcgcaaagcctgtgttcatcgatggggattaccctgaatcaatgaagaataacctttcgtccatacttccagatttcaccgagtcggagaaaaagttcattaagggtaccgcagacttttttgcgctttgcttcggacctaccctgtccttccaattgctggatccccatatgaaatttcgacaactcgagtcccctaacctgaggcaacttctgtcatggatcgatctcgagtttaaccatcctcagattttcatcgtggagaacggctggtttgtgtcgggaacgacgaagagagacgacgcaaagtatatgtattaccttaagaagttcataatggaaacccttaaggcgatcaagctggacggagtggatgtcattggatacaccgcttggagcctgatggacggttttgaatggcatagaggttacagcatcagaagaggtcttttctatgtggattttctgagccaagacaagatgctgcttccaaagagctccgcactgttctaccaaaagctcattgaaaagaacggttttccgcctctgccggaaaatcaacctctggaaggaacgtttccttgcgattttgcctggggagtggtcgataactacatacaagtctcccaacttactaaaccgattagcagcctgaccaaaccctaccat

SEQ ID NO: 149751 - DNA, 1647 bp, Artificial Sequence
  derived and/or modified sequence
atgcctgcctcagcacccccccggcgccctaggccccctcctccatctcttagtctgcttctggttttgctggggctcgggggccgcaggcttcgggcggaaccaggagatggcgcccagacctgggctcgcttctctaggccccccgcccctgaggccgcgggcctgttccagggaactttcccggacgggttcctttgggccgtggggagcgcagcataccagactgagggcggttggcagcagcatggtaaaggcgcatcaatctgggacacttttactcaccatccgctggccccacccggcgactcacgcaacgcatctttgccattgggcgcgccctctccactgcagccagctaccggagatgtggctagtgatagctataacaacgtatttagagatacagaggctttgcgggaactcggagtgacccactaccgcttctccatcagctgggctagagttctgcccaatggtagtgcaggtgttccaaatcgcgaaggtctgcggtattacaggcgcctcctcgaaaggctccgggaactgggtgtgcagcccgtcgtcaccctctaccactgggatcttcctcaacggctgcaggacgcctatgggggatgggccaaccgagcactcgccgaccactttcgggattacgccgagttgtgttttcggcacttcggtgggcaggttaagtattggattactattgataacccttacgtggtggcctggcacgggtatgcaaccggacggctggcccccggaatccggggctcacctagactcgggtatctggtcgcacacaacctgctcctggctcatgccaaggtatggcacctttacaatacaagttttcgccccactcagggagggcaggtgtctatcgccctgagttcccattggatcaacccccggcgaatgacagaccactccatcaaggagtgtcagaaatccttggattttgtcctgggctggttcgccaaacccgttttcattgacggcgattacccggagagtatgaaaaacaacctgagcagcatcctccctgattttactgaatccgaaaagaaattcattaaaggcacggctgacttttttgccctgtgctttgggccaaccctgagcttccagctcctggatccccacatgaagtttcgacaattggaatcccccaatctgagacagctcctttcctggattgatttggagtttaatcatcctcagatcttcatcgtggaaaacggttggttcgtctcaggcacaacaaagcgggacgatgccaaatacatgtattatttgaagaagttcataatggaaaccttgaaagctatcaagctcgacggcgtcgatgtgattggatacacagcctggtctttgatggatggtttcgagtggcatcggggatactcaatcaggagaggactgttctacgtcgactttttgtcccaggacaagatgctcctgcctaaatcctccgctctcttttaccagaaacttatcgaaaagaacggtttcccccctcttccagagaatcagccacttgaagggaccttcccgtgtgatttcgcctggggagtggtggataactatatccaagtatctcagctgaccaagccaatatcctccttgactaaaccctaccat

SEQ ID NO: 149752 - DNA, 1647 bp, Artificial Sequence
  derived and/or modified sequence
atgcccgcctctgcccctcctcgccggcctcgtccccctcctccttctctttcattgttattggttctcttagggctgggcggaagaagactgagggccgagccgggggacggcgcacaaacttgggcaagatttagccggccccccgccccagaagccgccggtctattccagggtacgttcccagatgggtttctctgggcagtgggaagcgcagcctatcagactgagggtggatggcaacaacacggcaaaggagcttctatctgggatacattcactcatcatcctctcgccccgccaggtgattcacgcaacgcctctctgcctttaggagcaccgtcacccttacaacctgctaccggcgacgtagccagcgactcttacaacaacgtgtttcgggacacagaggcccttcgagagctcggagtgactcactatcggttcagcatatcctgggccagggtattgcctaacggcagcgccggggttcctaatagggaaggcctcaggtattatcgcagattgttagagcggctaagggaactgggagtgcagccagtggtgacactctaccattgggatctgccacagagactgcaggatgcctatggcggatgggcaaatagagcattggccgatcatttccgcgattacgcagaactgtgttttcgccattttggagggcaggtgaaatattggataactatcgacaatccatacgtcgtagcatggcatggatatgccaccggccgccttgctccaggcatccgaggaagcccccggttggggtacctcgttgcccataacctgcttctggcccatgcgaaagtgtggcacctgtacaacacttcgttccgcccaacccagggcggacaggtctccatcgctctgagctcccattggattaacccacgccgtatgaccgaccatagtattaaggaatgccagaagtccctggactttgttctgggctggttcgcaaaacccgtcttcatagacggagattatccagaaagcatgaagaataatctgagtagtatactgccggacttcacagaatcggagaagaaattcattaagggcaccgccgacttctttgctttgtgctttggaccaactctgagctttcagctccttgacccccacatgaagttcagacagctggaatcacctaatttacgccagctactgagctggatcgacttggagttcaaccatcctcagatctttattgtggaaaacgggtggtttgtttcggggacgactaaacgagacgatgcgaagtatatgtattatttgaagaaattcatcatggaaacgttgaaagcaattaagctggacggggtggatgtaatcggatacaccgcatggtccttgatggatgggttcgagtggcacaggggttactctattagacgaggcctgttttatgtcgattttctgagccaagacaagatgctgcttcccaagtcaagtgccctcttttatcagaagctaatagagaaaaacgggtttccgccactgcccgaaaatcaaccactggaaggtacattcccttgtgattttgcctggggggtcgtcgataactatatacaggtgagccagctcacaaaacctatatcctccctcacaaaaccgtaccat

SEQ ID NO: 149753 - DNA, 1647 bp, Artificial Sequence
  derived and/or modified sequence
atgccggcaagcgccccacctcggaggcccagaccacctccaccctcactctcgttgcttctggtcttgttgggtttgggagggcgcagactgagagcagaaccgggagatggagctcagacttgggcaagattttctcgcccaccggctcctgaagcagcagggcttttccagggaacgtttccggatggttttctgtgggccgtgggatctgcagcataccagaccgaagggggatggcaacagcacggaaagggcgcatcaatctgggataccttcacccatcaccctcttgcccctccaggagatagccgtaacgcgtcgcttccactcggggcaccaagccctctccagccggctactggagatgtggcatccgactcgtataacaacgtgttccgagataccgaagccctgagggaacttggagtgacccattaccgattctcgatcagctgggctcgggtgcttccgaacggttccgcaggtgtacctaaccgggaagggctcagatactaccggcggctgcttgagagactgcgggaacttggtgttcagcccgtggtcacgctctaccattgggaccttccacagcgacttcaagacgcctacggcggatgggcaaaccgggccttggcggatcactttagagactacgccgaattgtgtttccgacattttggtggtcaagtgaaatactggattaccatagataacccatacgtcgttgcatggcatggatacgcaactggaagattggcaccaggcataagagggtccccccgactgggatacctcgtggcgcataacctgcttctggcacatgctaaagtgtggcatctctacaatacgagctttcgcccaacgcagggtgggcaagtgtcgatcgcactttcaagccactggattaatccgaggcgtatgaccgatcatagcatcaaggaatgtcagaagtcgctggactttgtccttggttggttcgcgaagcctgtgtttattgacggtgattaccccgagagcatgaagaataacctgagctccatactcccagattttaccgaatccgagaagaagttcataaaggggaccgccgatttcttcgcactctgtttcggacctaccctgtcatttcagctgcttgatcctcatatgaagttcagacagcttgagagccctaacctgagacaacttctctcctggatcgatctggaattcaaccatcctcagatctttatcgtcgaaaacggatggttcgtgtcaggtacgactaagcgcgatgatgcgaaatacatgtactatctgaagaaattcattatggagactcttaaggccataaaactcgacggtgtcgatgtgatcggctacaccgcctggtcgcttatggatggcttcgaatggcaccggggatactccattcgccggggcctcttttacgtggattttctttcccaagataagatgctgttgcccaagtcctcggcactgttttatcaaaaactgattgaaaagaacggtttcccgccacttccagaaaaccaacctcttgaaggcacttttccttgtgacttcgcatggggagtcgtggacaactacatccaagtgtcgcagcttaccaagccaatttccagcctcaccaaaccttatcat

SEQ ID NO: 149754 - DNA, 1647 bp, Artificial Sequence
  derived and/or modified sequence
atgcccgcatccgccccaccccggcgtccccgaccacctcctccctctctatcccttctgttggtccttctaggactaggtgggcggcgactaagggctgaacctggcgacggcgcccagacgtgggccagattctcaagaccccccgcacccgaggccgctgggcttttccaaggcactttccccgacggattcctgtgggccgtgggaagcgctgcgtaccagaccgaggggggctggcagcagcacggcaaaggagcctcaatttgggataccttcacacatcaccccttggcacccccgggggactcaagaaatgcgagcctacccctgggggccccgagccccttgcagccagctaccggggacgtagcgagcgactcatataacaacgttttccgcgacactgaagcactcagagagctgggggtcactcattatcggtttagtatcagttgggctcgggtactccccaatggtagcgctggcgtgcccaacagggaaggcttgaggtactacaggaggctgctggagcgccttagagagctcggtgtgcaacccgttgtcaccttatatcattgggatctcccacagcgactgcaggatgcgtatggagggtgggctaatcgcgcactggcagaccattttcgcgattacgccgaattatgtttcagacacttcgggggccaggttaagtactggatcactatcgacaacccgtatgtagtagcttggcacggatacgctaccggccgactggctcctggcattagggggtctcccagactgggctacttagttgctcacaatctgttgttggctcacgcaaaggtgtggcatctttacaacacctcatttcgtcccactcagggtgggcaggtgtctatcgcactaagttcccactggattaaccctcgcaggatgaccgatcactcgataaaggagtgtcagaaatcactggattttgtcctgggctggttcgcgaaacctgttttcattgatggcgattaccccgagagtatgaaaaataacctgtctagcatccttcccgatttcacagagtcggagaaaaaattcataaaggggactgccgacttcttcgcgctctgcttcgggccaacactgtcgttccagctcctcgatccccacatgaagttcaggcagctggagagccctaacctgcggcagctactttcctggattgacctggagtttaaccatccacagattttcatcgtcgaaaacggctggtttgtgtcaggaacaacgaaacgcgacgacgccaagtacatgtactacctgaagaaattcattatggaaacgctcaaggccataaaattggacggagtggatgtcatcggttacactgcctggtctttgatggacggtttcgagtggcaccggggttactcgatccggagaggtctgttttacgtggacttcctctctcaggacaagatgctgctgcctaagtcatctgccttattctaccagaagctgatagaaaaaaatggcttccctccccttcccgagaaccaacccctggagggaacatttccatgtgatttcgcctggggtgtggttgataattacatccaggtgtctcagctcactaaacccatttcctcgctgacaaagccctaccat

SEQ ID NO: 149755 - DNA, 1647 bp, Artificial Sequence
  derived and/or modified sequence
atgcctgcctctgctccaccacgcaggcctcgaccgccaccacctagcctttctctgctgctggttttattggggctagggggcaggagactgcgggctgagcctggggacggggcgcagacatgggctcgtttttcaaggcctccagctccagaggcggctggcctgttccagggtacattcccggacgggttcctgtgggccgtgggctctgccgcttatcagactgaaggaggatggcagcaacatggcaagggggcatcaatttgggataccttcacacatcatcctctggccccccccggtgattcgaggaatgcttcacttccccttggtgccccttccccacttcaaccagcaacaggcgatgtggccagtgattcatacaacaacgtgttcagggatacagaagcccttagagagttaggtgtgacgcactataggttctccatctcttgggctagggttctgcctaacggaagtgcaggagtccctaatagagaggggttgcggtattatcgacggctcttggaacgtctgcgcgagctgggggtccagccagtggtgacactgtaccattgggatttaccacaaaggttgcaggacgcttatggaggttgggccaacagggcactagctgaccactttagggactatgccgagctgtgttttagacacttcggcggccaggtgaagtattggattacaatcgacaatccttacgttgtagcctggcacgggtatgcgacaggtcgattagcacccggcatacgtgggagccctcggctgggatatctggtagcacacaacctgctgctcgcccatgctaaggtttggcacctctataacacatctttcaggccaacccagggagggcaagtgtccatcgctctgtcaagtcactggatcaatccgcggcgaatgacggaccactctataaaagaatgccagaaatctcttgatttcgttttggggtggtttgcgaaaccagtcttcattgacggagattacccagagagcatgaagaacaatttgtcatccattctgccggactttacggaatcagagaaaaagttcatcaagggtactgcagatttctttgcgttgtgcttcggaccaacactcagctttcagctgttggacccccacatgaaattcaggcagcttgagagtcctaatttgcgccaactgctgtcatggattgatcttgagttcaaccacccacagatattcattgtggagaacggttggttcgtgtcgggaaccaccaaacgggatgacgcaaagtatatgtattaccttaaaaagttcataatggagacactgaaagctatcaaacttgacggggtggatgtgattgggtacactgcctggtctctgatggatggcttcgagtggcacagagggtactctatccgacgtggactattttacgtcgactttctgagccaggacaaaatgctcttacccaagtcatctgctctgttttatcagaagttgattgagaagaatggctttcctcctctcccggagaatcagccactcgaggggacttttccttgtgattttgcctggggagtggtggacaactatattcaggtttctcaattgactaagccaatcagttctcttacgaagccctatcac

SEQ ID NO: 149756 - DNA, 1647 bp, Artificial Sequence
  derived and/or modified sequence
atgccagcgtcagctcccccgcggcgccctagaccgcctccaccgagcttgagcctgctgttggtactcctggggctcggcggtcggagactgagagcggaaccaggcgatggcgcacagacctgggcgcgcttttcccgccctccggccccagaagctgcaggactgttccaagggacgttcccggacggattcctctgggccgtcggctcggcggcctaccaaaccgagggaggctggcaacagcatggtaagggagcaagtatttgggatacctttactcaccacccacttgcaccgccgggggacagccgcaacgcctcactgcccctcggagcaccttcgccgctccaaccggcgacgggtgacgttgctagcgacagctacaataacgtgttccgggatactgaagcgctgcgcgaacttggagtgacccactaccggttctcgatcagctgggcccgggtccttcctaatggatctgcgggggtgccaaatcgcgaaggccttagatactaccggcggctcctcgaaaggcttcgggaactgggtgtccagccagtggtcactctgtaccactgggacctgccacaacggctgcaggacgcctacggcggatgggccaatcgcgccctggccgatcacttcagggattacgctgagctgtgtttccgccacttcggagggcaggtgaagtactggatcacgattgataatccgtacgtcgtggcgtggcatggctatgctaccggtagacttgcaccgggaatccgcggaagccctcgcctcggatacttggtcgcacacaacctcctcctcgctcacgccaaggtgtggcatctgtacaacactagtttcagaccaactcagggaggacaggtgtcaatcgccttgtcatcccactggatcaacccgcgtcgaatgactgaccatagcatcaaggaatgtcaaaagtccctggatttcgtgctgggctggttcgcaaaaccggtgtttattgacggcgattaccctgagtccatgaagaataacctgtcgtcgatactgccggactttactgagtctgagaaaaagttcatcaagggaaccgcagatttctttgcgctgtgttttggaccaacccttagcttccaattgctggacccacatatgaagttccgccagctggagtcaccaaacttgaggcagctcctctcctggatcgaccttgagttcaaccatccgcagatctttatcgtggaaaatggatggttcgtctcggggactacgaagcgcgatgatgcaaaatacatgtactatcttaagaaattcatcatggagactctgaaggcgattaagttggacggagtggatgtgatcgggtacaccgcctggagtctgatggacgggttcgaatggcatcggggatactcaatcagacgcggtctgttttacgtcgacttcctgtcccaggacaaaatgctgctgccaaaatcgtccgccttgttctaccagaagctcatcgaaaagaacggtttccccccgctgccggagaaccagcccctggagggaaccttcccgtgcgacttcgcctggggggtggtagataactatatccaagtgtcgcaactcaccaaacctattagctccctgacgaagccgtaccat

SEQ ID NO: 149757 - DNA, 1647 bp, Artificial Sequence
  derived and/or modified sequence
atgccagcctctgcacctcctagaagacctcgaccaccacctcctagcctgagcctactgctggtgctgctgggcctaggcggccgaaggctgagggcagagccaggcgacggcgctcaaacttgggcccgcttttcccgcccccctgctccagaggccgcagggttattccaaggcacctttcccgatgggtttctgtgggctgtggggagtgctgcataccagactgaaggtggatggcagcagcatggcaaaggggcaagcatttgggacacatttactcatcatcccctggcacctcccggcgatagtcggaacgcctccctgcccctgggggccccatctcccttgcagcctgccaccggtgacgtggcatcagattcatataataacgtgttccgggatactgaagccctgagggagctgggcgttactcactaccggttctctatctcctgggctcgggtactccccaatggctctgccggggtccctaaccgggagggcctgagatactatagaaggttactggagagactccgggagctcggagtgcagcccgtcgtcacactgtatcattgggacctacctcagcggctgcaggatgcctacggaggctgggccaacagggctctggctgaccattttagggactacgccgagctatgtttcaggcacttcggagggcaggtgaagtattggattaccatagataacccatacgtcgtcgcttggcacgggtacgctaccggacggctggccccaggcatccggggttctccacggttaggctatctagtggcccataacctgctgttagcccatgcaaaggtgtggcatctatacaatacaagcttcaggcctacccagggcggacaggttagcatcgctctctcctctcattggatcaaccctagaaggatgactgaccactctattaaagagtgccagaagtcactggatttcgtgctgggctggtttgccaaaccagtatttatcgatggcgactacccagaaagcatgaagaataatttaagtagcattctgccagacttcactgaatctgagaagaagtttattaaagggacagcagatttttttgcactgtgctttgggccaacactttcattccagctgctggacccccacatgaagttccgtcagctggagtctcctaatctgcggcagctcttgagctggatcgacctggagtttaaccatccccagattttcatagtggaaaacggttggttcgtgtctggtacaaccaagcgggacgacgccaagtacatgtactacctgaagaagttcatcatggagactctgaaagccatcaaactggatggagtggacgtgatcggctatactgcttggtctctgatggacgggttcgaatggcaccgcggctatagcatcagacgcggactcttctacgtcgactttctgtctcaggataagatgttactgcctaagtctagtgcactgttttatcagaagctgatcgagaagaacggctttcctccgctgccagagaaccaaccactcgagggcaccttcccttgcgatttcgcctggggagtggtggacaactacatccaggtgtctcagctgacaaagcctattagttctctgactaaaccttaccac

SEQ ID NO: 149758 - DNA, 1647 bp, Artificial Sequence
  derived and/or modified sequence
atgcctgctagcgctccacctagaaggcctaggccacctcccccctcactgagtttgctgctggttctcctcggacttggagggagaaggctgagggccgagcctggagacggggctcagacatgggccaggttttcccgccctccagcccccgaagcggccgggctgttccaagggaccttcccagatggttttctatgggcagtggggtctgctgcataccagaccgaaggcggctggcagcagcatggaaagggggcaagcatctgggatacctttacccaccacccactggcaccacccggcgatagccgtaacgcatcactgcccctgggagccccaagccctcttcagccggcaactggtgatgtggcctcagacagctacaacaacgtcttcagagatactgaagctcttagggagttgggtgtgacccattatcgctttagtatcagttgggctcgggtcctccccaacggaagcgcaggagtgccaaatcgcgagggcctgagatactaccgtaggctgctggagagacttcgggaactgggggtccagcctgttgtcacactgtatcactgggatctgccccagcgcctgcaagacgcctacggcggctgggccaacagggctcttgccgatcattttcgggattacgctgagctgtgcttccggcatttcggaggccaggtcaagtattggatcacaattgataacccatacgtggtggcatggcatggttacgctaccggcagactggctccgggaatcagaggctcgcccagactcggatatcttgtagcccacaatctcctgctggctcatgccaaagtgtggcatctctacaatacgagcttccgtcccacccaaggcggccaggtgagcatcgcactgtcaagtcattggataaaccccagaaggatgactgaccatagcatcaaagagtgccagaagagcttggattttgtgctgggctggtttgccaagcctgtctttattgatggtgactacccagaaagcatgaagaacaatctgagctctattctgcctgattttaccgaatctgagaaaaaattcatcaaaggcacagccgatttcttcgcattgtgcttcggccctactttgtccttccaactcctcgatcctcacatgaagtttaggcaactggagtcccccaatctgcgccagcttctctcttggatcgacttggaattcaaccacccacagatatttattgtcgaaaacggctggtttgtgagcggaacaactaagcgggatgacgcaaaatatatgtactatcttaagaagttcatcatggaaaccttaaaagcgattaaactggatggcgtagacgtgatcggttacaccgcctggtccttaatggatgggttcgagtggcatcgtggttacagcatccgcagagggctgttttatgttgactttcttagtcaggataagatgctgttgcctaagtctagcgctctcttctaccagaagctcatagagaaaaacggattcccaccgttgcccgagaaccagcctttggagggcacgtttccttgtgatttcgcctggggcgtagtcgataactacatacaggtgagccagttgacaaaaccaatctctagcttgactaaaccctaccac

SEQ ID NO: 149759 - DNA, 1647 bp, Artificial Sequence
  derived and/or modified sequence
atgcccgcttccgcgcctccgcgccgcccgcggccacccccaccgtctctgtcgctcttgctggtgctgctgggcctcggtggtcgtagactgcgggcggagccaggcgatggtgcgcaaacttgggcccggttctcccgcccacccgcgcctgaggctgccggcctctttcaggggaccttccccgacggattcctgtgggccgtgggttcggcggcgtatcaaacggaaggtggatggcagcagcatggaaaaggcgcttctatctgggataccttcacccaccatccactcgccccgccgggcgacagccgcaatgcctcgctcccgctcggagcccctagcccacttcaaccggccactggtgacgtggcctctgactcctacaataacgtctttcgggataccgaagccttgcgcgaacttggagtgacccattatagatttagcatctcctgggcacgcgtgctgccgaatggttcagcaggagttcctaacagagaaggactgcgctactatcggaggctccttgaaaggttgagagagctcggggtgcagccggtcgtcaccctctaccactgggatctgcctcaacggctgcaggatgcatacggaggatgggctaatcgcgccctggccgaccactttagagactacgccgaactgtgttttaggcacttcggaggacaagtcaagtactggatcaccatcgataatccgtacgtcgtggcatggcacggatacgccactggaaggctcgcaccgggaatacggggaagccctagactcggatacctcgtggcccataaccttctcctcgcgcacgcgaaagtctggcacttgtacaacacctcattccggcctacccagggcggtcaagtgtctattgcactgtcgagccattggatcaatccgcggcgcatgaccgatcactctatcaaagaatgccagaagtccctggacttcgtccttggatggttcgctaagccggtgtttatcgacggagattacccggagagcatgaaaaacaatttgtcgtccatcctcccggactttaccgaatccgaaaagaagttcataaagggtactgcggacttcttcgcgctttgttttgggccaactcttagcttccaactcctggatccccacatgaagttccgccaactggaatcgccaaacctgcggcagctgctgtcatggatcgatttggaattcaaccacccccagattttcatcgtggagaacggatggttcgtgtcaggaactactaagagggacgatgcgaaatacatgtactaccttaagaaattcatcatggagacgctgaaggctattaagctggatggagtggacgtgatcggctacactgcctggtcgctgatggatgggttcgagtggcatcgcggatactccattaggagagggctgttctatgttgacttcctctcacaggacaagatgctcctgccgaaaagcagcgcccttttctatcaaaaactgatcgagaagaacggattccctcccctgccagaaaaccagcccctcgagggcacgtttccatgtgactttgcatggggagtggtagacaactacatccaggtgtcccagcttactaagcccatctcatcgctcacgaagccctaccac

SEQ ID NO: 149760 - DNA, 1647 bp, Artificial Sequence
  derived and/or modified sequence
atgcccgcctctgcaccgccaaggcgtcctcgcccaccccctccctctttatccctgctgctggtgctgctggggctgggcggccgacgactcagggccgaacctggggatggcgctcagacatgggctaggttcagtagaccccctgcgcccgaggccgctggcctgttccagggcacatttccagacgggtttttatgggccgtgggctcagccgcataccagacagaggggggatggcagcagcatggtaaaggagcatcaatttgggatacctttactcaccatcctttagccccacctggggattctagaaatgctagtctgcccctgggagcccccagtcctttacagcccgccacaggcgacgtggcttccgactcatacaacaacgtttttcgggacacagaggctctgcgtgagcttggggtgacccactatcggttttctatttcatgggctcgagtgctccctaatggctccgctggcgtgccaaaccgggagggtttgcgctactaccggaggctgctcgagaggctccgggagctcggagtacagcctgtggtgaccctgtaccattgggatttacctcagcggctacaggatgcctacggaggctgggcgaatcgggcattggctgatcacttccgggactatgctgagttgtgcttcaggcattttggtggacaggtgaagtattggatcactattgataatccatatgttgttgcatggcatggctatgcgaccggtaggctcgccccaggtattcgcggatccccacgactgggttatctcgtggctcataacctcttgcttgcccacgccaaggtatggcacctttataacacctccttccgcccaacccaggggggacaagtaagcatcgccttatctagtcactggataaacccaaggcgtatgaccgatcattccattaaggaatgtcaaaagtccttggacttcgtgctggggtggtttgccaagcctgtgttcattgacggcgattaccccgaatctatgaagaataatctgagttctattctccctgatttcaccgagagcgaaaaaaaatttattaaaggcacagctgactttttcgctctgtgcttcgggcccaccttgtcgtttcagctgctggacccacatatgaaattccgacagctggagtcacccaacctgaggcagcttctgtcttggatagatctagagttcaaccatccccagatatttatcgtggaaaacggctggttcgtcagtggtaccacgaagcgggatgacgctaaatacatgtactatttaaaaaagttcattatggaaacccttaaggcaatcaagcttgatggcgtcgatgtaataggatatactgcttggtccctgatggatggttttgagtggcatcgagggtatagcatcaggcgaggccttttctacgttgactttctcagccaggacaaaatgctgttaccaaaatccagcgcactgttctaccaaaaactcatcgagaagaacggcttccctcccctgcccgagaaccagccgctggagggcaccttcccctgcgattttgcctggggcgttgtggataactatattcaggtgagccagctgaccaagcctatctccagtttgaccaagccctatcac

SEQ ID NO: 149761 - DNA, 1647 bp, Artificial Sequence
  derived and/or modified sequence
atgcccgcaagcgcaccccctaggcggccccggcccccccctccgagcctgagcctcttactggtgctcctgggcttgggtggcagaagactcagagcagagcctggtgacggagcccaaacatgggccagattctcacggccacctgcacctgaggccgccggcctattccagggaacatttcctgacggcttcctgtgggccgtgggcagcgctgcttaccaaactgagggcggctggcagcagcatggcaagggagccagcatctgggatacctttacccatcacccactggctcctccgggcgattctcggaacgcctccttgccccttggagcaccatctcccctccagcctgcaaccggggatgtggccagtgacagttataataacgtttttagagataccgaggcactgcgggaacttggggttacccactaccgcttttcgatcagctgggccagggtcctaccgaacggatctgccggggtgcccaacagagaagggctgcggtactatcggcgcctgctggagcgcctccgcgaattgggggtgcagcccgtcgtgaccctctatcactgggacttgcctcagcgtctgcaggacgcctacgggggatgggctaatcgcgctttggccgaccattttcgagactacgcggaattatgcttccgccactttggaggccaggtgaagtattggattacaattgacaacccgtacgtggtggcttggcacggatacgctacaggccgcctcgcccccggcattagagggagcccacggttgggatacctcgtggcccacaatttgctattggctcatgcaaaagtctggcatctctataacacttctttcagaccaacacagggagggcaggttagtatcgccctcagcagccattggataaaccccaggcggatgactgatcattctatcaaagagtgtcaaaaatctcttgattttgtattgggctggttcgccaagccggttttcatagacggggactatcccgaatctatgaagaacaacctgtctagtatcctgccagattttacggaatccgagaagaagtttatcaaggggactgcagactttttcgctctttgttttggccctacactcagttttcaacttctggacccgcacatgaagtttcgccagttggagtctcctaatctgcggcaactgctgagttggatagatctggagttcaaccacccccagatcttcatcgtggagaacgggtggtttgtgtccggtacaacaaagagggatgatgccaagtatatgtactatctgaaaaagttcattatggagacactgaaagcgatcaagctagacggagtggatgtgatagggtacaccgcttggtcattgatggacggcttcgagtggcacaggggatattccatacgccgtggactgttttacgtcgatttccttagccaagacaaaatgctcctcccaaaatcctcagccctgttttaccagaaacttatcgagaagaacggattcccccccttgcctgaaaaccagcctctggagggcactttcccctgtgattttgcatggggcgtggtggataattacattcaggtcagccagctcacaaagcctatctcatctctcactaaaccttaccat

SEQ ID NO: 149762 - DNA, 1647 bp, Artificial Sequence
  derived and/or modified sequence
atgcctgcatcggccccgcccagacgcccacggccaccacctccttccctgagcctgcttcttgttcttctgggcctgggaggacgccgactgcgggcagaaccgggagatggtgcacagacttgggcacgatttagcagaccacctgctcccgaggctgccggtcttttccagggcaccttcccagacgggttcctgtgggccgtgggttccgcagcctaccaaaccgaaggtggatggcagcaacacggtaagggcgccagcatttgggatactttcacccatcatcccctcgcccctccaggagattcgcgaaatgcaagcctgcccctgggagccccttcgccgctccagcctgccactggagacgtggcgagcgattcgtacaataatgtgtttcgtgacaccgaagcacttcgcgaactgggagtgacccactaccgcttttcgatctcgtgggcgcgagtgcttcctaacggttcagccggcgtcccaaatagagaaggactgagatactaccgcagacttcttgaaagactgcgcgaacttggtgtgcagccagttgtgaccctgtaccactgggacttgcctcaacggcttcaggacgcctacggaggttgggcaaaccgcgcactggcagatcactttagagattacgccgaactttgcttcagacatttcggcggacaagtgaagtactggattaccattgacaatccctacgtcgtcgcatggcatggatacgcaaccggtaggctggctcctggtataaggggttccccacggcttggatacctggtcgcacacaatcttctccttgcacatgcgaaagtgtggcacctctacaatacctcatttcgtcccacccagggaggtcaagtgagcattgcactgtcgtcgcattggataaatcctcgaagaatgaccgatcactcaatcaaggaatgtcaaaagtcattggatttcgtcctgggttggttcgcgaagcctgtgtttatagatggcgattaccctgaatccatgaagaataatctctcgtccattctgcctgactttaccgaatctgagaagaagttcattaaaggcacggccgacttctttgcactttgcttcgggcctaccctgtcctttcaacttctcgaccctcatatgaagtttcggcaactggaatcgccgaacctccggcagcttctctcgtggatcgatcttgagtttaaccatcctcaaatctttattgtggagaatgggtggtttgtgtcgggaacgactaagcgcgatgatgctaagtatatgtactacctgaaaaagttcattatggaaacgctcaaggctatcaaattggacggcgtggacgtgattggatacaccgcatggtccctgatggatggatttgaatggcaccggggatatagcatccgtagaggcctgttttacgtggatttcttgagccaggacaaaatgctgcttcctaagtcaagcgctcttttctaccaaaaactcatcgaaaagaatgggtttccaccactccctgaaaaccaacccctcgaaggtacgtttccctgtgattttgcgtggggcgtggtggataactatattcaagtctcccaactgactaaaccaattagctcattgacgaagccttaccac

SEQ ID NO: 149763 - DNA, 1647 bp, Artificial Sequence
  derived and/or modified sequence
atgccagcatccgcaccaccgagaaggccacgtcctccacctccatccctcagcctccttttggtcctcctggggctgggtggacgacgcctgagagcggaaccaggagatggagcccagacttgggctcgctttagccggccaccggccccagaggccgcgggactcttccagggtacttttccagacggttttctgtgggccgtcggttcagcagcataccaaaccgaaggaggatggcaacagcatggaaaaggggcctcaatttgggataccttcacccatcatccattggcaccaccaggtgatagccggaacgcttcgctcccactgggggccccttcgcctcttcaaccggcaaccggggacgtggcgagcgattcgtacaacaacgtgtttcgggatactgaggcactccgagagctcggcgtcactcattaccgattctcgatcagctgggcaagggtgctgcctaacggtagcgcaggtgtgcccaatcgggaaggacttcgctactaccggagacttctggagaggctgcgggaacttggagtgcagccagtggttaccctttaccactgggatcttcctcaacgactgcaagacgcctatggaggatgggccaacagggctctcgcggatcactttagagattacgccgagctttgttttcggcactttggaggccaagtgaagtactggatcactatagataatccctacgtggtggcgtggcatggatacgctactggacgtctggcaccgggaattaggggatcgccgcgactcggttacctcgtcgcacataacctccttctcgcccatgcaaaagtctggcatctgtacaatacctcgtttcgacctacccaagggggccaagtctcaattgctctttcaagccactggattaatccgcgtcgaatgaccgaccattcgattaaagaatgtcaaaagtccctcgattttgtgctgggatggttcgcaaagccagtgtttatagacggagattaccctgaatccatgaagaataacctgagttccatccttcctgattttaccgagagcgaaaagaagtttatcaagggcaccgcagatttctttgccctgtgttttggtccaactctgagctttcaactgctggatcctcatatgaagtttagacagctggaatcacctaacctccgccaattgctgtcgtggattgatctggaattcaaccatccacagattttcattgttgaaaacgggtggttcgtctccggaaccacgaagcgagacgatgcaaaatacatgtactacctcaagaaattcattatggaaacgctcaaggctatcaaacttgatggtgtggatgtgatcggatacaccgcatggtcgcttatggatggctttgaatggcatagaggatacagcattcggagaggcctcttttacgtcgattttctctcccaggataagatgctgctgccaaagtcatccgcacttttctaccagaaacttatcgagaagaatggatttcctcctctgccggagaaccagccccttgaaggtactttcccatgtgacttcgcatggggggtggtggataactacattcaggtgtcacagttgaccaagcctatttcgtcgcttactaagccctaccat

SEQ ID NO: 149764 - DNA, 1647 bp, Artificial Sequence
  derived and/or modified sequence
atgccggcctcggctccgcctcgtagaccgaggccgccacctccttcactttctttgttattggttctgttgggactcggaggccgaagattacgagccgaaccaggggacggggctcagacctgggcgagattcagcaggccgcctgctccagaagctgccggactctttcagggaacctttcccgatgggttcctgtgggctgtaggttccgctgcttatcagaccgaaggcggctggcagcaacatggcaagggggcctccatctgggataccttcacacatcatccgttagcaccccccggtgatagcaggaacgcttctctgccactcggagctccatccccattgcagccagccacgggggacgttgcctcggattcatacaataacgtgttccgggacaccgaagccctgagggaactcggagtcacacactatcgattctctatctcatgggcccgggtgctacctaacggcagcgccggagtgcccaaccgagagggactgagatattatagacgattgctggaaagattgagggaactgggcgtacagcctgttgtaacgctctaccattgggacctcccacagagactgcaggacgcatatggcggctgggcgaaccgagcattagccgaccactttagggactacgctgagctatgcttccgacacttcggcggacaggttaaatattggattacaatcgacaacccctacgtcgtggcctggcatggctatgccacggggcgactcgccccaggcatccgcggcagtccaaggctgggctatttagtggcccataatctgctgctggcacacgcaaaagtatggcatttgtacaatacctcattccgacctactcagggcgggcaggtgtcgatcgccttgtcaagccattggattaaccctagacgaatgactgaccacagtattaaggaatgccagaagagtcttgacttcgtcttgggatggttcgcaaagcctgtattcattgatggtgactaccctgagtctatgaaaaacaatctgagtagcatattgccagacttcaccgagtcagaaaagaaattcatcaagggaacggccgacttctttgccttgtgctttgggcccacactgagcttccagctacttgacccacacatgaaatttaggcagctggagtcaccgaacctgcgccagctgctcagctggatcgatttggagttcaaccacccacagatctttatcgtggagaatggttggttcgtgtccggaaccacaaagagagatgacgccaagtacatgtattatctgaaaaaatttatcatggaaaccttgaaagctattaaacttgacggagtagatgtgatcgggtacacggcatggtccctgatggacggcttcgagtggcataggggatactctataaggagaggattgttctatgtcgactttttgagccaggacaaaatgctgcttcccaagagcagtgctttattttaccagaagctgattgaaaagaacggatttcctcccctgcctgaaaaccagcctctcgaagggacgttcccatgcgactttgcctggggggtggtagataattatattcaggtttcccagcttacaaagcctatttcttctctgaccaagccctaccat

SEQ ID NO: 149765 - DNA, 1647 bp, Artificial Sequence
  derived and/or modified sequence
atgcctgcgtcggcccccccgcgtaggccaagaccaccgcccccctctcttagcttgttgctcgtgctgttgggcctcggtggacgccgcctcagagccgagcctggggatggcgcccagacctgggctcgcttttctcggccgcccgcccccgaggctgctgggttgttccaaggaacattcccggatggtttcctatgggcagtcggctctgcggcataccagaccgaaggaggttggcaacaacacggtaaaggtgcttccatctgggataccttcacgcaccatcccctagctcctcccggtgattcgcgtaacgcctccctgcccctgggtgctccctcccctctgcagcccgccacgggggatgtcgcctcggatagctacaacaacgtgtttcgggacaccgaagctctccgtgagctaggcgttacccactaccggttctcaatttcctgggcccgtgtcctgcccaacggatccgcgggtgtgccaaatcgcgaaggtctgcgttattaccgacgtctcctggagcgattgcgtgagcttggagtgcagcccgtggtcactctgtatcactgggacctaccgcagagactccaggacgcctacggcggctgggccaaccgtgctctggcggaccacttccgggactacgcggagctctgcttccgccatttcggaggacaggtcaagtactggattaccattgacaacccttacgtcgtcgcctggcatggttatgctaccggccggctggcccccggtatccggggttctcccaggcttgggtacctggtggcgcacaacctgctcctagcccacgctaaggtctggcacctctacaatacatctttccgccccacccagggcggccaggtttccatcgctctcagcagtcactggattaacccacgacggatgactgaccactctatcaaggagtgccagaaatccctggatttcgttctcggctggtttgccaagccagtctttattgatggtgattaccccgagtccatgaaaaacaacctctcgagcatcctgcccgacttcacggagtccgagaagaagttcatcaagggtactgctgacttctttgccttgtgtttcggacctaccttgtctttccagctccttgacccccacatgaagtttcgccaactcgagagtcctaacttgcgtcagttgctatcctggatcgacctcgagtttaaccatccgcagatttttattgtcgagaacggttggttcgtctcaggtaccaccaagagggacgacgccaagtacatgtactacctgaagaaattcattatggagacgcttaaggccattaagctcgatggtgtcgatgtcatcggctacacagcttggtcccttatggatgggttcgagtggcaccgcggttactctattcgaagaggtctcttttacgtcgatttcctctcccaggataagatgctcttgcctaagtcttcagccctgttctaccagaagctaatcgaaaagaacggatttccacccttgcccgagaatcaacccctggaaggtaccttcccgtgcgatttcgcctggggtgtcgtcgacaactacatccaggtcagccagcttactaagcctatctctagccttactaagccctaccac

SEQ ID NO: 149766 - DNA, 1647 bp, Artificial Sequence
  derived and/or modified sequence
atgcctgcgtccgccccaccaagacgaccccgcccgccccctccgagcctgtccttgctactggtcttgctcggtctagggggccgtagactccgagcagaaccaggggatggagcccaaacatgggcaagattcagccgacctcccgccccagaggcagcgggtctattccagggaaccttccccgatggcttcctttgggctgtcggctctgccgcgtatcagacagaaggcggatggcagcagcacggcaagggcgcgtctatttgggataccttcacacaccatccgctcgccccaccaggcgatagccgcaacgcaagcctgccattgggtgcccctagtcccctgcagcccgcaacaggtgatgtggcctcggatagctataataatgtattcagagacaccgaggccctgcgagaactgggagtgacccactaccgctttagcatttcgtgggccagagtattacccaacggtagtgcgggagtgcccaatcgcgaggggctgcgatactatcgccggctgctagaacgactccgcgagctaggtgtacagcctgtggtgaccctctaccattgggacttgccacagcggctccaagacgcttatggcggatgggctaacagagccctcgccgaccatttcagggactatgcagaactttgtttccgccattttgggggccaggtgaaatattggatcacgattgacaatccgtacgtagtggcatggcacggatatgcaaccggccggctcgccccaggtatccgggggagtcctcgactggggtatctggtcgcacataatctcttgctagctcatgctaaggtgtggcacctgtataatacgtcctttaggccgacccaaggtgggcaggtgtctatagcgctctcctctcactggatcaatcctcgtagaatgaccgatcatagtatcaaggagtgccaaaagagtctcgattttgtgctcggctggttcgctaaaccggtgttcatagacggggattatcccgagtctatgaagaataatctctcttctatcctgccagactttacagagtctgagaaaaagtttatcaaaggtaccgctgactttttcgctctctgcttcggacccactttaagctttcagctgctagacccccacatgaaattccgccagcttgagagtccgaacctgcggcaacttttgagctggatagacttagagtttaaccatccacagatttttatagtcgagaacgggtggtttgtgagcggaaccacaaaacgagacgacgccaagtacatgtattacctaaagaaatttatcatggaaacactgaaagcgattaaactcgacggtgtagacgttatcggttacacagcatggagtctgatggacggcttcgaatggcacagaggctattccatccgccggggtcttttctacgtggacttcctctcccaggacaaaatgctgctccccaagtcaagtgccctcttctatcagaagctgatcgaaaaaaacggattcccccccttgcccgaaaaccagcccctggagggcacgtttccttgtgactttgcgtggggagtggtggacaactacattcaggtttcgcagctgaccaagcctatttctagcttgacgaagccataccac

SEQ ID NO: 149767 - DNA, 1647 bp, Artificial Sequence
  derived and/or modified sequence
atgcctgcaagcgcccctcccaggaggcctcgacctcctcctccaagtttatcacttctgttggtgcttttgggtttgggtgggcgccgactgcgagctgaaccaggagatggtgcacaaacttgggcaaggttcagtagaccccctgctcctgaggctgctggtctctttcaagggacctttcccgatggctttttgtgggcagttgggtcagcagcatatcaaactgaaggaggatggcagcagcatggcaagggtgctagtatctgggacacatttacccatcatcctttggcccctcccggtgatagtcgtaatgcatctttaccattgggagctccaagtcctctgcaaccggctacgggggatgttgccagcgattcttacaataatgtatttcgtgatacagaagcacttcgagaattgggagttactcattatcgtttctcgatcagttgggctcgagttctcccaaatgggtccgcaggagtcccaaaccgtgaaggactcagatactacaggagactcctcgagaggctccgggagttgggcgtccagcccgtggtcaccctgtatcattgggatttgccccagaggctacaagatgcatatggaggttgggcaaatcgcgcactagctgatcacttcagagattacgctgaactctgctttaggcattttgggggacaggtgaagtactggattactatcgacaacccatacgtggttgcatggcatggttatgccacaggaagacttgcccccggcattagaggttcgcccaggctcggttatctagtagctcataatcttctgttggctcatgcgaaagtgtggcacttatacaatacttcattcaggcccacccaaggaggacaggtctcaatcgccctttcttcccactggatcaacccaaggaggatgaccgaccactctattaaggaatgtcaaaagtcattggatttcgtactagggtggttcgccaagcccgtttttatcgacggagactacccagagtccatgaagaacaacctgtcatctatcttgcctgatttcaccgagagtgagaaaaagttcattaagggtacagctgatttctttgccctttgtttcggtcccacattgtcatttcagcttttggatcctcatatgaagtttagacagcttgaaagccctaacctgaggcagctcttgagctggatcgatctggagttcaaccaccctcaaatatttatagttgaaaacggttggttcgtatctggaactacgaaacgtgatgacgcaaaatacatgtactatctcaaaaaattcattatggagactttaaaggcaataaaactagatggagttgatgtaattggttataccgcttggtccctgatggatggattcgagtggcatagaggctactccattcgtcggggtttgttctacgttgacttcctttcgcaagataaaatgttgctccctaaatcaagcgcactcttttatcagaaattgattgagaaaaatggatttcctcctcttcctgaaaatcaacctctggaagggacttttccttgtgatttcgcttggggcgttgttgacaattacatccaagtttctcagttaacgaagcctatctcatctctgacaaaaccctatcac

SEQ ID NO: 149768 - DNA, 1647 bp, Artificial Sequence
  derived and/or modified sequence
atgccggcttcagctccgccgcgacggcctagacccccaccgccgtcattgtctcttcttcttgtgctcctgggattaggtggacggagactgcgtgcagaaccgggtgatggcgcacagacatgggctcgcttttcccggccgccagccccggaagctgctggtttatttcaggggacgttcccggatggctttttatgggctgtaggtagcgctgcataccaaactgaaggagggtggcaacaacacggcaagggcgcgagcatctgggatacatttacacaccatccacttgcgcccccgggtgattcgaggaatgcgtctctacccttgggggcgccctcaccgttacagccagccacaggggacgtcgcttctgacagttacaataatgtttttcgagacactgaagcgctgagagaattaggcgtcactcattaccgctttagtatcagctgggcacgtgtccttccaaatggtagcgctggcgttccgaatcgggaaggcttaagatactataggagacttctggaacgtctgcgggaattgggcgttcaaccggtagttacattgtatcattgggacttaccccaacggctgcaagatgcttacgggggctgggcgaatagagccttggcagaccatttccgggattatgcggagctttgcttcagacattttggaggacaggtgaagtactggattactatagataatccgtatgtagtagcttggcatgggtatgccaccgggcgtttggcccctggaattaggggctctccgaggttaggatatttggtcgcccataatcttttgcttgcgcacgcaaaagtgtggcatttgtataacacatcgtttcgtcctacgcaaggaggtcaggtttccattgcattatcctcacattggatcaacccgcgacgcatgacggatcattcaatcaaagaatgtcagaagagtcttgacttcgtgttaggttggttcgcaaaaccggtgtttatcgatggggattatccggaaagcatgaaaaataatctgtcgtcaattctgcctgactttacggagtccgagaaaaaatttattaaaggcacagcagatttctttgctctgtgctttggtccgacacttagctttcagttattggatcctcatatgaagtttagacagctggagtcgccaaaccttcgacagctattgtcatggatagacctcgaattcaatcatccccagattttcatcgtcgaaaacgggtggttcgtatcaggaaccacaaaacgcgatgatgcaaaatatatgtactatcttaaaaaattcattatggagacattaaaagccataaagttggatggcgtagacgtaattggctatacggcatggagcctgatggatggttttgaatggcatcgtggttactctattcgtagaggactgttttatgtagattttttgagccaagataaaatgcttctccctaaaagctccgccttattttaccaaaaattaatcgagaaaaatggctttcctcctcttcctgaaaatcagccgttagaaggaacatttccatgtgattttgcttggggtgttgttgataattatattcaggtaagccagttgacgaagccgataagctcattaaccaagccatatcat

SEQ ID NO: 149769 - DNA, 1647 bp, Artificial Sequence
  derived and/or modified sequence
atgcccgcatctgcacctccaaggcgccctcgacctccgccccccagcctgtctctgcttcttgtcttgctgggcctgggaggtaggcgcctgagggctgaacccggtgatggagctcagacttgggcccgcttttcgcggccccctgcgcctgaggccgcaggcctattccaggggactttccccgatggattcctgtgggctgtcggcagcgcagcctatcagactgagggggggtggcagcagcacgggaagggcgcaagtatatgggacaccttcacgcaccacccactagctcctcctggcgactctagaaacgctagcttgccccttggcgctccctcccccctgcagccagcaacaggcgatgtggccagcgatagctacaacaacgtattcagggatacagaggcactgcgcgagttgggagtgactcactatcgcttttctatttcctgggctcgtgtgctcccgaacggtagtgctggggtccccaacagagaaggcctgcggtactatagaagattgctcgaacgactcagagagctaggcgtgcagcctgtggttacactataccactgggacctaccccagcggctgcaggacgcttacgggggttgggccaatcgggcactggccgatcatttcagggactatgcagaactttgttttcgacacttcggaggccaagtgaagtattggatcaccatcgataatccctatgtcgttgcctggcatggctacgccactggccgattagctcccggaattcgcggttcgcccaggctgggctatctggtcgcgcataacttgttgctggcacacgctaaagtgtggcacctctacaacacaagcttccgtccaacccagggcggccaagtgagtatcgcattgagttctcattggataaaccctcggagaatgactgaccattcaataaaggagtgccagaagagtttggacttcgtgctgggatggttcgccaaaccggtcttcatcgacggagactatcctgaaagcatgaaaaacaatttatctagcatcctccctgactttacggagagcgagaaaaaattcatcaagggcacggcagatttttttgctctttgcttcgggccaaccctcagcttccagctcttggaccctcacatgaagttcagacagctcgaatcgcctaatctgcgtcagctgctgtcttggatcgacctggaatttaaccacccgcagatattcattgttgagaacggatggttcgtgtccggtactactaaacgggatgacgctaagtatatgtattacctaaaaaaatttatcatggaaacactgaaggctattaagttggacggggtggatgttatagggtatactgcttggagcctgatggacggattcgagtggcataggggttatagcatccggcgagggctgttttacgtggacttcctgtcacaggacaaaatgcttctgcccaaatcttctgccttattttaccaaaaactcattgagaagaacggatttcccccacttcctgagaaccaacccctggaggggacttttccctgcgatttcgcatggggcgtcgtggacaattatatccaggtgagtcagctaacaaagcctatttcatctctgaccaagccctatcac

SEQ ID NO: 149770 - DNA, 1647 bp, Artificial Sequence
  derived and/or modified sequence
atgcctgcttccgcgcctccaaggaggcccaggcccccacccccatcactctcattgctcctcgtactgctgggcctcggcggcagaaggttgcgcgcagaacccggagatggtgctcagacctgggctaggttttccaggcctcccgctcccgaagccgctggactgttccaaggcacatttcccgacggctttctgtgggctgtgggatctgcggcatatcagactgaaggaggttggcaacagcacggcaagggagcctcaatctgggatacgtttactcatcatccacttgcgcccccgggcgactctaggaacgctagtcttccactgggcgcccctagccctctgcaacccgcaacaggcgacgtcgctagcgattcctacaacaacgtgtttcgcgataccgaggctctgagagagcttggcgtgacacactacaggttcagtatatcctgggcgcgcgtactgccgaatggttcagcaggcgtgcccaatagggaaggcctgagatattatcgccgccttctcgaaaggctgcgcgaactgggcgtgcaacctgtcgtgacactgtatcattgggacctccctcagaggctccaagatgcatacggtggttgggcaaacagagctctcgcagaccacttccgcgattatgcagagctctgtttcagacactttggaggtcaggtcaaatattggatcactatagacaacccttatgtggtcgcttggcacggttacgctacaggccgcctcgcgcctggaatcagaggttctcccagacttggctacctcgtggctcataacttgctgttggcgcatgccaaagtgtggcacttgtacaatacttccttccgcccgacacagggcggccaggtctctatcgccctctcctctcattggatcaatcccaggcgcatgacagatcactctattaaagaatgtcagaaaagcctggatttcgttctgggctggttcgctaagccggtctttatcgacggagattacccggaatcaatgaagaacaatttgagttccatcttgcccgacttcaccgagtccgaaaagaagttcatcaagggtacagcagacttcttcgcactgtgctttggacctaccctctctttccagctcctggatccccatatgaaatttaggcagctcgagtcccccaacttgagacagttgctcagttggattgacctggagttcaaccaccctcagatcttcattgttgaaaacggatggttcgtgagcggaaccactaagagagacgacgctaagtatatgtactatctgaagaagttcattatggagaccttgaaagccatcaaacttgacggtgtggatgtcattggctatactgcttggtctctgatggatggctttgaatggcaccgcggatactccatcaggagaggccttttctacgttgactttctgagtcaggacaaaatgctgctgcccaagagctctgctctgttctatcagaaactgatcgagaaaaatggatttccaccactgcccgagaaccagccactggaaggcacattcccttgcgacttcgcctggggtgtggtggacaactacatccaggtaagccaactgacgaagcccatctcctccctgactaaaccttaccat

SEQ ID NO: 149771 - DNA, 1647 bp, Artificial Sequence
  derived and/or modified sequence
atgcctgcaagtgctccaccccgcagaccaagacctcctccgccgagtctgtctctgctcttggtgttattagggttgggagggaggaggctgcgggccgaacccggcgacggcgctcaaacgtgggctcgattctcacggcccccagctcccgaggccgcgggactctttcaaggcactttccccgatggattcctgtgggcggtgggcagcgccgcgtatcagacggaaggcggatggcagcagcacggcaagggggcgtcgatctgggataccttcacacaccacccattggcaccccccggggactcgcgaaacgccagtttgcccctgggtgccccttctcccttacaacctgctacgggggacgttgcatctgattcttataataacgtgttccgggacactgaagccttgcgagagttgggagtgacacattaccgcttcagcattagttgggcaagagtgctgcccaacggaagcgctggggtgcctaaccgtgagggtctgaggtactaccgtcggctcctggaaagattaagggagttaggcgtccaacctgtggtcaccctgtatcattgggatcttccacagcggctgcaggacgcttatgggggctgggcgaatagagcgctcgcagaccattttcgcgactatgctgaactctgcttcagacacttcgggggtcaggtgaaatattggattaccatcgacaatccctatgtcgtcgcttggcacgggtatgctacagggcggttagctccagggataagggggtctccccgactgggctacctggtggcccataacttgctgcttgcccacgccaaggtgtggcatttatacaatactagcttccgccccacacagggcggccaggtcagtatcgctctgagtagccattggatcaacccccgccggatgaccgatcattccattaaagagtgccagaaatctcttgactttgtcctgggatggttcgccaagccggtatttattgatggcgattaccctgaaagtatgaagaacaatctgtctagtatcctgcccgattttaccgaatccgaaaagaagtttattaaaggtactgccgacttctttgcactttgttttggacccactctctctttccagctgctcgaccctcacatgaagtttaggcagctggagtcgccaaatcttcggcagctgctctcatggattgacctggagttcaatcacccacagatcttcattgtcgagaatggttggtttgtctctgggactactaaaagagacgacgctaaatatatgtactatctgaagaaattcatcatggaaacccttaaggccataaagctggacggagtggacgtcattgggtacacagcctggtctctgatggatggcttcgagtggcatagaggctactccattagacggggactgttttatgtcgactttctgagccaggataagatgctcctgcctaagtctagcgccctcttctaccagaagctgatcgagaagaatgggttcccacctctgcctgagaaccagccactagagggaactttcccatgcgactttgcctggggagttgtggataattacatccaggtcagtcagcttaccaagcccatatctagtctgaccaagccttatcac

SEQ ID NO: 149772 - DNA, 1647 bp, Artificial Sequence
  derived and/or modified sequence
atgccggcatccgcgccaccgcgccgaccgcgcccaccacctccgtcactgagcctgctcctcgtcctcctgggacttggaggacggcggctccgggcggaaccgggagacggagcgcagacttgggcgaggttctcgcgcccccctgccccagaagcggctggtctgttccagggaactttcccagatgggtttttgtgggcggtgggatcggccgcttaccagactgagggcggatggcagcagcatgggaagggtgcaagcatctgggacacctttactcaccatcccctggctccgccgggtgacagccggaatgcttcgctgccacttggggcccctagcccactccagccagcaactggtgacgtggcctccgactcgtacaataatgtgttcagggatactgaagccctccgcgaactgggcgtgacgcattaccgcttctccatctcgtgggccagagtcctcccaaacggatcggcgggagtgcccaatcgggaaggtctgaggtactaccggcgcctcttggagcggctccgggagcttggcgtgcagcctgtcgtgactctgtaccactgggacctgccacagagactgcaagacgcctacgggggttgggctaacagggccctcgcagaccatttccgcgactacgcagaactgtgctttcggcacttcggaggacaggtgaaatactggattaccattgataacccgtacgtggttgcctggcacggatacgctaccggacgcctcgctcctggcatccggggaagtcccagactgggctacctcgtcgcccataacttgcttctggcgcatgctaaggtgtggcatctgtacaacacttcattcagaccgactcagggagggcaggtcagcatcgcgctttcgtcgcattggatcaaccctcgcagaatgactgatcactccatcaaggaatgccagaagtcgctcgacttcgtgctggggtggtttgcaaagccggtgttcatcgatggagactaccccgagtccatgaagaataacctctcctcaattctgccggacttcaccgagagcgaaaagaaattcatcaaggggaccgcggactttttcgcactgtgtttcggcccaactctgtcatttcagctccttgacccgcacatgaagttccgccagttggaatcgccgaacctcaggcaactcctgtcatggattgacctcgagttcaatcatccacagattttcattgtcgaaaatggctggttcgtgtcaggcaccactaagcgggacgacgcaaagtatatgtattacctgaaaaagttcatcatggaaaccctcaaagccatcaaacttgacggtgtcgatgtgatcggctacactgcatggtcgctcatggacggattcgagtggcaccgtggatattcgatccgccggggactgttttacgtggactttctgtcgcaggacaaaatgctcctgccaaaaagctccgccctcttctaccaaaaacttatcgaaaagaatggattcccgcctcttcctgaaaatcagcctctggagggaacgtttccgtgcgacttcgcgtggggggtggtggacaactatattcaggtgtcacagctcaccaagccgatctcatcactgactaagccgtaccac

SEQ ID NO: 149773 - DNA, 1647 bp, Artificial Sequence
  derived and/or modified sequence
atgcctgcctcagctccccccagacggccccggccacctccaccctcactctcactcctgcttgttttactcggactaggaggacggcggctcagagccgaaccaggagatggagcccagacatgggcacgattctccagaccccctgctcctgaagccgcaggacttttccagggaactttccccgatgggttcctctgggccgtgggatccgcagcctatcagacagaaggggggtggcagcagcacggaaagggagccagtatctgggatacatttactcatcatcctttggcccctcctggagattcgagaaacgcctctctgcccctgggggctccctcccctctccagcctgctacaggagatgtcgcaagtgattcttacaacaacgtgttcagagatacagaagccctgcgcgaactgggggttacacactacaggttttctatttcatgggccagggtactacctaatgggtcagccggggttcccaaccgggaagggctgcgttattacaggagactcctggaacgcctcagggaactaggagtgcagcccgtggttactctgtaccattgggatctgcctcagaggctgcaggatgcctatggggggtgggccaacagagctttggccgatcactttcgagactatgctgaactgtgctttcggcatttcggaggacaggtgaaatactggataactatagataacccgtatgtggtcgcatggcatggatatgccacagggcgtctcgctcccggaatacgggggagtcctagactcgggtaccttgtggctcacaatttactcctcgctcacgccaaagtttggcacctgtataatacatctttcagacctactcagggagggcaagtctctattgctctgagttcccactggattaatcctagacggatgacagatcattcaattaaagaatgtcagaaaagtttagatttcgtcttagggtggttcgctaagccagtgttcattgacggggattatcctgaatctatgaaaaataatctgtcatccattctccctgactttactgaatccgaaaagaaatttatcaaagggacagcagatttctttgcactttgtttcggacccactctttccttccagttacttgatccacatatgaaatttagacagcttgagtcaccaaatctgcggcagcttctgtcctggatcgatctggagtttaatcatccccagatctttatcgtcgaaaacgggtggtttgtatcagggactactaaaagagatgacgccaaatatatgtattatctgaaaaaatttattatggagacactgaaagcgattaaacttgatggagtggatgtaatagggtatacagcttggagtttgatggatggatttgaatggcatagagggtattctatacgacgcggattattctatgtggatttcctttcccaggataaaatgctactgcctaaaagtagtgctttattttaccagaaactcatcgagaaaaacgggttcccccccttgccggagaaccagccccttgaagggacatttccttgcgattttgcatggggggtcgttgacaactacatacaggtctcccagctgactaaacctattagttccctcactaaaccttaccac

SEQ ID NO: 149774 - DNA, 1647 bp, Artificial Sequence
  derived and/or modified sequence
atgccggcatcagcacctccacgccgacctaggccccctcctccttccctgtccttgctccttgtcctcctcggcctgggtgggagacgtcttagggccgagcctggagacggagcgcaaacttgggcacgattctcccgtccacctgcgcctgaggcggccggacttttccagggaacttttcccgatgggtttctttgggcagtcggatccgccgcataccaaactgaaggaggatggcaacaacatggtaagggggcgtcaatctgggacacttttacccatcatcccctggctcctccgggcgattcccgtaatgccagccttcctcttggagccccatcgcctcttcaacctgccactggtgatgtggcatcggactcctacaacaacgtgtttagagataccgaagcacttagagaacttggcgttacgcattaccgcttttcaatctcctgggcaagagtgctgccaaatggatcggccggagtgccgaaccgggagggacttagatactacaggagactgcttgaacgcctgcgcgaactcggtgtgcagcctgtcgtcacgctgtaccattgggatctgcctcagcggctgcaagacgcatacggcggttgggccaaccgagccctcgcagatcacttcagggattacgcagagctttgttttcgccactttggcggacaagtgaagtactggattaccattgacaacccttacgtggtcgcttggcacggctacgcaactggacgccttgcaccagggatccggggttcgccaagactgggatacctcgtggcacataaccttctgcttgcgcatgcaaaggtctggcacctttacaacacttcatttaggcccacccagggaggtcaagtctcaatcgcattgtcaagccactggattaacccaaggagaatgaccgatcactccattaaagaatgccagaagagtcttgatttcgtcctgggttggttcgctaagccagtctttatcgatggagactatccagaatccatgaagaacaatcttagtagcatccttcctgattttactgaaagcgagaaaaagttcattaagggaaccgctgacttcttcgctctttgcttcggccctaccctttcatttcagctcctcgatccacatatgaagttccggcaactcgaatcgcccaatctgcggcaacttctgtcgtggatcgatctggaattcaaccacccacagatcttcatagtcgaaaatgggtggtttgtctcaggaactaccaagcgtgatgatgcaaagtacatgtattatcttaagaagttcatcatggagactctcaaggcaattaagctggatggtgtggacgtcattggttacaccgcgtggtcccttatggatggttttgagtggcatcgaggctactccatccggagaggcctgttttacgtggattttctctcacaagataagatgctcctcccaaagagctccgcactcttttaccagaagctgatcgagaagaatggattcccccctctccccgaaaaccaaccccttgagggtaccttcccttgcgatttcgcatggggagtggtggacaattacatccaggtttcgcagctgaccaaacctattagctctttgactaagccttaccat

SEQ ID NO: 149775 - DNA, 1647 bp, Artificial Sequence
  derived and/or modified sequence
atgccggcatccgcacctccgcgacggcccagacctcccccaccatctctctcattacttctggtcttgctcgggctgggcggaagaagactgcgagccgagccaggtgatggagctcaaacgtgggccagatttagccggcctcccgcccctgaagctgccggactttttcagggaacattccccgacggttttttgtgggccgttggctcagccgcctaccagactgagggcggatggcagcagcatgggaagggagcatcaatttgggatactttcactcatcatcccctggcacccccaggggattcccgcaatgcgagcttaccactgggcgccccttctccactgcagcccgcaaccggggatgtagcctctgactcttacaacaacgtgtttcgcgatacagaggctctcagagaactgggagtgacgcattacaggtttagcattagctgggctcgggtgctgcctaacggatccgctggagtgccgaacagggagggccttcgttactatagacgtttactggagagactacgggaattgggagtgcagccagttgtcaccctctaccactgggacctgccacaacggctgcaggatgcttatggaggttgggcaaaccgagctcttgcggatcacttccgcgattatgcagagctatgttttaggcatttcggcggccaggtaaaatattggatcaccatcgacaacccctatgtggtggcttggcacggctatgccacaggaaggttggcaccaggaatccgggggagccccagactgggatatctggttgcccacaatctcctcctagcgcatgcaaaggtatggcatctgtataacactagcttcagacccacgcagggaggccaggtcagcatcgccttatcttcccactggatcaaccccaggagaatgaccgaccactcgattaaagagtgccagaaaagcttagatttcgtcctcggatggttcgcaaaacctgtgttcattgacggtgactatcctgagagtatgaagaacaacctcagcagcatcctgcccgacttcacggagtcagagaagaagtttataaaggggactgcggactttttcgcgctctgttttggaccaacactaagcttccagctgttagaccctcacatgaaatttcgtcagctggaaagcccaaacctccggcagcttttgagttggattgatcttgagtttaaccatccacagatctttatagtcgaaaacgggtggtttgtcagcggaactactaagcgcgacgatgcaaagtatatgtattacctgaaaaagtttataatggagacattgaaggccattaagctggatggagtggacgtcattggatacacagcttggagcctgatggatggatttgagtggcacagagggtattccatccgccgtggcctgttttatgtggacttcctatctcaggacaagatgttgttacctaagtcatcagccctattttaccaaaagttgattgagaagaatggattcccacctcttcccgaaaaccagcctctggaaggcacattcccctgcgatttcgcgtggggagtggtggataactatatccaggtgagccagctgaccaagccaatcagttcactcactaaaccgtaccac

SEQ ID NO: 149776 - DNA, 1647 bp, Artificial Sequence
  derived and/or modified sequence
atgcccgcaagcgcacccccacgacggccacgaccaccacctccatcactgtcgcttcttttggtgcttctcggactcggtggacgaaggctcagagctgaaccaggtgacggtgcacaaacttgggctcgcttttcaagacccccggcacctgaggcggcagggctgttccagggtaccttcccagacggattcctgtgggctgtgggttccgcagcctaccagactgagggaggatggcaacagcatggaaaaggtgcatcaatctgggatacctttacccatcaccctcttgcgccccctggagactctcgcaatgcgtctttgccactcggagcgccttccccgcttcagcctgctactggagatgtggcctcagattcgtacaacaacgtctttagggatacggaggcccttcgtgagctcggtgtgacccactaccggttctcgatttcctgggctagagtccttccaaatggcagcgctggagtgccaaaccgcgaaggattgagatactaccggcgccttctggaaagacttcgggaactgggtgtgcagccagtggtgacgctgtaccactgggatcttccacaacgcctgcaggacgcatacggaggatgggccaatcgagcactggctgaccactttcgggattacgcggaattgtgttttagacattttggtggccaggtgaagtattggattaccattgataacccgtacgtggtggcctggcatggttacgctaccggtagactcgccccaggcatcagaggttcgcctcgtcttggatacctggtggctcataacttgctcctggcccatgcaaaagtttggcatctttacaacacctcctttcggccaacccaaggtggtcaagtgagcatcgcgctctccagccactggataaaccccaggaggatgactgatcattcgattaaggaatgccaaaaaagcctcgattttgttctgggctggtttgccaagccggtctttattgatggagattaccctgaatcgatgaagaataatctttcgtcaatcctccctgatttcactgagtccgagaaaaagttcattaaggggactgcggacttttttgcactctgcttcggccctaccctttccttccaattgctggacccccacatgaagtttaggcaactcgaatcacccaacctgcgccagctgctctcgtggatagaccttgaattcaaccacccccaaatctttatcgtggaaaacggatggtttgtctccggtaccactaaacgcgacgatgcaaaatacatgtactatctgaagaaattcattatggagacgcttaaagccattaaacttgatggtgtggacgtgatcggctatactgcatggagccttatggatggcttcgagtggcatcggggatactccatccgccggggtttgttctatgtggactttttgagccaagataagatgcttcttccaaaatcaagcgccctgttttaccaaaaactgattgagaaaaacggattccctcctctgcccgaaaatcaacctctggaaggcacctttccgtgcgattttgcgtggggtgtggtcgacaattacattcaagtgagccagctgaccaagccgatctccagccttactaagccctaccac

SEQ ID NO: 149777 - DNA, 1647 bp, Artificial Sequence
  derived and/or modified sequence
atgccagctagcgcgccacccagacgacctagaccccctcctccatctctgtccttgctgcttgtgctgctgggcctgggcggacgacgtttaagggcagaaccaggagatggtgctcaaacttgggccagattctcgaggccaccggctcccgaagctgcggggctgtttcagggcacattcccggatggctttttgtgggctgtgggttcagccgcatatcagactgagggcggttggcagcagcatggtaaaggcgcgtcaatctgggatactttcacccaccatccactggctcctccaggcgattccagaaatgctagtcttcctttgggcgctccctcacctctgcagcccgccacaggagatgtggcctcagactcatataataacgtcttccgcgatacagaggccctgagagaattgggagtgacgcactacagatttagcattagctgggcgagggttctacccaatggatcagccggcgtaccaaacagagaaggcttacgatattacaggaggctgctggaacggttacgagaactgggagttcaacctgtggttaccctgtaccactgggacctaccacaaaggctgcaggatgcatatgggggttgggccaatcgagcacttgctgaccactttcgcgactatgccgagctctgtttcagacacttcgggggccaggtcaagtattggattacaattgataatccctacgtggtggcgtggcatggttatgctacgggacgactggcgcccggcatcagaggctcacctcgactaggatatctggttgctcacaatctactgctcgcccatgccaaagtgtggcatctctacaacacgtcgttccgtcctacccaaggcgggcaagtcagcatcgccctgtcttcccattggattaacccacgaaggatgaccgaccatagcatcaaagagtgccagaaaagtctggatttcgtgctcggatggtttgctaaacccgtgttcatcgacggtgattaccctgagtccatgaagaacaatctatcgtccatcctccccgactttaccgaatcggagaagaagttcatcaaaggaaccgctgatttctttgctctctgctttggtcctacactgtcatttcaactattggatccccatatgaaatttaggcagctcgaatcccccaatctgagacaactgctcagctggatcgatctggaattcaatcacccacaaatttttatagtagagaatgggtggttcgtgagtggcaccaccaagagggacgacgccaagtatatgtactacttgaagaaattcattatggagaccttaaaggcaatcaaactggatggcgttgatgtgatcggttacacagcttggagtctgatggatgggtttgaatggcaccgaggttattcgatacggcgaggcctcttttacgtggactttctgagccaggataagatgttattaccgaagtcttccgcgctcttctaccagaaattaatagaaaaaaatgggtttcctccgctgccagagaatcagccactggaaggaacctttccctgtgatttcgcctggggtgtggtggacaattacatccaagtatcccagctgactaagcctatatcatcccttactaaaccataccat

SEQ ID NO: 149778 - DNA, 1647 bp, Artificial Sequence
  derived and/or modified sequence
atgcccgcttcggctccaccacgtcggcctcgtcctccacctccctcactgtctctgcttttggttctactaggcctaggcggtcgacgtctgcgagcagaaccgggtgatggtgctcagacgtgggccaggtttagtagacctcctgctcctgaagctgccggtctgtttcaggggacctttcctgatggctttctatgggcagtcggttcagcagcgtatcagacagagggcggttggcagcaacacggtaaaggcgccagtatttgggataccttcacacatcatccattggcgccaccgggcgactctcgaaacgcgagtcttcctctgggcgcacccagcccgcttcagccagcaaccggcgatgttgcatctgactcatacaacaacgtcttccgggataccgaggccctcagagagttgggtgtcactcattaccgtttctcaatctcttgggcacgagtgctccccaacggttctgctggtgttcctaatcgagaggggctgcgatactaccgccgcctcctagagagactccgcgaactgggcgttcagccggtcgtgactttgtaccactgggacctgccgcagcgcctccaggatgcttatggcggttgggcaaaccgagcgctcgccgatcacttcagggattacgccgaattgtgtttccgccattttgggggccaggtcaagtattggattaccatcgataacccatacgtggtcgcctggcacgggtatgctacgggtcgtctggcgccaggtatccgaggttcaccccgactcggctacttagtcgcccacaacttacttcttgctcatgcaaaggtgtggcacctctataacacgtcattccgaccgacacagggtggacaggtcagcatcgctctcagcagtcactggataaacccaaggcgcatgacagaccactccatcaaggaatgtcaaaaatcactggatttcgtgctcgggtggttcgccaaacctgtcttcattgatggtgattacccagagtcaatgaaaaacaacttgagctccattctccccgacttcacggaatccgagaaaaagttcatcaagggcactgctgacttctttgccctctgttttggacctacgttatcgttccagctgcttgacccgcatatgaagttccggcaacttgagtccccaaacttgcggcagctgctgtcgtggattgacctcgaatttaatcatcctcaaatttttatcgttgagaacggttggtttgtgtccggcactaccaaacgagatgatgccaagtacatgtattatctgaaaaagttcattatggagacgctgaaagcgatcaagttagatggagtcgacgtgattggatataccgcatggtcattgatggacgggttcgaatggcatagagggtatagcattcgtcgtggtctgttttacgtagacttcttgagtcaagataagatgttgctcccgaagagcagcgctctgttttaccaaaagctgatcgaaaaaaacggtttcccgcctttaccagagaaccagccgctggaaggcacatttccctgcgacttcgcctggggcgttgttgacaattatatccaggtctctcagctgaccaaaccaatctcctcacttaccaagccttaccat

SEQ ID NO: 149779 - DNA, 1647 bp, Artificial Sequence
  derived and/or modified sequence
atgcctgctagcgcccctccacgacggccaagaccacctcccccgtctttgtcactgctcctcgtcctgctggggctgggaggtcgccgccttcgagcagaaccgggtgacggcgcccaaacttgggcccgcttctcgaggccaccggccccggaagcggcaggtctgttccagggaaccttccctgacggcttcctgtgggcagtgggttcggcggcctatcagactgaagggggatggcagcaacacggcaaaggggcgtctatctgggacacttttacccaccatcctctcgctccaccaggtgattcgcggaatgcctccctccccctgggagccccgtcgccgctgcaacccgcgaccggggacgtggcgagcgacagctacaacaacgtgtttcgcgacaccgaagccctgcgcgaacttggagtgacgcactaccggttttcaatctcatgggcacgcgtcctcccgaatggaagcgccggagtgcccaacagagagggcttgaggtactaccggagattgctggagcgcctcagagaactcggcgtccagcccgtggtcaccctgtaccactgggatctgccgcaacgcctgcaggatgcttacggaggatgggctaatagagctctggccgaccacttcagggactacgcggaactgtgtttccgtcacttcggcggacaggtgaagtactggattactatcgataatccatacgtggtggcatggcacggctacgccacgggacggctggccccgggcatccgggggtcgccacggctcggatatctggtggcgcacaacctgctgctggcgcatgcaaaggtgtggcatctgtacaacacttcgtttagaccgacccagggaggacaagtgagcatcgcgctctccagccattggattaacccgcgcaggatgactgaccacagtatcaaggagtgccagaagtcgctggacttcgttcttggctggttcgcaaagccggtgttcatcgatggagattacccggagtccatgaagaataacctctcctcaatactgcctgatttcaccgaatcggagaaaaagttcatcaagggaacggccgatttctttgcactttgcttcggccctaccctctccttccaactcctcgaccctcatatgaagtttcggcagctcgagtccccgaatctgcgccagctgctgtcctggatcgacctggaatttaaccacccacaaatcttcatcgtggagaacggatggttcgtgtcaggcaccactaagagagacgacgctaagtacatgtattaccttaagaaattcatcatggaaaccctcaaggccatcaagctggacggtgtcgatgtcattggatacactgcgtggagcctcatggatggattcgaatggcatcgggggtactcgatccgccggggattgttctacgtcgacttcctgtcccaggacaagatgttgcttccgaagtcatcggctttgttttaccagaaactgattgagaaaaacggatttcctccactgccggaaaatcagccgctcgaggggactttcccatgcgatttcgcctggggagtcgtggataactacatccaggtttcacaacttaccaaaccgatctccagcctgactaaaccctaccat

SEQ ID NO: 149780 - DNA, 1647 bp, Artificial Sequence
  derived and/or modified sequence
atgccggcatctgctccgcctcgacgaccaagacctcctcccccttccctctctctgctcttggtgctgttggggctaggtggaagaaggctcagagcagaacccggtgatggcgcccagacctgggcccgattctcaaggcctccggcccccgaggccgcgggactgtttcaaggaaccttccccgatggattcttgtgggccgtaggatctgctgcgtaccagaccgaaggcggatggcagcagcacggaaaaggcgccagcatctgggatacctttacccaccatcctttggcacctccaggcgactccaggaacgccagcctcccattgggggccccttctcctttacagcccgccactggggatgtagcatcagactcctacaataatgtcttcagggataccgaagcactgcgcgagctgggggtgacgcattacagattttcaatcagctgggcaagggtgcttccaaatgggtcggctggcgtacccaaccgcgaaggtctgcggtactacaggcggcttttggagagactgagggaactgggcgtgcagccagtcgtgacactgtatcattgggacctcccccagcgccttcaggacgcatacggtggctgggccaacagggcgttggccgaccacttccgggactacgcggagctgtgcttcagacactttggaggtcaggtgaagtactggattacaatcgataatccgtatgtcgtggcttggcacggttatgcaacagggcggctagcacctgggatccgggggagcccgcggctggggtacttggttgctcacaatttgctactggcacatgctaaggtgtggcatctgtacaacactagcttccgccccacccagggcgggcaggtgtccattgcgctttcctctcactggatcaaccctcgcagaatgacagaccattccatcaaggaatgtcaaaaatcactggattttgtgcttggctggtttgccaagcctgtgtttattgacggggactaccctgagtctatgaagaataacttgtcttcgattctccccgatttcacggagtcagagaaaaagtttatcaagggcactgccgactttttcgccctctgcttcgggcctacactgtcattccaactcctcgacccccacatgaagtttagacagttagagagtcctaacctgcggcagttactgagttggatcgatttggagttcaaccacccgcagatattcatagttgaaaatggatggtttgtgtcggggaccaccaagcgggatgatgctaaatacatgtattatctcaaaaaatttattatggagacactcaaggccataaaactggatggtgtggacgtgataggctatactgcgtggagccttatggacggattcgagtggcacaggggttactctatacggcgaggactgttctacgtcgactttctcagccaagataagatgttgctgcctaaaagcagcgccttgttttatcagaagctcatcgaaaagaatggtttccctcccctgcccgagaatcagccgctggagggaacatttccctgcgacttcgcctggggcgtggtcgataattacatacaggtgagccagctgacgaagcccattagcagtctgaccaagccctatcac

SEQ ID NO: 149781 - DNA, 1647 bp, Artificial Sequence
  derived and/or modified sequence
atgcctgcttcagcaccccccagaagaccaaggcccccacctccttcgctctcgctgttgttggttctgctgggcttgggcgggcgtcggctgagggccgaacctggagatggcgcccaaacctgggctcggttttccagacctcctgccccggaggccgctgggttattccagggcacatttcctgacggtttcctgtgggctgtcggatccgccgcttaccagaccgagggcggctggcagcagcacggcaagggcgctagcatttgggataccttcacacaccatcctctggctcctcccggcgactcgcgcaacgctagcctccctcttggggcaccttctcccctgcagccggcaacaggagatgtcgctagcgacagctataacaatgttttcagggatactgaggccttacgggagctgggagtgacccattaccgtttttctatctcctgggcgagagtactgcctaatgggagcgctggcgtccctaatcgtgagggtctgcgctattaccgcagattgctggaaaggttgagagagctcggcgtgcaaccggtcgtgacactgtatcactgggacctcccgcagaggttgcaagacgcttacggcggatgggcaaatcgtgcactggcggaccattttagggactacgccgagttgtgcttccgccactttggtggacaggtgaaatactggattaccattgataacccttacgttgtcgcttggcatggatacgcaaccggccggctggctcctggaatcagaggtagtccaaggctgggctacctcgttgcacacaaccttttgctggctcatgctaaggtatggcacctgtacaacacatcctttcggcccacgcagggtggacaggtcagcatcgctctgtcttctcactggattaacccacgcaggatgaccgaccacagtatcaaggagtgccaaaagtctctggattttgtgctgggctggtttgccaagcctgtttttattgacggggactaccccgagagcatgaagaacaacctgtcctctatcctgcccgacttcacggaaagtgagaagaagtttatcaaaggtaccgccgatttttttgctctgtgtttcggccctacgctgtcttttcagcttctggacccacatatgaagtttaggcagttggaatccccaaacctgcgccagctgttatcctggatcgaccttgaatttaatcacccgcagatctttattgtcgagaacgggtggtttgtgagcggcacaactaagcgcgacgacgccaaatacatgtattacttaaaaaaattcataatggaaactctgaaagcaatcaaactcgacggggtcgacgtgatcggctacactgcttggtcattgatggatgggttcgagtggcataggggttatagcattaggagaggcctgttctacgtggacttcctgagccaagacaaaatgttgctgcctaaaagcagcgctctgttttaccaaaagctgatcgaaaaaaatggcttcccccccctgcctgaaaaccaacctctggaaggcaccttcccttgtgatttcgcttggggagttgtcgacaattatatccaagtgtcacagctgaccaagccgatttcaagcctgaccaagccctaccac

SEQ ID NO: 149782 - DNA, 1647 bp, Artificial Sequence
  derived and/or modified sequence
atgcccgcttctgcgccaccgaggcgcccaagaccgccgccaccgtccctctcgctgctactggtcctcttgggtctgggaggacgccgcttgcgcgccgagccaggagatggagctcagacctgggccaggttttcacgaccgccagcgcccgaggccgctggtctgttccagggaacgttccctgacggcttcctgtgggctgtcggctcagcagcctaccagaccgagggaggatggcagcaacacggcaagggcgcaagcatatgggatacattcacccaccacccacttgccccgccgggagacagccgaaatgccagcttgccgctgggcgccccgtcgccgctgcagcccgccactggagacgtggccagcgactcctataataacgttttccgagacacggaggctctccgggagctgggcgttacccactaccgtttttctatctcctgggcacgcgtgctgcccaatggatccgcgggcgtgcctaatcgcgaggggttgcgttactaccgccgtttgctggagcgattgcgcgagctaggagtgcagccagtcgtaacgctttaccactgggacctgccccagcgtctccaggacgcctacggcggttgggcgaatcgtgctctggccgaccatttccgggattacgccgagctgtgcttccgacatttcggcggccaggttaagtactggataacaatcgacaacccctatgtagtggcgtggcatggatatgccacgggacgcctagcgccgggcattcgaggctcaccccggctgggttatttggtggcgcataatcttctgttggcccacgccaaggtatggcacttatataataccagtttccgtcccacccagggtggacaggtgtctatagcactgagctcgcactggattaacccgcgaagaatgaccgaccactctattaaggagtgtcaaaagtcgctggacttcgtgcttggatggtttgctaagccagttttcattgacggtgactacccagagtccatgaagaacaacctgtcctcaattctgccggactttacggagagcgagaagaagttcataaagggcacagccgattttttcgcgctctgcttcggccccaccctgagctttcaactgctggaccctcatatgaagttcagacaacttgagtcgccgaacctcaggcagcttcttagctggattgaccttgagttcaaccacccccaaatttttatcgttgagaacggctggttcgtgtcaggtaccacgaaacgcgatgacgcaaagtacatgtactatttgaaaaaattcataatggaaacgctgaaggccatcaaactcgacggcgtggatgtcattggctatacagcctggtcgctgatggatgggtttgaatggcaccgtggttacagcatccgacgaggattgttctatgtcgatttcctctcgcaagataagatgctactgccaaagagttccgctctgttctaccagaagctaatcgagaagaacggatttcccccgttgccagaaaaccagcccctggagggaacctttccctgcgactttgcctggggcgtggtggataattacatccaggtctcccagttgaccaagcccataagcagtcttaccaagccttatcac

SEQ ID NO: 149783 - DNA, 1647 bp, Artificial Sequence
  derived and/or modified sequence
atgccagcctccgcacctccaaggaggcctaggcctccccccccctctttgagtttactgctagtgttgctcggcctgggcggccgaagacttagagccgaacccggagacggggcgcagacatgggctcgttttagcagaccaccggccccagaggccgctggactcttccagggtaccttccctgatgggttcttatgggcagtgggttccgctgcctaccaaaccgagggggggtggcagcagcacggaaagggtgcttcaatctgggatactttcacacatcacccgttggcccctccaggggattcaagaaatgcctctctgcccctgggcgcgccttcccccctacaaccagccacgggggatgtcgccagtgattcttacaacaatgttttcagagatacggaggctcttagggaacttggggttactcactacaggttcagcatttcctgggctagggtgttgccaaatggaagcgcgggggtgccaaaccgggaaggcctccggtactatcggcgcctgctcgagcgcctccgcgaactgggagtccagcccgtggttacactgtatcattgggacttgccgcagcgactgcaggatgcgtacgggggatgggctaacagggcacttgccgaccactttcgcgattacgcagagctttgcttccgtcactttggggggcaggtcaagtactggatcactatcgataatccctacgtggtggcatggcatggctatgcaaccggcaggcttgctcctgggatcagaggcagtcctaggctgggctacctcgtggcgcataacctgttgctcgcccatgcaaaggtttggcatctgtataatacgtcgttcagaccaactcagggagggcaggtaagcatcgcactgagtagtcattggatcaatcctaggagaatgactgatcactcaatcaaggagtgccaaaagagcttggatttcgtgctgggctggtttgctaaaccagtgtttattgacggtgactatccagagagtatgaaaaacaacttgtcctctatcctgcctgatttcaccgagtcagaaaagaagttcatcaagggcacagctgatttttttgcattgtgtttcggcccgaccctcagctttcagctgctcgatccccacatgaagtttaggcagctcgaatccccaaatctgcggcagcttctgtcctggattgatctcgaattcaaccacccccagatcttcatagtcgaaaatggctggtttgtatctggtacaaccaagcgcgatgatgctaagtacatgtattaccttaagaagttcattatggaaacactgaaagctattaagctggatggtgtggatgtgatcggctacaccgcgtggtcactaatggacgggtttgagtggcaccggggctatagtatcaggagagggctgttctacgtggatttcctgtcccaggacaaaatgttgctgcctaagagctcagcgctgttttatcagaaattaattgagaagaacggttttcctccacttccggaaaaccagcctctcgagggtacctttccctgcgactttgcctggggagtcgtagacaattatatccaagtttcccagttaaccaagcctatcagttctctcacaaaaccctaccac

SEQ ID NO: 149784 - DNA, 1647 bp, Artificial Sequence
  derived and/or modified sequence
atgcctgcttctgccccaccgcgtcgtccaagaccgcctcctccgtcgttgagcctgttgttggttctgctcggactgggcgggcggcgtctccgagccgaacctggcgacggtgcacagacctgggcaaggttttcccgaccgccagctcccgaggccgccggcctctttcaaggcacttttcccgatggatttctgtgggccgtgggttcggcagcctaccaaaccgaaggagggtggcagcagcatggaaagggggcgtcgatctgggacacttttactcatcacccactcgctccgcccggcgactcccggaatgcttcccttccactgggcgcgcctagcccgttgcagcctgccactggtgatgtcgcctcagacagctacaacaatgtgttccgggataccgaagcccttcgggagctgggagtcactcattatagattttcaatctcatgggctcgcgtgctgccgaatggttcagcaggagtgccaaacagagagggactcagatactaccggcgcctcctcgagaggctgagagaactgggtgtgcagccggttgtgaccctctaccactgggatctgccacagcggctgcaggacgcatacggtgggtgggcaaacagagctctggcggatcacttccgtgactacgccgagctctgcttccgccattttgggggtcaagtgaagtactggataactatcgacaacccgtacgtggtggcctggcacggatacgcgacgggccgactggctccggggatccgcgggagcccgcgcctgggatacctggtggcgcataatctgctgctggcccatgccaaggtctggcacctgtacaacacttctttccgcccaacccaaggaggacaggtgtcaatcgccctcagctcacactggattaacccgcggcggatgactgaccactcgatcaaggaatgtcagaagtcgcttgactttgtgttgggatggttcgcaaaaccagtgttcattgacggagattacccggaatcgatgaagaacaacctctcatcgatcttgcccgacttcacggagtccgagaagaagttcatcaagggaaccgctgatttctttgcgctgtgtttcgggcccacgctttcgttccaattgttggaccctcatatgaagttcaggcagctcgaatcgccgaacctccggcagctgctctcctggatagatctggagttcaaccacccgcaaatcttcatcgtggagaatggatggttcgtgagcggaaccaccaaaagagatgacgctaaatacatgtactatctgaaaaagtttatcatggaaactctgaaagcgatcaaactggacggcgtggacgtgatcggatataccgcatggtccctgatggatggcttcgagtggcaccgcggatactcaatccgccgcggccttttctacgtggattttctttcgcaagataagatgctcctgccgaaatccagcgccttgttctaccagaaattgatcgaaaagaacggctttccgccgctgcctgaaaatcaaccccttgaaggaaccttcccatgcgacttcgcctggggcgtggtcgataactacatccaggtcagccagctcactaagccgatcagctcgctgaccaagccgtaccac

SEQ ID NO: 149785 - DNA, 1647 bp, Artificial Sequence
  derived and/or modified sequence
atgcctgcatccgcacctcccaggcgaccacggccaccgcctccctcgctttctcttctcttggtgctcctggggctcgggggcagacgccttcgggctgagccgggagatggagcacagacctgggcccggttctcccgccctcccgcaccagaagcagcaggtctgtttcaagggacgtttcctgatgggtttctgtgggcagtgggctcggcagcctaccagaccgagggtggctggcagcaacatggcaagggggcttcgatttgggatacttttactcatcatccccttgcgcctccaggtgatagccggaacgcctcgcttcccctgggcgctccttcaccactgcaaccggcgaccggagatgtggcttccgactcgtataacaacgtctttcgcgatactgaagcactgcgtgaactcggggtcactcactacagatttagcatttcctgggcgcgagtgctgcctaatgggagcgcaggcgttccaaatagagaaggactgagatactaccggagactgctggaaagactgagggaactgggagtgcagcctgtggtgactctttatcattgggaccttcctcagagactgcaggatgcatacggcggttgggccaatagggcactggcagaccattttcgggattacgccgagctctgttttcgacattttggagggcaagttaagtactggattacgatcgacaatccttacgtggtcgcttggcatggctatgcaacgggtcgtctggcccctggaattcggggatcccctagacttggttacttggtggcacacaacctgctgctcgcgcacgcaaaggtctggcacctgtataacacctctttccgcccaacccaaggcggacaagtgagcattgctctgtcctcccattggataaacccgcggcgaatgaccgatcactccataaaagaatgccaaaaatcccttgactttgtgctcggttggtttgccaaacctgtgttcattgatggagattaccccgagtcaatgaaaaacaatctgtcctcgattctgccagactttactgagtcggaaaagaagttcataaagggcaccgcggactttttcgcactttgcttcgggcctaccctgagctttcaactccttgaccctcacatgaagttcagacaactcgaatcccccaatctgcgtcaactgctgtcttggattgatctcgagttcaaccatccacagattttcattgtggagaatggatggtttgtgtcgggaacgactaagcgcgacgacgccaagtatatgtattaccttaagaagtttatcatggagactctcaaggcaattaagctggatggcgtcgacgtcatcggatacaccgcctggtcccttatggatggttttgagtggcatcgaggatactccattcgtagaggtcttttctacgttgacttcctttcgcaagataagatgctgcttccaaagtcgtcggcgcttttctatcagaaactcattgagaaaaacggattccctccgcttccagagaaccaacctctcgagggcacctttccctgtgatttcgcatggggcgtggtggataactacatccaagtgtcacagctcaccaagccaatttccagcctgactaagccctaccat

SEQ ID NO: 149786 - DNA, 1647 bp, Artificial Sequence
  derived and/or modified sequence
atgccagcgagtgcaccgcccaggcggccacggcctccaccaccatcactgtctctgctgttggtgcttctgggccttggcgggagacgcctgagagctgagccaggagatggcgcacagacgtgggcacgcttttcacggccacccgccccagaagcagcaggcctctttcagggcacctttcccgatgggttcttgtgggccgtcgggtctgctgcctatcagaccgaaggaggctggcagcagcacggcaagggcgccagtatatgggacacgtttactcaccatccgcttgcaccacctggcgactccagaaacgcctccctgcctttgggagcaccgagtccgttgcagcctgccacaggggatgtggcgagcgattcatataacaacgtctttagagatacagaagctttgcgggaattgggcgtgacccattataggttctctatatcatgggcgcgggtattgccgaacggttcagcgggcgtgccaaatcgggaaggacttagatactaccgcaggctgctagagagactccgggagttgggagttcagcctgtggtgactttataccactgggatctcccacaaaggctgcaggacgcatatggcggttgggcaaaccgggcattagctgatcactttagggactacgccgagctttgcttcaggcacttcggtggtcaggtgaaatactggatcacaattgataacccctacgtggtggcttggcatgggtatgctactggacggttagccccgggcatcagaggatctccgagactcggatacctcgtcgcacacaacctgctacttgctcatgccaaagtttggcatttatacaacacatcctttaggccaacacagggtgggcaggtctcaatagctctttcctcacactggattaacccacggcggatgaccgaccactcaattaaggagtgtcaaaagagcctggattttgtgctggggtggtttgcgaaaccagtctttatcgacggggactaccctgagtcaatgaaaaacaacctttccagcatactgccagattttacggaatcagagaagaaatttattaaggggaccgctgacttcttcgctttgtgctttggtccaaccttatcctttcagctgctagatccgcacatgaagtttcgccagcttgaatccccaaacctgagacagttgctctcctggattgatctcgaattcaaccaccctcaaatattcattgtcgaaaatggttggtttgttagtgggaccacgaaaagggacgacgccaagtatatgtactacctcaagaaatttattatggagactcttaaagccatcaaattagacggcgtggatgtcattggatatacagcctggagcctgatggacggcttcgaatggcatcgcggctacagtatcagacgcgggctgttctacgttgattttttgtcccaagataaaatgctgctgcccaagtccagcgcactcttctaccagaaactgatcgagaagaacgggttcccacctctgcccgagaatcagccgctcgaaggaacattcccatgtgattttgcctggggtgtggtggacaattatattcaggtgagtcaattgaccaagcctatatccagcctgactaagccgtatcac

SEQ ID NO: 149787 - DNA, 1647 bp, Artificial Sequence
  derived and/or modified sequence
atgcccgcgagcgcaccccccaggaggcccagacccccccccccgagcttgtccctgctgctcgtcctccttgggctgggtgggagacggctccgcgcagagccaggagatggcgcccagacctgggcaaggttcagtcgacccccagcccccgaagcagccggactgttccaggggactttccccgacggtttcttgtgggcagtagggagcgccgcataccagacagaagggggctggcagcagcatggcaaaggagcaagcatctgggataccttcacccatcacccccttgcgcctcctggtgacagccgaaatgcaagtttgccccttggcgcaccatcccctttgcagccagccactggtgacgtggcctccgattcatacaacaacgtgttcagagacactgaggcactgagagaactgggcgtgactcactacagatttagcatttcttgggctcgcgtcctgcctaacggcagcgcaggtgtacctaacagagagggcctgagatactataggcgacttctcgagcggctgcgagaacttggcgtccagcctgtggtgacactgtatcactgggacctcccccagagactccaggacgcttatggagggtgggctaatcgggccctggcagaccacttcagggactatgctgaactgtgctttaggcatttcggcggccaggtaaagtattggattaccatcgacaatccgtatgtggtcgcctggcacggctacgccacaggcagattggcgccagggatccgagggagtcccagactggggtatctggtggcccataatctgctcctggcacacgccaaggtctggcatctttacaacacatcattccggcccacccagggggggcaagtttccatcgcattgtcatcccactggattaatccacgaaggatgacggaccattctatcaaggaatgtcagaagagcttggatttcgttctgggttggttcgctaagcccgtttttatagatggtgactaccctgaatcaatgaaaaacaacttgtcctccatcctgcctgatttcactgagtctgaaaaaaagtttataaaaggcaccgccgattttttcgccctctgtttcggacctactctgtctttccagctgcttgatccccacatgaagtttaggcagctggagtctccaaacctgcggcagttgctgtcctggattgaccttgaattcaaccacccacagatttttatcgttgaaaatggttggtttgtgagtgggacaactaaacgggatgacgctaagtatatgtactacctcaaaaagtttattatggaaacactcaaggccatcaagctggacggcgttgacgtcatcggttatacagcttggtcccttatggatgggtttgaatggcatcggggatactctatacgcagaggactgttttacgtggattttctttcacaggataagatgttgctgcctaaatcctctgccttgttttatcagaaattgatcgagaagaatggattccccccactcccggagaaccagccgctggagggtactttcccatgcgattttgcttggggtgtggtcgacaattatattcaagtctctcagctgaccaaaccaattagctcattgactaaaccttaccat

SEQ ID NO: 149788 - DNA, 1647 bp, Artificial Sequence
  derived and/or modified sequence
atgccagcctccgccccccccagacggccgcgccctccccctccgtcgctctccctgctgttggtgcttctagggttgggaggtcggagattgcgcgcagaaccgggcgatggggcccagacatgggctaggttctcacgccctcccgcacctgaagccgccggactcttccagggaactttccccgatggtttcctgtgggccgtcggctccgctgcctatcagaccgaggggggctggcagcaacatgggaagggcgccagcatatgggacacattcactcaccatcccttagcaccccccggggattctcggaacgcaagcctgcctctcggcgcaccatctccactccagccagccacaggggatgttgccagcgatagctataataatgtatttcgggacactgaggcccttagagagctgggcgtgactcactatagattctcaatcagctgggcccgagtcctgccgaacgggagtgcgggtgtacccaacagagaaggactgcggtactataggagactgctcgagaggctcagagagctgggagtacagcccgtcgtcaccctgtaccactgggacctgccacagcgccttcaggacgcatatggcggctgggctaatcgagcgctggctgatcattttagagactacgccgaactatgcttcagacactttggcggacaggtcaaatattggattacaattgacaacccctacgtggtggcttggcacggatacgccaccggaagactggcaccagggattcggggctctccccggctcggctacctcgtggctcacaatttgctactggcccatgcgaaggtttggcatttgtacaacacttcttttcggcctacgcaaggcggccaggtctctatcgcattgtccagccactggattaatccacgccgtatgacagatcactcaatcaaggagtgccagaagagcctggattttgttctgggctggtttgctaaaccggtgttcatcgacggcgactatcctgaatctatgaagaataacctttctagtatcctgccggacttcactgagagtgagaagaagtttatcaaaggaacagcggactttttcgccttgtgcttcggacccaccctgtctttccaactgctcgatccccacatgaagttccgccagctggagagtcccaaccttcgtcagctcctctcatggattgatcttgaatttaatcatcctcaaatcttcatcgtcgaaaatggctggtttgttagcggcactaccaaacgcgacgatgccaagtatatgtactacctgaaaaagtttatcatggagactctgaaggccataaaattggacggcgtggatgtaatagggtatactgcatggtcactcatggatggcttcgagtggcaccgcggctatagcatccgcagaggcctgttctacgtggactttctgagtcaggataaaatgcttcttcccaagtccagcgcactattctatcagaagcttatcgagaagaacggattcccacctttgcctgagaatcagcccctcgagggtacctttccatgtgacttcgcatggggcgttgtggacaactacatccaggtcagtcaattgacaaagcccatcagctcccttactaagccttaccac

SEQ ID NO: 149789 - DNA, 1647 bp, Artificial Sequence
  derived and/or modified sequence
atgccggccagcgcccctccacgtcgaccacgccctccacctccatcgctctcgctgttgctggttctgctgggcctggggggaaggagactcagagccgaaccgggcgacggagcgcagacctgggccagattctcgcggccaccggcaccggaggctgccggactgtttcagggcacttttccagacggatttctctgggcagtcggctccgcggcataccagaccgaaggtggttggcaacagcatggcaaaggagcttccatctgggacactttcacccaccatccactggccccaccgggagactcaaggaacgcctcactcccgttgggtgctccgtcccctctgcagccagcaactggagatgtggcaagcgattcatacaacaacgtgtttagggatactgaagccctgcgggaactgggagtgactcactaccgcttctcgatcagctgggcacgggtgctgccgaacggttcggccggagtgccgaaccgggagggactgagatactacagacggctcctggagagacttcgcgaactgggagtccaacctgtcgtgactttgtaccactgggatctcccgcagcgcctgcaggacgcctacggaggctgggctaatagagcgctggcggatcactttcgggactacgcagagctgtgcttccgccatttcggtggacaagtcaaatactggatcaccatcgacaacccgtacgtcgtcgcctggcacgggtacgccactggacgcttggcccctggaatccgcggaagcccacggctgggctacctggtggcacacaatctgcttcttgcacacgctaaggtgtggcatctgtacaacacttcgttccggccgacccagggcggtcaggtcagcatcgcactttcttcccattggatcaaccctagacgcatgaccgaccactccatcaaagagtgtcaaaagtccctggactttgtcctgggttggtttgcgaagccagtgtttatcgatggagattacccggaatcgatgaagaacaacctttcgtcgatcctcccggatttcaccgaatccgagaaaaagtttatcaagggtactgctgacttttttgcgctctgcttcggaccgaccctcagctttcagctcctggacccgcacatgaaatttcgccaactcgaatccccaaatcttcggcaactgctcagctggatcgacctcgagttcaaccatccgcagattttcatcgtggaaaatggatggttcgtttctggtactactaaacgcgatgacgctaagtatatgtactacctgaagaagttcatcatggaaaccctgaaggccatcaaactggatggagtggacgtgatcggctacactgcttggagcttgatggacggattcgaatggcaccgcggatactccatccgccgggggctcttttatgtggacttcctgtcccaggacaaaatgctgcttccgaagtcgtcggctctgttctaccaaaaactgatcgagaaaaatggatttccgcccctccccgaaaaccaaccgctcgagggtactttcccctgcgacttcgcatggggcgtggtggacaattacatccaagtcagccagctcactaagccgatcagctcgctcaccaagccgtaccac

SEQ ID NO: 149790 - DNA, 1647 bp, Artificial Sequence
  derived and/or modified sequence
atgccagcctccgccccaccccgacgtcctcgaccaccgccgccgagtctctcgttattgctagttctcttgggattgggaggtagacgattaagggctgagccaggtgatggtgctcaaacttgggctcgattctcccggcctccagctccagaggccgccggactcttccaaggaacttttccagatggtttcctttgggccgttggaagcgccgcataccaaaccgagggaggctggcagcaacacggaaagggcgcaagtatttgggatacctttactcatcacccgcttgcgcctccaggagattcacgtaacgcgtcccttccattgggagcaccgagcccgttgcaaccagcaaccggagatgtggctagtgacagttataacaacgtctttagggatacagaggccttgagggagttaggagtaactcattataggttttcgataagctgggcacgtgtgctcccgaatggatccgctggagtgcccaatcgtgagggactacgatattatcgaaggctacttgaacgcttacgtgaattgggcgtgcaaccggtggtgactctttaccactgggatttgccacaacgtcttcaagatgcatatggaggatgggcaaacagggcattggcagatcactttcgtgactacgcggaattgtgcttccgacattttggagggcaagtgaaatattggattactatcgataatccatatgtggttgcctggcacggctacgcgaccggtagactcgctccaggtatccggggtagtccacgacttggatacttggtagctcataatcttcttctagctcacgctaaggtttggcacctttataatacatcgttccgaccaactcaaggaggacaggtttccattgcgctctcgtctcattggattaatcctagaagaatgacggatcactctattaaagaatgccaaaagtcgctagatttcgtgctggggtggttcgccaagccagtttttatcgacggtgactacccggaatctatgaagaataatctttcttcaattttgcctgatttcacagaaagcgagaaaaagttcattaaaggaacagcggacttctttgcgctctgctttggacccacactaagcttccaactgttggatccacatatgaagtttagacaacttgaatcaccaaatttgagacaattgctctcttggattgatttagaatttaaccatccacagattttcatagtggagaatggatggttcgtctcaggaacaacaaaaagggatgatgctaagtatatgtactatcttaaaaagtttatcatggaaaccctgaaagcaataaaattggatggagtagatgttattggatacacggcgtggtcacttatggatggattcgagtggcacagaggatattcgattcgtagaggccttttttatgttgatttcctatcccaggacaaaatgcttcttcctaaatcatcggctttgttctaccaaaagttgattgaaaagaatggatttccaccacttccggaaaatcaacctcttgaaggaacttttccttgtgatttcgcgtggggtgttgtggataattatattcaagtttctcaacttacaaaaccaatttcgtctttaacaaaaccataccat

SEQ ID NO: 149791 - DNA, 1647 bp, Artificial Sequence
  derived and/or modified sequence
atgccggcttctgccccaccgcgcagaccacggccccctccgccctcgctctccttgctgttggtgctcctcggactgggtgggcgcaggctccgcgccgaaccgggagacggagcacagacctgggctcgcttctcgcggccacccgcccctgaggcagccggtctgttccagggaacgtttccggacggatttctgtgggccgttggctccgcagcgtaccagactgagggtggctggcagcagcacggaaagggagccagcatctgggataccttcacccatcatccactcgcaccaccgggtgatagcagaaatgcgtccctgcctctgggagctccgagcccactccagccagcgactggagacgtggcgtctgacagctacaataacgtgtttcgcgacaccgaggctctgcgggaactgggcgttactcactacaggttctccatatcatgggcaagagtcctgccgaatggctcagctggagtgccaaatcgagaaggactgagatactaccgcagactcctcgagcgcctgagagaactgggggttcagcctgtggtgaccctctaccattgggatcttcctcagcggctgcaagatgcctatggtggatgggccaacagggctctcgccgatcactttcgggattacgccgagctttgcttccggcacttcgggggacaggtcaaatactggatcaccatcgataatccatacgttgtggcgtggcacggatacgcgacggggcggctggcgccggggattcgggggtccccgcgcctgggatatctggtcgcgcacaacctgctcctggcccacgcgaaggtgtggcatctctacaatacttccttccgccccactcagggcggacaggtgagcatcgccctctcgtcgcattggatcaacccgaggcggatgaccgaccactcgatcaaggaatgccagaagtcacttgattttgtgctgggatggtttgccaagcctgtgttcatcgatggagattacccggaatcgatgaagaataacctgtcctcgatcttgccggattttactgaatcggagaagaagtttatcaagggtactgctgacttcttcgcgctttgcttcggaccaaccctctcgtttcagctcctggacccgcacatgaagttcaggcagctcgagtccccgaacctgcgacagctcttgtcctggatcgacctcgagttcaaccacccccagatcttcattgtggagaacggttggttcgtgtctggtactaccaaacgcgatgacgcaaagtatatgtactatctgaaaaagttcatcatggaaaccttgaaggctatcaaattggacggcgtggacgtgattggatacaccgcatggtcgcttatggacggcttcgagtggcataggggctactcgattaggcgcggacttttctatgtcgacttcctttcgcaggataagatgctcctgccgaagtcgtccgctctcttttaccagaaactgattgagaaaaacggcttccctcctctgccggaaaaccagccattggagggtacctttccctgcgacttcgcctggggagtcgtggacaattacatccaggtgtcccaattgaccaaaccaatctccagcttgactaaaccgtaccat

SEQ ID NO: 149792 - DNA, 1647 bp, Artificial Sequence
  derived and/or modified sequence
atgccggcgtcggcgccgccgcgtcgaccgcgaccgccgccgccgtcgttatcgctattattagtactactaggtctaggtggtcgacgactacgtgcggaaccgggtgatggtgcgcaaacgtgggcgcgattttcgcgtccgccggcgccggaagcggcgggtttatttcaaggtacgtttccggatggttttctatgggcggtaggttcggcggcgtatcaaacggaaggtggttggcaacaacatggtaaaggtgcgtcgatatgggatacgtttacgcatcatccgctagcgccgccgggtgattcgcgtaatgcgtcgctaccgttaggtgcgccgtcgccgttacaaccggcgacgggtgatgtagcgtcggattcgtataataatgtatttcgagatacggaagcgttacgagaattaggtgttacgcattatcgtttttcgatatcgtgggcgcgagtattaccgaatggttcggcgggtgtaccgaatcgtgaaggtttacgttattatcgacgtctactagaacgtttacgagaactaggtgtacaaccggtagtaacgttatatcattgggatctaccgcaacgtttacaagatgcgtatggtggttgggcgaatcgtgcgttagcggatcattttcgagattatgcggaactatgttttcgtcattttggtggtcaagtaaaatattggataacgatagataatccgtatgtagtagcgtggcatggttatgcgacgggtcgtctagcgccgggtatacgtggttcgccgcgtctaggttatttagttgcgcataatttactactagcgcatgcgaaagtttggcatttatataatacgtcgtttcgtccgacgcaaggtggtcaagtatcgatagcgctatcgtcgcattggataaatccgcgacgtatgacggatcattcgataaaagaatgtcaaaaatcgttagattttgtactaggttggtttgcgaaaccggtttttatagatggtgattatccggaatcgatgaaaaataatctatcgtcgatactaccggattttacggaatcggaaaaaaaatttataaaaggtacggcggatttttttgcgttatgttttggtccgacgttatcgtttcaactattagatccgcatatgaaatttcgacaactagaatcgccgaatctacgtcaactactatcgtggatagatctagaatttaatcatccgcaaatatttatagttgaaaatggttggtttgtatcgggtacgacgaaacgtgatgatgcgaaatatatgtattatttaaaaaaatttataatggaaacgttaaaagcgataaaactagatggtgttgatgttataggttatacggcgtggtcgttaatggatggttttgaatggcatcgtggttattcgatacgtcgtggtttattttatgtagattttctatcgcaagataaaatgctactaccgaaatcgtcggcgttattttatcaaaaattaatagaaaaaaatggttttccgccgttaccggaaaatcaaccgttagaaggtacgtttccgtgtgattttgcgtggggtgtagtagataattatatacaagtttcgcaattaacgaaaccgatatcgtcgctaacgaaaccgtatcat

SEQ ID NO: 149793 - DNA, 1647 bp, Artificial Sequence
  derived and/or modified sequence
atgccggcgagcgcaccacctaggcgaccgcggccaccgccgccttccctgtccctcctcttggtgcttctcggactcggagggagacggttgcgggcagagcccggggacggagcccagacttgggcaagattcagtagaccgcctgcccccgaagcggccggtctgtttcagggtaccttcccagacggattcctctgggccgtgggctcggctgcctaccagaccgaagggggatggcagcaacatggcaagggagctagcatctgggacacgtttacgcatcacccactggccccgccgggggattcacgcaacgcatccctgccgcttggagctccgtccccactgcaaccggcaactggggatgttgcgtcagactcctacaacaacgtattccgcgacaccgaggcgctgcgggagttgggagtcacccattaccgcttctcgatctcctgggcccgggtcctccccaatggaagcgcgggagtcccaaatcgcgaaggcctgcgctattaccgcagactgttggagcggctgcgtgaactcggggtgcagccggtcgtgaccctctaccactgggatcttcctcagagactccaagatgcttacggtggatgggccaaccgggctctcgccgatcacttcagggattacgccgagctctgcttccggcatttcggcggacaggtgaagtactggatcactatcgacaacccgtatgtggtggcctggcacggatacgccactggacggctggcgccagggatcagaggttcaccgcgtcttggataccttgtcgcccacaacctgctgctggcccatgcaaaggtgtggcatctttacaatacctcatttaggccaactcagggaggccaggtgtcgatcgctctgtcgtctcactggatcaatcctcgccggatgaccgatcactccataaaggagtgccaaaagtcactcgacttcgtactgggttggtttgctaaaccagtgtttattgacggcgactaccccgaaagcatgaagaataatctgtcgtccatcctcccggattttaccgaatccgagaagaagttcatcaaaggtaccgccgactttttcgcactgtgctttggaccaaccctcagcttccagttgctggaccctcacatgaagttcaggcagcttgagtcgccgaacctccgacagcttctgagctggattgatctcgaattcaaccacccccaaatctttatcgtcgaaaacggctggttcgtgtctggcactactaagcgagatgacgctaaatacatgtactacctgaaaaagttcattatggaaactctgaaggcaatcaagctggacggggtggatgtaatcggctacaccgcctggtccctgatggacggattcgaatggcatcggggctacagcattcgcaggggactcttctacgtggatttcctgagccaagacaaaatgttgcttccaaagtccagcgcgctgttttaccagaaactgatcgaaaagaacgggttcccccctttgccggagaaccagccactggagggaacctttccctgtgacttcgcatggggagtggtggacaactatatccaagtgtcccagctgactaaaccgatctcgagcctcacgaaaccgtaccac

SEQ ID NO: 149794 - DNA, 1647 bp, Artificial Sequence
  derived and/or modified sequence
atgccagcgagcgcgccgccccggcgcccccgcccaccgccaccgtcgctgagcctccttctggtcctcctgggcctgggaggacgccgcctgcgggccgaaccgggggatggagctcaaacgtgggcgagattctcccgcccacccgcaccggaagctgcgggactcttccagggaacctttcctgacggatttttgtgggcggtcggatcggctgcgtaccagaccgagggagggtggcaacagcacggtaaaggagcgtcaatctgggacaccttcacccaccacccactggccccaccgggagattcccgcaacgcctctctgccactgggtgcgccttccccgctccaaccggcgacgggagacgttgcctcagattcgtacaacaacgtgtttcgagacaccgaagcactcagggagctcggagtgacccattacaggttctccatctcatgggctcgcgtcttgccaaatggatcagccggggtgcctaatagagaggggcttcgctactaccggaggctgctggaaagactgagggaacttggagtgcagcccgtcgtcactctttaccattgggacctgcctcagcgcctgcaagatgcttacggcggatgggccaacagagcccttgcagatcactttcgcgactatgccgaactttgcttccggcacttcggcggacaggtgaaatactggatcactatcgataatccttacgtggttgcgtggcatggatacgcgaccggtcggctggcccctggaattcgggggtcgcctcgcctgggttacctcgtggcacacaatctgcttctggcccatgcgaaggtctggcacctttacaacacctccttccggccgacccaaggaggacaagtgtcgattgccctgagctcgcattggatcaacccacggcgcatgaccgatcactccatcaaggagtgccaaaagtcattggatttcgtcctgggatggtttgccaagcccgttttcatcgacggcgactacccggaaagtatgaagaacaacctctcttccatcctgccagatttcactgaatcagagaagaaattcatcaaaggtaccgcagacttttttgcactgtgtttcggtccaaccctctctttccaactcctggacccgcatatgaaattcagacagctcgagtccccgaatctgcggcagctcctctcgtggatcgaccttgagttcaatcacccacaaatctttatcgtggaaaacggctggttcgtgagcgggaccactaagcgcgacgatgccaaatacatgtactatctgaagaagttcattatggaaaccctgaaggcaatcaagctcgatggtgtggacgtgattggatacacggcctggtcgcttatggacgggttcgagtggcacagagggtacagcatcagacgcgggctgttctacgtggactttctcagccaggacaaaatgctcctgcctaagtcatctgcgctcttctatcagaagctcatagaaaagaacggattcccgcctctccccgagaatcagcctctggaggggaccttcccgtgtgattttgcatggggggtggtcgacaactatattcaggtgtcgcaactcaccaaaccaatctcatcgctgacgaagccataccac

SEQ ID NO: 149795 - DNA, 1647 bp, Artificial Sequence
  derived and/or modified sequence
atgcctgctagcgcgccacctaggaggcccaggcctcccccccccagcctgtctctgcttttagtgcttcttggcctaggaggacgaaggttgcgagccgagcctggggacggcgcccaaacctgggccaggttctcccggcctccagccccagaggccgccggccttttccagggaacattccccgatgggttcttgtgggcggttggatctgccgcgtatcagactgaaggtggttggcaacagcatggcaaaggtgccagtatctgggacacgttcacccaccacccgttggcccctcctggcgatagcagaaatgcctctctgcctttgggagctccctctcccctccagcccgcaacaggggacgttgcaagtgacagttacaataacgtgttccgggacaccgaggctcttagagagttgggcgtcacgcattatagattctctatcagctgggcccgtgtgctgcccaatggcagcgcgggggtgccaaatcgcgagggcctacgctattataggcggctgctggaacgcttgcgggagctgggtgtacagccggttgtgaccctctaccattgggatctgcctcagcgacttcaggacgcatatggtggatgggctaatagagcactcgcagatcacttccgtgactatgcggagttatgtttccgtcatttcggaggccaggttaaatattggataacaattgacaatccatacgtggtggcctggcatggatatgccactgggcgattagcccctggcattaggggttctccaagacttgggtatctggtcgcacacaacctgctgctggcacacgccaaggtgtggcacctgtacaacacatccttccgccctactcagggaggacaggtgtccattgctctttccagtcactggatcaatccacgtcggatgacagatcactccatcaaagaatgtcaaaaaagcctcgattttgtgctgggctggtttgccaagcccgtcttcattgatggcgattaccccgagagcatgaaaaacaacttgagctcgatcctgcctgacttcacagaaagtgaaaagaaattcattaaggggacggctgacttctttgccttatgctttggacccactctttcatttcaattgctggatccacatatgaaatttcggcagctggagagtccgaatctgcgacaattactttcctggattgatttggagtttaatcacccacagattttcatcgtcgagaacggctggttcgtgtcggggaccacaaagagagatgatgcaaagtacatgtactatctgaagaaattcatcatggaaaccctgaaggcgattaagctggacggggttgacgtaattggatacaccgcgtggagcctgatggacggctttgaatggcaccggggctactccatcaggcgtgggctgttctatgttgatttcctcagtcaggacaagatgctgctgcctaagagttccgctctgttttatcagaaattgatagagaaaaatgggttcccacctttaccagaaaatcagccacttgaggggacctttccgtgcgattttgcgtggggtgtggttgacaactatatacaggtttcgcagctcacaaaacccatctctagtcttaccaaaccatatcac

SEQ ID NO: 149796 - DNA, 1647 bp, Artificial Sequence
  derived and/or modified sequence
atgccggcgtcagctccgccacgcaggcctcggccacctcctccgtcgctgtcgctgcttctggtcctgctgggactggggggaaggcggctcagggcagagccgggcgacggtgcgcaaacttgggcccgcttctcgcggccaccagctccagaggctgcggggctgttccaaggcacctttccagacggcttcctgtgggcggtgggaagcgcggcctaccagaccgaggggggctggcagcagcacggcaaaggagcctccatttgggataccttcacgcatcacccgctcgctcccccgggagactcacggaatgcatccttgccgctcggagccccgtcccctttgcaaccagcaactggagatgtcgcatccgatagttacaataatgtgttcagagacactgaagccctccgcgaactcggagtgacccactaccggttcagcatcagctgggcacgcgtgctgcccaatggatccgccggagtgcctaaccgcgaggggctgcgctactaccgccgcctgttggagcgcctcagggagctgggggtccagcccgtggtgaccctgtaccattgggacctcccgcagcgtctgcaagatgcttatggaggatgggcaaatagggcattggcggatcacttccgggactacgcggaactttgcttccgccacttcggaggccaggtcaaatactggatcacgattgacaacccttacgtggtggcctggcatggatacgcaaccgggcggctggcacccgggatccgtggatcccctcgcctgggatacctggtggcccataatctgctcctcgcccatgcgaaggtgtggcacctttacaatacctcgttccgccctactcaaggcggacaggtgagcatcgctctgtcaagccactggatcaatccgagacgaatgaccgaccacagcatcaaggaatgccagaaatccctcgatttcgtgctgggctggttcgccaagccggtgttcatcgatggagactaccccgaaagcatgaagaacaacctgtcatccattctgccggatttcactgagtctgaaaagaagtttatcaaggggactgccgatttcttcgcactgtgctttggtcctaccctctctttccaactgctcgatccacacatgaaattccggcagctggaatcacctaatctgcggcaactgctgtcctggattgacctcgagtttaaccatccgcagatcttcatcgtcgagaacggctggttcgttagcgggactactaagcgggatgatgctaagtacatgtattatctcaagaagttcataatggagactctgaaggccatcaagctcgacggagtggacgtcatcggatacacggcctggtcattgatggatggttttgagtggcacaggggctactcgattagaagaggactgttctacgtcgacttcctgtcccaagacaagatgcttctgccaaagtcctctgcgctgttttaccagaagctcattgagaagaatgggttcccgccactgccagaaaaccaaccgctggaggggaccttcccatgcgatttcgcatggggagtcgtggataactacatccaggtgtcgcagctgaccaagccaatctcgtctctgactaagccataccat

SEQ ID NO: 149797 - DNA, 1647 bp, Artificial Sequence
  derived and/or modified sequence
atgcctgcatctgctcctcctagacgcccaaggccgccccccccatctctgagcctgctgctcgtgctgctcggacttggcggcagaagacttcgtgcggagcccggggatggagcccagacctgggcccggttttcacggcctcccgcccctgaggccgcgggcctgttccagggcacgttccccgacggcttcctgtgggccgtgggctcagccgcataccagacagagggaggctggcaacagcacggcaagggcgcatccatatgggatacatttacacaccatccattggcaccgcccggtgatagcaggaacgcctctctgcctctgggagcacctagccccctgcagccggctaccggagatgtcgccagcgactcatataataatgtcttccgcgatactgaggcactgagggagcttggcgtaactcattatcgtttttcaatcagctgggccagagtactgcccaacggtagcgcgggggtgcccaatagggaaggtctgcggtactatcggcgcctcctggagaggctacgggaactgggggtacagcctgtggtgacactctatcactgggacctcccgcagaggctccaggacgcttatggtggctgggcgaatcgggccctagctgaccactttcgggattacgccgagctctgttttaggcactttgggggccaggttaaatactggatcacaatcgataacccctacgtagtggcttggcatgggtacgcaaccggtagactggcccctggtatccggggttctccacgcctcgggtacttggtagcccacaacctccttctggcccacgccaaagtgtggcatctgtataatacgtcgtttcgaccgacgcaaggagggcaggtgtctatagctctgtcatctcattggatcaaccctcgccgtatgacggaccattccattaaagaatgtcagaagagtctggactttgtcctaggttggttcgctaaacctgtattcatcgacggtgactacccagaatccatgaaaaataatctgtctagtattctgcctgatttcacggagtcagaaaaaaaattcatcaaaggtaccgccgacttctttgccctgtgtttcggaccgacgcttagcttccaactgttggatccacatatgaaatttaggcaactggagagtcctaacctccgtcagctcttaagctggatcgacttggagtttaatcatccccaaatttttatagttgagaatggctggttcgtgtctggtaccaccaaacgggacgacgcaaagtacatgtactacctgaagaaattcattatggaaacactgaaagccatcaaattagatggggtcgatgtgatcggatacaccgcttggtctctaatggatggctttgagtggcatcgcggatacagcatccgaagaggtctgttttacgtggatttcctgtctcaggacaagatgttgcttcctaagtcctcagccctgttctaccagaaattgatagaaaaaaatggctttcctccactccccgagaatcagcctctagaaggaacatttccttgtgacttcgcatggggcgtggtagacaattacatccaggtttcccagctgaccaagcctattagttctctgacaaagccataccat

SEQ ID NO: 149798 - DNA, 1647 bp, Artificial Sequence
  derived and/or modified sequence
atgcctgcatccgcaccacctaggcgtccccggccgcccccaccatcgctgtccctcctcctggtgctgcttgggctgggcggccgtagactcagagcagagcccggggatggtgcccaaacctgggcacgattttcccgacctcctgcacctgaggccgctgggctgtttcaaggcacctttcccgatggttttctctgggcggtgggatcggcagcgtaccagactgaagggggatggcaacagcacggtaagggagcatcgatttgggatacctttacccatcatccactggccccgcctggtgactcccgaaacgcgtctctgccacttggagcaccatcgcctctgcagcccgctactggagatgtcgcctcagatagctacaacaacgtgttccgcgataccgaagcactgagagaactgggcgtgacccattacaggttttcaattagctgggcgcgagtgcttcctaatggaagcgctggggtgcccaacagggaaggactgagatactatcggcggcttctggaacgtctgcgggagcttggcgtgcagcccgtggtcactctgtaccactgggatctgcctcaacggctccaggacgcctacggaggatgggcaaaccgcgctcttgctgatcactttcgagattacgcagaactgtgctttagacactttggtggacaggtgaagtactggattactattgataatccttatgtcgtggcctggcacggatacgcaacgggtagactggcaccaggcattcgcggctcgccccggctgggataccttgtcgcgcataatctgctcctcgcgcacgcaaaagtctggcatttgtacaacacttcgtttcgaccaacgcaaggtggtcaagtgtcgatcgcactttcaagccactggatcaatccccgacgtatgactgatcattccatcaaggagtgtcagaagtcccttgactttgtgcttggttggtttgcaaaacccgtgttcatagatggagattaccctgagagcatgaagaataacctttcaagcattctgcccgacttcaccgagtccgaaaagaagttcattaaaggcactgccgactttttcgccctgtgctttggtccaactctttcgttccaactgcttgatcctcacatgaagtttagacaactggaatctcctaacctgaggcaactgctttcatggatagacctggagtttaatcacccacagattttcattgtggagaatggctggtttgtctctggcactaccaagagagatgatgcaaagtatatgtactatctgaagaaattcatcatggaaaccctgaaagcaataaagctggatggggttgatgtcatcggctacactgcgtggagcctcatggatggtttcgaatggcatagaggttactcgattcgccgaggtttgttctacgttgatttcctctcccaagataagatgctgctgccaaagtcatcggccctgttctaccaaaaacttatcgagaagaacggatttcccccacttcctgaaaaccaaccgcttgagggaacctttccttgtgactttgcatggggagtggtggataactacattcaggtgtcacagctgactaagcctatatcgtctcttactaagccttaccat

SEQ ID NO: 149799 - DNA, 1647 bp, Artificial Sequence
  derived and/or modified sequence
atgccggcgtccgctccaccgcgccggcccaggcctccgccccctagcttgagcttgttgctggtcctgctgggactcggaggacggcggctcagagcagaaccgggcgacggggcgcagacctgggcgcggttctcacgcccgccggctccggaagctgcggggctgttccagggaaccttccctgacggctttctgtgggcagtcggttcagcagcctaccaaacggagggaggatggcagcaacatggaaaaggagcgtctatttgggacaccttcacccaccatccgttggcaccgccgggggactccagaaatgcctcactgccactcggggccccgtctcctctgcagccggccacgggggacgtggcctccgactcctacaacaacgtgtttcgcgacactgaagcactccgggagctcggtgtgactcactaccggttttcaatctcatgggcccgggtcctgccaaatggatccgcgggagtgccgaacagggaaggcctcagatactaccgcaggctgctggaaaggcttagggagctgggtgtgcaaccagtggtgaccctctaccactgggatctgcctcagcggctgcaggatgcgtacggcggatgggccaacagggctctggccgaccacttcagagattacgccgaattgtgcttccgacatttcggaggacaggttaagtactggatcaccatcgacaacccgtatgtcgtggcctggcatggatacgctacgggacggctggctccgggaatccgcggaagcccgcgcctgggttaccttgtggcccataacctgctcctcgcgcacgctaaggtgtggcatctgtacaacacgagcttccgcccgacgcaaggaggacaagtgtcgatcgcccttagcagccactggatcaatccgcgccggatgactgaccactcgatcaaggagtgtcagaagtcccttgatttcgtgctggggtggttcgccaagccagtgttcatcgatggcgactacccggaatcgatgaagaataacctgagctccattcttcctgattttacggagtcggagaaaaagttcataaaggggactgctgatttctttgccctgtgcttcggaccaactctttcgttccagctgttggatcctcacatgaaattccgccaactggaatcacccaaccttagacagctgctgtcctggatcgacctggagtttaaccacccccagattttcatcgtggagaacggttggttcgtgtcaggcactactaagagagatgatgccaagtacatgtattatcttaagaagtttatcatggaaaccttgaaggcaatcaaactggacggggtggacgtgatcgggtatactgcatggtcattgatggacgggttcgagtggcacagaggatattcgatccggcgcggcctcttctatgtcgacttcctgtcgcaggacaagatgctcttgccgaaatcgtcggccctcttctaccaaaagctgatcgaaaagaatgggtttcccccactcccggagaatcagcctctggaaggcaccttcccgtgcgacttcgcttggggagtggtggacaattacattcaggtgtctcagctgaccaaaccaatctcatcgctgactaaaccataccac

SEQ ID NO: 149800 - DNA, 1647 bp, Artificial Sequence
  derived and/or modified sequence
atgccagcttcggctccgcctcgacgcccaagacccccgccgccctcgctctcgttgcttctggtcctcctcgggctcgggggacgcaggcttcgcgctgaaccaggagatggggcacagacgtgggcccggttctcgaggccacctgcccccgaagcagctggcctgttccaaggaacgttcccggatggttttctctgggcggtgggaagtgctgcgtaccaaaccgagggaggatggcaacaacatggtaaaggggcgtcgatctgggatactttcacccaccatccgttggcgccgcccggagacagccggaacgccagccttccacttggagccccaagcccactccagccggcaaccggagatgtggcgtccgactcatacaataacgtgttcagagacactgaagccttgcgggaactcggagtgacccactacaggttttccatctcgtgggcccgggtgttgcccaatgggtcagccggcgtgccgaaccgcgaaggactgcgctactaccgcaggctgctggagcgcctgcgcgaactgggggtgcagccagtggtaactctgtaccattgggatcttccgcaacgactgcaagacgcgtacggtggatgggcgaacagagcactggctgaccattttcgggattacgcagagctgtgtttccgccacttcggaggccaggtgaaatactggatcaccatcgataatccgtacgtcgtggcctggcacggttacgctaccggccgtctggcaccaggaatccgcggaagcccgagactgggctacttggtagcacacaatctgttgctcgctcatgcgaaggtctggcacctgtacaacacttccttccgtcctacgcagggcggccaagtctcgatcgctctgtcgagccattggatcaacccacgcagaatgaccgatcacagcatcaaagagtgtcaaaagtcactggacttcgtgctgggctggttcgccaagcccgtgttcattgacggtgactaccccgaatctatgaagaacaatctgtcatcgattctgccagacttcactgagagcgaaaagaagtttatcaagggaaccgctgatttcttcgccctctgcttcggacccaccctttccttccagctcctcgacccacacatgaagttccggcaactcgagagcccgaacctcaggcagcttctgtcatggatcgacttggagtttaaccatcctcagattttcatcgtggagaacggatggttcgtttccggaactaccaaacgagatgacgccaagtatatgtactaccttaagaaattcattatggaaacccttaaggcaataaagctcgacggtgtcgacgtgatcggttacactgcatggtctttgatggatggattcgaatggcaccgggggtactctatccgcagaggattgttctatgtggactttctgtcccaagacaaaatgctgctgccaaaatcctccgcactcttttaccagaagctgatcgaaaagaatggattccctccgcttcccgagaaccagcctctggaagggacttttccgtgtgacttcgcgtggggagtggtggacaattacattcaggtgtcccagctgaccaagcccattagctcactgaccaagccgtaccac

SEQ ID NO: 149801 - DNA, 1647 bp, Artificial Sequence
  derived and/or modified sequence
atgcccgcttcggcacctccgcgcagacctcggcctccccctccttccctttccctgcttcttgtgttgctcggacttggcggccgcagactgcgggccgaacctggcgatggcgcgcaaacctgggccagatttagccgcccaccagcaccagaggcagccggactgtttcagggtacttttccagacggattcctttgggctgtgggttcggcagcttatcaaaccgaaggtggatggcagcaacatggtaaaggggcatccatttgggacaccttcactcatcaccccctcgcacctcccggggattcgcggaacgcctcacttccactgggagcacccagccctctgcagcccgcgactggagatgtggcctctgattcgtacaacaacgtgtttagagataccgaggcattgcgagaactgggcgttactcattacagattctcgatcagctgggctcgcgtccttcctaacgggtctgcaggtgtccctaatcgggagggtcttaggtattacagaagattgctggagaggctgcgggaattgggagtgcaacctgttgtcactctctatcattgggacctcccacagagactccaagatgcctacggtggttgggccaaccgggcactggcagatcatttccgtgattatgcagaactttgttttaggcactttggaggccaggtgaagtattggattaccattgataacccctacgtggtggcctggcatgggtacgcgaccggaagattggcgcctggcataaggggatcgcctcgactgggctatttggtggcacataacttgcttctggcccatgcaaaggtctggcacctgtacaacacttcgtttaggccaactcagggtggccaagtgtcaattgcactgagctcccactggattaatccgaggcggatgacggaccattccatcaaggaatgccaaaagagcctcgatttcgtgctgggctggttcgcgaagcctgtgtttattgatggggactaccctgagtctatgaagaacaacctgtcctcgattcttcccgatttcactgagtccgaaaagaaattcattaaaggaacggcagatttcttcgcactctgtttcgggccaaccctttcctttcaattgcttgatccgcatatgaagtttcggcaacttgagtcacctaatctgcgccaactcctctcgtggatcgatctcgagtttaaccatcctcagatattcatagtggagaacggttggtttgtgagtggaaccacgaagcgagacgatgctaaatacatgtactacctgaagaagttcatcatggagacgctcaaggcgatcaaacttgatggtgtcgatgtcattggatacaccgcatggtcactgatggatggatttgaatggcatagaggctactccatccgccgcgggctcttctatgtcgacttcctctcccaggacaagatgctcctcccaaagtccagcgcattgttttaccagaaactcatcgaaaagaacggtttcccaccactgcctgaaaaccaaccacttgaaggaacctttccttgtgattttgcatggggagttgtggacaattacattcaagtctcccagctcaccaagccaatctcgtcgttgaccaagccttaccat

SEQ ID NO: 149802 - DNA, 1647 bp, Artificial Sequence
  derived and/or modified sequence
atgcccgcttctgcgcccccgcgtcgccccaggccgcctccgccctccctgagcctgctgctcgtcctgctgggcttggggggccgccgcctgagggccgagccgggagacggagcccaaacgtgggccaggttttctcgaccgcccgcccctgaagcggcggggctttttcagggaactttcccagatggtttcctgtgggctgtgggttctgccgcataccagacagaaggggggtggcagcagcacggcaagggcgcttctatttgggatacattcactcaccatccactcgctcccccaggagatagccggaacgccagcctgcctctgggtgcgccgagccctctgcagccagctaccggcgatgtggcctctgacagctacaacaatgtcttccgcgatacagaggcattaagagagctgggcgtgactcattataggttttcgatctcctgggcccgcgtcctgcccaacgggagcgcgggggtccccaacagagagggtctcagatattaccgccggctgctcgagagattgagagagttaggagtgcagccggtagtcacactgtaccactgggacctgcctcagaggctacaggacgcttatggaggctgggccaaccgcgcgcttgctgatcattttcgcgattatgccgaattatgtttccggcacttcggaggccaggttaaatactggataacaatcgataacccttacgtggttgcctggcacggctacgctacgggtaggcttgctccggggatcagagggagcccgcgcttgggatatctggtggcacataatctactgttagcccatgccaaggtttggcatctgtacaacacgagtttcagacctacacaggggggtcaggtgtctattgccttatcctcccattggattaatcccaggcgaatgaccgatcacagtattaaggagtgccaaaagtccctcgactttgtgctcggttggttcgcaaagcctgtctttatcgatggagactatcccgagtccatgaaaaataacctgtcatcgatcctgcccgacttcacagagtccgagaagaaattcatcaagggcaccgcggacttctttgcactctgtttcgggccaaccctgagtttccaactactggatcctcatatgaagttccggcagctggagtcaccaaacctgagacagctgctgtcatggattgacttggaattcaaccatccccagattttcattgtggaaaatggctggttcgtttcagggaccacgaagagggatgatgctaagtatatgtactacctaaagaaattcatcatggagacgctgaaggcgatcaaactggacggcgtcgacgtgatcgggtacaccgcatggagccttatggatgggtttgagtggcatcggggctattccatccggcgaggcctattctacgtggattttctctctcaggacaagatgcttttgccaaagtccagtgcattgttctaccagaaactgatcgagaagaatggattccctccattacctgaaaaccagccactggagggcacctttccatgtgacttcgcttggggcgtcgttgataactacatccaggttagccagctgacaaagcctatatcctctctaacaaaaccgtaccac

SEQ ID NO: 149803 - DNA, 3036 bp, Artificial Sequence
  derived and/or modified sequence
atgccagcctccgccccgcctagacgcccacgaccgccaccgcctagcctgagtctgctcctggtcctgctgggactggggggtagacgcttgcgtgccgagccaggcgacggagcccagacatgggctagattctccaggccaccggcaccagaggccgcggggctctttcagggcacattcccagacggcttcctgtgggctgtcggctccgctgcctatcagaccgaaggcggctggcaacagcatggtaagggggcctccatttgggacacgttcacacaccacccactcgctcctccaggtgattcgcggaatgcctccctaccacttggcgcaccaagcccgttgcagccagccacaggcgacgttgcttccgatagttacaataacgttttccgagataccgaggccctgagggagctgggggttactcactacagattctcaatcagctgggcgagggttctaccaaacggcagcgcaggcgtgcctaatagggagggattgaggtattatagacggttgcttgagcggctgagagaactgggcgtccagcctgttgttacactgtatcactgggacctgccccagaggttgcaggatgcttacggggggtgggctaacagagctttagctgaccacttccgcgattacgcagagctgtgcttccggcacttcgggggtcaggtcaagtattggataactattgacaacccatacgtcgtcgcttggcacgggtacgcaaccggacgacttgctcccggtatccgcggctctccgcgtctcggctacttggtggctcacaatctcctcctcgctcacgcaaaggtatggcacctctacaacacctcttttagacccacacagggcgggcaggtgtccattgctttgtcctcccattggatcaaccctcgcaggatgaccgaccacagtatcaaggagtgtcagaagtcattggattttgttttgggctggtttgccaagcccgtgttcatagatggtgattatccagaatctatgaagaataacttgagctccatactgcccgattttacagaatcagaaaagaaatttatcaaagggacagccgatttcttcgccctgtgtttcgggccaaccttgagttttcaactactggatccccacatgaaattcagacagctggagtcccccaatctgcgccaacttctctcttggattgacctcgaatttaatcaccctcagatttttatcgtcgagaatggatggtttgtgtctggcaccactaagcgcgatgatgccaagtacatgtactatctgaaaaagttcattatggagactctgaaagctatcaagctggatggggtagacgtgatcgggtatacagcctggtccctcatggacggcttcgagtggcataggggctactccatccggcgaggcctcttctacgtggattttttgagtcaggataagatgctcctgccaaagtcctcagcactgttctaccagaaactgatcgagaaaaatggtttcccacctctgcccgaaaaccagccactggaagggacattcccttgtgactttgcgtggggagtagtggataattacatccaggtggacacaactctgagccagtttacggatttaaacgtgtatctctgggacgtccatcacagcaaacgcctgatcaaagtggacggagttgttaccaagaaaagaaaatcctactgcgtcgattttgcggccattcagccccagattgctttgttgcaggagatgcatgttacccacttcaggtttagcctggattgggcccttatcttgcccctgggtaatcaaagccaggtgaaccacactatcctgcaatattacagatgtatggcttcagaactcgtaagggtcaatatcacccctgtagtagcactgtggcagccaatggcccccaatcagggtctccctagacttcttgcacgacagggggcatgggaaaacccttatactgcactggccttcgcagagtatgcccgactgtgtttccaagagctcggccaccacgtcaagctgtggattactatgaacgagccatacaccaggaatatgacctacagcgctggccacaaccttctgaaggcccacgcgctggcgtggcacgtgtacaatgaaaagttcaggcatgcgcagaatggcaagatcagcattgctttacaggccgactggatagagccagcttgtcctttttctcagaaagataaagaagtggcagagagagtgctcgagttcgatattgggtggcttgccgagccgattttcggttccggcgactatccatgggttatgcgcgattggctgaatcagcggaataatttcctgcttccctatttcactgaagacgaaaaaaaactaattcagggaacgttcgattttttagcgctgagccattacacaacgatactggtggacagcgaaaaagaggaccccataaagtacaatgattatctcgaggtgcaggagatgacagatatcacttggctgaactcacctagccaggttgctgtcgtcccctggggattgcgtaaagttctaaactggctgaagttcaagtacggagacctccctatgtatattatttcaaatggcattgacgatggcctacacgcggaggacgatcagttgcgcgtttactacatgcagaattatattaatgaggcgctgaaggcacatattctcgacggcattaatctctgtggttattttgcctacagcttcaacgataggaccgctccacgatttggactctataggtacgccgccgatcagtttgaacccaaagcttcaatgaaacactatcgtaagatcatcgattccaatggcttcccagggccggagaccctcgaacgcttctgccccgaggagttcactgtatgtactgaatgttcttttttccacactcggaagagtctgctagcattcattgccttcctctttttcgctagcatcatctccctatccctcatcttctactattccaagaaaggcaggaggtcctataag

SEQ ID NO: 149804 - DNA, 3036 bp, Artificial Sequence
  derived and/or modified sequence
atgccagcttctgcacctccacgaagaccacgacccccaccaccgtccctgtccctcctcctggttttgctcggactgggtgggcgacggctgagggctgaaccaggcgatggcgcgcagacatgggcaaggttttctcgtccaccagcaccagaagccgcaggcctttttcagggtacgttccctgacggctttctgtgggccgttgggtcagctgcatatcagacagagggaggctggcagcaacatgggaaaggggcctccatctgggacacattcacacaccatcccttggctcctcctggtgattcccgcaacgcatccctgccgttgggagccccttctcctttgcagcctgctacaggggacgtcgcaagtgactcttataataacgtgttccgagatacagaagccttgagggagctgggggtgacgcattaccgatttagcataagctgggctcgagtactgccaaatgggagcgcaggagttcctaaccgagaaggtctgagatactacaggcgactgctcgaaagactgagagagcttggagtccagcctgtcgtcaccctgtatcattgggatttaccccagagactgcaggacgcatacggagggtgggcgaatagagcattggctgaccatttcagagactatgcagaactctgtttccgtcacttcgggggccaggtgaagtactggatcaccattgacaatccttacgtggtggcttggcatggatacgccaccggacgcttagccccagggattcgaggtagcccccgattgggctacctagtagcccataacctgctgcttgctcatgcgaaggtgtggcatctgtataacacctcattcaggcctactcagggcggacaggtgtccatagctttgtcctcacactggataaaccccagacgaatgacggatcactccatcaaggagtgtcaaaaaagtctggattttgtcctgggatggttcgcaaagcctgtttttattgatggcgactatcctgagtctatgaaaaacaacctttcttctattctacccgacttcaccgaaagcgagaaaaagtttatcaagggcaccgcagatttcttcgcgctttgttttggtcccacactttcatttcaattacttgatccacacatgaagttccgccagttggagagccccaacttgaggcagctgctgagttggatagaccttgagttcaatcacccacagatattcattgtggagaacggatggttcgtgtccggcacaacaaaaagagacgatgccaaatatatgtattatttgaaaaagttcatcatggaaactttgaaggcgattaaactagacggggtcgatgtcattggctacactgcatggtccctcatggacggctttgagtggcatcgaggatactctatccgtcgagggctattttacgtggacttcctctcgcaggacaaaatgctgcttccgaaatcctcagccctgttctatcaaaaactcatcgaaaaaaacggcttccccccactgcctgaaaatcaacccttggagggaactttcccctgcgattttgcttggggggttgtggataactacatccaagtggacaccacactgtcacagtttacagacctgaacgtatatctctgggacgtgcaccacagcaagaggctcataaaggttgatggagtagtgaccaagaagcgtaaaagctattgcgtggatttcgcagcgatacagccgcagattgccctgctgcaggaaatgcatgtcactcacttcagattcagccttgactgggctctgatcctgcctctggggaatcagagccaggtcaatcacacaatactgcagtattaccgatgcatggcttctgaactggtcagggttaatataacacccgtggttgccctttggcagcctatggcacccaaccaggggctgccgcgactattagcgagacagggcgcctgggagaacccatacaccgcactcgcttttgccgagtatgctcgcttatgctttcaagaattgggacatcatgtgaaattatggataactatgaacgagccttacacaaggaatatgacatatagcgccgggcacaacctcttaaaggcgcatgccctcgcctggcacgtctacaatgaaaaattccgacacgcgcagaacggtaagatctcgatcgcacttcaggcagactggattgaaccagcatgccctttcagccaaaaggataaggaagtggcagagagggttttggaatttgacatcggctggcttgctgaacctatctttggttccggggactatccatgggtgatgcgggactggcttaatcagagaaataactttctccttccctatttcaccgaggacgagaagaaactcattcaaggaactttcgactttctagcactgtcgcattatacaacgatcctagtggattctgaaaaggaagacccaatcaaatacaacgattacctggaggtgcaggaaatgacagacatcacgtggctcaacagcccaagccaggtggctgtcgtaccatggggtctgagaaaggtgctcaactggctcaagtttaaatacggagacctgcctatgtacatcattagcaatgggatcgacgacggattacacgcggaagatgaccagctgcgagtgtactatatgcagaactatatcaatgaagccctcaaagcacatattcttgacggaataaatctttgtggttactttgcttattcctttaatgatcggacagccccacgatttggtctgtacaggtatgccgcagaccagtttgagccaaaggccagcatgaagcactatcgcaagatcattgatagcaatgggtttcccggaccggagacacttgaacgattttgtccggaagaattcaccgtgtgtaccgaatgctccttttttcacaccaggaaatctctcttggcttttatcgcatttctcttctttgcgtctattatcagcctgtccctgatattctattactccaagaagggcagaagatcttataag

SEQ ID NO: 149805 - DNA, 3036 bp, Artificial Sequence
  derived and/or modified sequence
atgccagcctccgcaccccctcgacgtccgcggccaccccctccatccctgagcttactgttggtgttactgggattgggtggtcggcggctccgcgcagaacctggagacggtgcgcaaacatgggctcggttcagccgcccaccggcccccgaagcggcggggttatttcagggaaccttcccagatggattcctctgggctgtcggcagcgccgcttaccagactgagggcgggtggcagcagcacggaaagggagcatccatatgggacacttttacccaccatcctttagctcctccaggtgacagccgcaacgcatcactcccccttggtgccccaagtccactacaacccgctaccggagatgtggcttcagactcttacaacaatgtttttcgggacacggaggccctacgggagctgggtgtgacacactataggttttctatatcatgggcccgagtcctgccaaacggctctgccggtgtgccaaacagagaaggactgcgatattaccgacgtttgctggagcgtctgcgcgaattaggcgtgcagcccgtggttactctttaccactgggacctgccgcaacggctgcaagacgcttatggcggctgggccaacagagctttggctgaccactttcgggattacgcggagttgtgtttccggcacttcggaggacaagtgaagtactggattaccattgataatccctatgtggttgcttggcatgggtacgccaccgggcggcttgcaccaggaatccgaggctcccctcgcctgggatatttggtcgcccacaacctgctgttggctcacgcaaaggtctggcacctgtataacacttcatttcggccaacccagggtggccaggtgtctatcgccctcagctcacactggatcaacccccgaaggatgaccgaccactctattaaagagtgccagaaaagccttgatttcgtgctgggttggttcgccaagcctgtctttatcgatggtgattacccagagtctatgaagaataacctctcgagcattctgcctgacttcaccgagtctgaaaaaaaatttattaaaggcactgctgacttttttgctctctgctttggtcccacgctgagtttccagctccttgatccgcacatgaagttccgccagctcgagtcccccaatttgcgacagttgctgtcttggatcgacctagaatttaaccatcctcagatctttatcgtggaaaacggttggttcgtttctggcacaacaaagcgggatgacgccaagtacatgtactatctgaagaaatttataatggaaaccctgaaagccatcaaactggacggtgttgacgtcatcgggtatacagcctggtccttgatggatggctttgagtggcatcggggctactcgattaggcgaggcctgttctacgtcgactttctttctcaggataagatgctgctgccaaaatcctctgccctgttctatcagaaactaatagagaagaatgggttcccgccactccctgagaaccaaccactggagggaacattcccttgtgatttcgcttggggagtagtggacaactatattcaggtggacacgacattgtctcagtttactgacttgaatgtgtatctgtgggatgtgcaccactctaagaggctgataaaggttgatggtgtggtcactaaaaaacgcaagagctattgcgtggatttcgctgctatccagcctcagatcgcacttctgcaagaaatgcacgtcacccacttcaggttctcacttgactgggcccttattctgcccctcggaaatcagagccaggtgaaccacactatcctgcagtattaccggtgtatggctagtgagctcgtgcgggtgaacatcacccccgtcgttgcattgtggcagcctatggcacctaatcagggcctccctagactgctggccaggcaaggagcctgggagaatccctacactgccctggccttcgctgagtatgcccgtttgtgctttcaggagctaggccaccatgtaaaactttggataaccatgaatgaaccatatacgcgcaatatgacttactcagcgggacacaatttgctaaaagcacacgcgttggcatggcacgtatataatgagaaatttaggcatgcacagaatgggaagatttctatcgccttgcaggcggactggatagagccggcttgtcctttttctcagaaggacaaggaagtggccgaaagggtgctagaattcgacataggatggttggctgagccaatctttggttctggtgactacccatgggtgatgcgggactggctgaatcagaggaacaactttctcctcccctattttaccgaagatgagaaaaaacttatccagggcactttcgactttttggccttgtcccactatacgaccattctggttgattccgaaaaggaggatcccatcaagtacaatgactatctggaggtccaggagatgacagacataacctggctgaattcgcccagccaggtagccgtcgtaccttgggggttacggaaagtgctcaactggcttaaatttaagtacggagatctgcctatgtacattatctctaatggcatagacgacggactgcatgccgaggacgaccagctgagagtgtattacatgcaaaactatattaacgaagccttgaaggcccatatactggacggaatcaacctgtgcgggtacttcgcatactcgtttaatgatcgaacagcaccgagattcgggttgtataggtatgccgccgaccagtttgagccgaaagcgtccatgaagcactaccggaaaattattgactctaatggatttccaggacctgagacactcgagcgattttgtcccgaggaatttacagtctgtaccgagtgtagcttctttcatacccggaagtcactgctcgcgttcatcgcgtttctcttcttcgcatccatcattagcctgagcctgatcttttactatagcaagaagggcaggcggtcctacaag

SEQ ID NO: 149806 - DNA, 3036 bp, Artificial Sequence
  derived and/or modified sequence
atgcccgcgagcgcccccccgcgacgaccccggcctcccccccccagcttgagtcttctgctcgttctgttgggacttgggggtcgccgcttgcgggcagagcccggagatggtgcccagacctgggccaggttttcccggcccccagctcctgaagccgccggactctttcaggggacatttcccgacggctttctatgggctgtgggatcagccgcttaccagacggaaggtgggtggcagcagcacggaaaaggtgcgtcgatttgggataccttcacacaccatccgctggccccacccggagacagcaggaatgctagcctgcctctcggggctccctccccactgcagccagccacgggagacgtggcatctgactcatacaataacgtatttcgcgacaccgaggccttgcgcgagttgggcgttactcactacaggttcagcatcagttgggctcgggtgctgcctaacggcagcgcaggagttccaaaccgggagggcctgaggtactaccgcaggctgcttgaacgactgcgggagctaggcgtacagccagtggtgaccctgtaccattgggacctccctcagcgactccaggacgcgtacggagggtgggccaaccgggccctggcagaccatttcagagactacgctgaactctgctttcggcactttggagggcaggtcaagtactggataaccatcgataacccctacgtggtggcctggcacgggtatgccaccgggcggctggcacccgggataagagggagtcctcggctgggatacctggtggcccacaacctgttgctagcgcatgctaaggtgtggcatctatacaataccagcttccggcccacacagggtggccaggtaagcattgcactgtcgtcacattggattaacccaagaagaatgaccgaccactccattaaagagtgtcagaagtctttggacttcgtccttgggtggtttgcaaagccggtgttcatcgacggcgactatcctgaatcaatgaaaaataatctgtcaagcatccttcctgatttcaccgaatccgagaagaagttcattaaaggaactgccgacttcttcgcactctgtttcggacccactctttcctttcagctgttagacccccacatgaaattcaggcaactcgagagtccaaatctcagacagttactgtcctggatcgatttggagtttaatcatcctcagatttttatagtagagaacggatggttcgtgtcaggtaccacaaagcgtgatgatgccaaatacatgtattacctgaaaaagttcattatggagacactgaaagctataaaactagacggagtggatgtgatagggtacaccgcgtggtccctcatggacgggttcgagtggcatagaggctactctatccggaggggccttttctacgtggattttttgagtcaggacaagatgttattgcctaaatcttctgcactgttctaccagaaactgattgagaagaacggctttccacctctgccagagaaccagccattggagggaacatttccttgtgacttcgcctggggagtcgtggataattacatacaggtcgataccaccctctctcagttcaccgacctgaatgtgtacctgtgggatgtgcatcacagcaagcgcctaataaaggtggacggggttgtgacaaagaagaggaagagttactgcgtagactttgccgcaattcagccgcaaatcgcgctccttcaggagatgcacgttacacattttcgcttttcactggattgggctctgatcctacctctggggaaccaaagccaggttaaccatactatattacaatattatagatgcatggccagcgaactggttagggtcaacataacaccagtcgtcgcactgtggcagcctatggcgcccaatcagggactgccccggttactggctaggcagggggcatgggagaacccttataccgcccttgcctttgctgagtatgcaagactctgtttccaggaactcggccatcatgtgaagctgtggataacaatgaatgagccctatactcggaacatgacctactccgcaggacacaacctgctcaaggcgcatgctctcgcttggcacgtgtacaacgagaagtttcgacacgcgcaaaacggaaaaatatccattgcacttcaagctgactggatagagcctgcctgcccattttcccagaaagacaaggaggtggcggagcgggtgctcgagtttgatatcggatggctcgcggagcccatcttcgggtccggtgactacccttgggtcatgcgcgattggctgaaccagaggaacaattttctgctgccgtattttaccgaagacgaaaagaaacttatccaaggcacctttgactttctggcattatcacattatacgaccattcttgtcgattccgagaaagaagatcctataaagtacaatgactaccttgaggttcaggaaatgacagatattacctggctgaactcgccaagccaagtggctgtggtgccatggggcttgcgtaaagttctaaattggctgaagtttaagtacggtgatctaccgatgtatataatcagcaacggaatcgacgacgggctgcacgcagaggacgaccagttacgggtttattatatgcagaactacatcaacgaggccctaaaagcacacattttggacggcattaacctgtgtggctacttcgcttattcttttaacgaccgtaccgctcctagatttgggctgtatagatacgccgctgaccagttcgagcctaaggcctcaatgaagcactaccgtaagatcatagactccaatggttttccaggaccagaaacattggagagattttgtcctgaggaattcacagtttgtaccgaatgctccttctttcatacgagaaagagcctacttgcttttattgcattcctgtttttcgccagtattatttcgctgtctcttattttctattatagcaagaaaggaaggagatcatacaag

SEQ ID NO: 149807 - DNA, 3036 bp, Artificial Sequence
  derived and/or modified sequence
atgcctgccagtgccccgccaaggaggccccgcccaccaccgccttccctgtcactcctgcttgtgctcctgggtctcggtggcaggcggcttcgcgccgagccaggggacggtgcacaaacatgggctagattctcacgtccccccgctcccgaagcggcgggtctctttcaaggcaccttccctgacgggttcctgtgggcggtgggatctgccgcttatcaaaccgagggagggtggcagcagcacggtaagggcgcaagcatctgggacaccttcacccatcatcccttggctccgccaggggactctcggaatgcatctttacctctgggagccccaagcccccttcaacctgccacgggggatgtggcatcagatagctacaataacgtcttcagggatacagaagcactgcgggagcttggggtcactcactacaggttttctatttcctgggcccgagtgctgcctaacggttccgctggcgtgcctaatcgagagggactgcggtactaccgacggttgttggagaggttgagggagctcggagtccagcctgtggttacgctttaccactgggatctaccgcagaggctgcaggacgcctatggtggatgggcaaaccgagccctggcagatcatttccgggattatgcggaattgtgttttcgccatttcggaggccaggtaaagtactggataactatcgacaatccatacgtagtggcatggcatggatatgcgacagggaggctcgcgccgggcataaggggctcaccccgcttgggttatctcgtggcgcataacctgctcctggctcacgccaaggtgtggcacctgtataacactagcttccgacccactcagggggggcaggtgtccattgctctcagtagccattggatcaatcctcggaggatgactgatcattctattaaagaatgccagaagtccctggattttgtgctggggtggttcgccaagcccgtgttcattgatggagattaccccgaatcgatgaagaacaatctgtccagcatcttaccggactttactgaatccgaaaagaaattcatcaaggggactgctgactttttcgctctgtgtttcggccccactctatcatttcagctgctcgacccccacatgaaattccggcaactagaatctccgaacctgcgtcagctcctcagctggatcgacttggagttcaatcacccccagattttcatcgtggagaacgggtggttcgtgagtggtacaacaaagcgcgatgatgccaagtatatgtactatctgaagaaattcatcatggaaactctgaaagctataaaactggacggagtggatgttatcgggtacacggcatggtcacttatggacggctttgagtggcatagaggttactctatccgacggggtttgttctacgtggatttcttgagccaggacaagatgctccttcctaaatcctcagccttgttttaccagaaactgatagagaagaacggatttcctcccctgccggaaaatcagcctctggaggggacattcccctgtgacttcgcttggggagtagtcgacaactacatacaggtggacacaaccctaagccagtttaccgatcttaacgtctatctgtgggacgttcatcattccaaacggctgatcaaggtggatggcgtggtgactaagaaaagaaaaagttactgtgtggatttcgcagccatccaacctcagatcgccctgctgcaggagatgcatgttacccattttcggttttcgttggactgggctttaattctgccccttggaaatcaaagccaggtgaaccacaccattctgcagtattacagatgcatggccagtgagttagtgcgcgtgaacatcactcctgtggtggcgctgtggcagccgatggctccaaaccagggtcttcccagactactggccagacagggagcatgggaaaatccgtacactgcactcgctttcgctgagtacgcccgtctatgttttcaggagctggggcaccatgtgaaactgtggattacaatgaatgaaccatatacccgcaatatgacgtacagcgctggtcacaacctcctgaaggcacacgctctggcctggcacgtgtacaacgagaaattcagacatgctcaaaacgggaagatctcaattgcgcttcaggccgactggatcgagccagcctgtccctttagccaaaaggacaaagaggtagccgaacgtgttttagaatttgacattggatggctagccgagccaatctttggatctggggattacccttgggttatgagggattggctcaatcaacggaataatttcctgctgccatacttcaccgaagacgaaaagaaattgattcaagggaccttcgacttccttgccctatcccactacaccaccatcttggtcgactcagaaaaggaggatcccatcaaatacaatgactacctcgaagttcaggagatgactgatattacgtggcttaattctccatcccaggttgcagtcgtcccatgggggttgaggaaagtgttgaactggttgaagtttaaatacggcgacctgccaatgtacataatctccaatggcatagacgatggtttacacgccgaggatgaccagttacgggtctactatatgcaaaattacattaatgaggcactgaaggcccatatcttagatggcattaacctgtgcggttactttgcttatagctttaacgaccggactgcacccaggtttggtctgtatcggtacgcagccgatcagttcgagcccaaagcctcaatgaagcactaccgaaaaatcatcgattcaaatggatttcccggacccgaaaccctggagcgattctgtccggaagaattcacggtgtgcaccgagtgcagctttttccacacccgtaaatctttactggcatttattgcatttctgtttttcgcatctattatatcactttccctaattttttactactctaagaaaggtcggcgatcatacaaa

SEQ ID NO: 149808 - DNA, 3036 bp, Artificial Sequence
  derived and/or modified sequence
atgccagcatcagcaccacccaggcggccaagacctccaccgccttcattgagtcttctcctcgtgctgctgggcttgggcggcagacgactccgcgcagaacctggtgatggcgcccagacatgggccaggttttcgaggccacccgctcctgaagctgccggtctgttccagggaacattccctgacggttttttgtgggccgtaggaagcgccgcttatcagacagagggcgggtggcagcagcacggtaagggagcctcaatatgggataccttcacccaccaccccctggcccccccgggtgacagccggaacgcatcactgccgctgggggctcctagccccttgcaacctgctacaggggatgttgcaagcgatagctacaacaacgtgttcagagacacagaggcccttcgtgaacttggcgtcactcattaccgtttctcaatctcgtgggcaagagtactgccaaacggaagtgctggagtccctaatagggaagggctccggtactaccgtcgactcctggaacgtttgagggaactgggggtgcaaccagtcgtcaccctgtaccattgggacctccctcagcgcctgcaggacgcctacgggggttgggccaacagggcgttggctgaccacttcagggactacgccgaactctgcttcagacacttcgggggacaggtcaaatactggattacaatagacaacccttacgttgtggcctggcacggatatgccacagggagactggccccaggcatcagggggtctccacgtctcggatacttagttgcgcataacctcttgctggctcacgcaaaagtgtggcacttgtataacaccagcttccggcccacccagggcggacaggtatccatcgctctctctagccattggattaacccccggagaatgactgatcactcaattaaggagtgtcagaaatctcttgatttcgtgctgggctggtttgctaagcctgtcttcattgatggggattaccccgagagcatgaaaaataatttgtcctcaatcctaccggatttcacagaatcagagaaaaaatttattaaaggaactgcggatttctttgccttgtgttttggcccgacactctcatttcaactgctggaccctcacatgaaattccgacaactagaatctcctaacctgagacagctcctgagttggatcgatctagagttcaatcacccacagatttttatcgtggagaacggctggtttgtgtctggtactaccaagagggatgatgccaaatacatgtattacctgaagaaattcataatggaaactcttaaggccattaagctcgacggcgttgatgtgatcggctacaccgcgtggtccctgatggatggtttcgaatggcaccgcggatactccattcggcgaggtcttttctatgtagacttcctgtctcaggacaaaatgctcctaccaaaaagctcagcattgttctatcagaagcttattgaaaaaaatgggttccccccgctgcctgagaaccagcctttggaaggaacctttccctgcgacttcgcatggggcgtagtagacaattatattcaggtcgacaccactcttagccaatttacagatctcaatgtctatctgtgggatgtccatcatagtaagcgtttgatcaaggtcgacggcgtggtcacaaaaaagcggaagagctattgtgtggatttcgcggcgattcagcctcaaatcgccctgcttcaggaaatgcatgtgacacactttagattctctcttgattgggccttgattctgcctctgggaaaccaaagtcaggtcaaccacaccatcctgcagtactaccggtgtatggctagcgagttggtaagggttaacattacacccgtcgtggctctgtggcagccaatggcacccaaccagggtttaccaagacttctagcacgtcagggcgcttgggagaacccatatactgcgttggctttcgctgagtatgcccgcctgtgcttccaggagttagggcaccacgttaagctgtggatcactatgaacgaaccttacactaggaacatgacctattctgctggccacaatctgttgaaggcccacgccttagcatggcacgtctacaatgaaaaatttcggcacgcacagaatggtaagatctccatagcgctgcaggccgactggatcgagccggcctgtcctttctctcagaaagataaggaggtggcagagcgagtcctagagttcgacattggatggctcgcggaaccaatctttggatcaggggactatccttgggtgatgagggattggctgaatcaacggaacaacttcctgttgccgtacttcactgaggatgaaaagaaactgattcagggcacgttcgacttcctcgctctcagccattacaccactattctggttgactcggagaaagaggaccccatcaaatacaacgactaccttgaagtccaagagatgacagatataacctggttaaactccccctcccaagtagctgtggttccatggggtctgcggaaggtcctcaattggctgaagtttaaatatggtgaccttcccatgtacatcatctctaacggaatcgatgacgggctgcatgcagaggatgatcaattaagggtatattatatgcagaactacattaacgaggcactcaaggcgcacatactcgacgggataaatttgtgtggctattttgcatacagcttcaatgacagaacggcaccgcgatttggtctttaccggtacgcagcggaccagttcgaaccaaaggcgtccatgaaacactataggaagatcatcgactctaacggctttccaggtcctgaaacactggaaagattctgtcctgaagagttcactgtctgcacagagtgttcattcttccatacacggaagtccctccttgcttttatcgcattcttgttcttcgccagtattatttccctctctttaattttctattacagcaagaagggccgccgcagctacaag

SEQ ID NO: 149809 - DNA, 3036 bp, Artificial Sequence
  derived and/or modified sequence
atgcctgccagcgccccgccgagaagacctcgcccaccgccgccctccctaagccttttacttgtgttgttggggctcgggggccggagactgagagctgaaccgggtgatggggcacagacttgggcacgattctcaaggccgccagcgccggaagcagccgggttgttccagggcacttttccggatggcttcttatgggctgtcggatcagccgcataccaaacagagggcggttggcagcaacatggaaaaggtgcctctatctgggacacatttacgcatcatccattggcgccgccgggggatagcagaaatgcctcccttcctttaggtgctcctagtccgttgcagccggcaacaggggacgtggcgtcagactcttataataacgtgtttagggataccgaagccttgcgagaactgggtgtcactcattatcggttcagcatatcttgggcaagagtgttgcctaacgggagcgctggagttcctaatagagaaggcctaagatactatcgtagacttctcgaaagactgcgtgaactcggagttcagcccgtcgttacactttatcactgggatttaccccagagactgcaagacgcgtacggtgggtgggcgaacagggctcttgcggatcattttagagattatgcagaactgtgttttagacacttcggggggcaggttaagtattggatcaccatcgacaatccttatgtggtagcgtggcatgggtacgcgacgggtcggctagcgcctggaattcgggggagcccgagattgggatacctggtagctcataatttacttttagcgcatgcaaaagtgtggcatctgtataacacttcatttcggcctacgcagggtggacaagtctctatcgccttatcttctcattggattaaccctcgacggatgacagatcactctattaaagaatgtcagaaaagtcttgactttgtattagggtggtttgcgaaaccagttttcatcgacggcgattacccggaatcaatgaaaaataacctgtcttcaatattgccggattttaccgaatcggaaaagaaattcataaagggcacagctgatttctttgcattatgtttcggcccgacattgagctttcagcttctcgaccctcatatgaaatttagacaacttgagtcgcctaatttaagacaattgcttagttggatagatctggaattcaaccatccgcaaatcttcatagtagaaaacggttggtttgtgtcaggtacaactaaaagagatgatgcaaaatatatgtattatctcaaaaagtttatcatggaaaccctgaaagcgatcaaactagacggcgtcgatgttattggatatacggcgtggtctttaatggatggctttgagtggcatcgtggctattcaattcgtagagggctgttttatgttgactttttgtctcaagataaaatgttgcttcctaagtcctctgccttattctaccagaaattaattgaaaagaacgggtttccaccgttaccggagaatcaacctttagaaggcacctttccgtgcgacttcgcatggggagtagtcgataattatatacaggtcgacacaacattgtcgcaatttacggatctgaacgtctacttgtgggacgtccatcattctaaacgccttattaaagtggatggggtagtaacgaaaaaaagaaaatcatattgcgtcgactttgctgccatccagccccagattgctctcctgcaagaaatgcatgtaacgcattttcgctttagcttagactgggcacttatcctgccattaggcaaccagtcacaggtgaaccatacaattttacagtattaccgctgtatggcaagcgaactcgtgcgtgtaaatataactccggtggttgccctgtggcagccgatggcgccgaaccagggattacctagacttttagctagacagggcgcgtgggagaatccctatacagctttagcctttgcggagtacgcgcgtttatgtttccaggagcttggccatcatgtaaaactgtggatcactatgaacgaaccttacactaggaatatgacgtatagcgctggacataatttgttgaaagcgcatgctttagcatggcacgtatataatgagaaatttagacacgcccaaaacggcaagatatctattgcacttcaggcggactggatcgagcctgcttgcccgttttcacagaaggataaagaagtcgccgaacgggtgctggagtttgatatcggatggctggcagagcctatatttgggtccggtgactatccatgggttatgagggattggttaaatcagagaaataattttcttttaccgtattttacggaagacgagaaaaaactcattcagggaacgttcgattttttggctttgtcacattatacaacaattttagtggatagcgaaaaagaagacccaattaaatacaacgattacttagaggtgcaggaaatgacagatataacttggttgaatagcccttcacaagtagctgtggtgccgtggggtctgagaaaagtcctgaattggctcaagttcaagtatggagaccttccgatgtacataatatctaatgggattgatgatggcctgcacgccgaggatgaccaacttcgggtttactacatgcagaattatataaacgaggccttaaaggcgcatatactggatgggatcaatctgtgtggctacttcgcatattctttcaacgatcggaccgcgcctagattcggactgtaccgctatgcggcggatcaatttgaacctaaggcaagcatgaaacattacagaaaaattatagattcaaacggttttcccggccctgagacgttggaaaggttttgcccggaggaatttacagtttgcactgagtgctcattctttcatacgcgtaagtccttactcgcatttattgcttttttgtttttcgcctcaatcatatccctatcgttaatcttttactactccaagaaaggtaggcgtagctataag

SEQ ID NO: 149810 - DNA, 3036 bp, Artificial Sequence
  derived and/or modified sequence
atgcctgcatctgctccacccagaagaccacgtccaccacctccgtctctcagtctgcttcttgtcttgcttggtctagggggtcggagactccgtgcggagccgggagatggcgctcaaacctgggcacgattctcgcgtcccccagcaccagaagccgcgggattgttccaaggaacctttcctgatgggtttttgtgggccgttggttccgcagcttaccaaacagagggaggttggcagcaacatggaaaaggagcttccatctgggacactttcactcatcacccgcttgctcctcccggagattcccgtaatgcaagtcttccactcggcgcaccgtcaccattacagccagctaccggggatgttgcctcagatagctataacaatgtttttagagacacggaggctcttcgtgaactgggtgttacgcattatagattcagtatatcatgggctagagtgctccctaacggatccgctggcgtacctaacagggagggtctcagatactaccgtagattgctcgaaaggctcagagaactgggggttcagcctgttgttactctttatcattgggatctgcctcagcgtttgcaagacgcttacggtggatgggctaacagggcgctcgctgatcactttagggattatgccgaattgtgctttcgtcactttggtgggcaagtcaaatactggattacgatagataacccatatgtagtcgcctggcatggctatgctaccggtcggttggcaccaggaattcgagggtccccaagactcggatacttagttgcccacaacttattactagctcacgcaaaggtttggcatctttacaatacctctttcagacctacccagggtggacaggtctcaattgcactctcaagccattggataaatccaaggcgtatgaccgaccacagcattaaggaatgccagaagagccttgattttgttctcgggtggttcgcaaaacctgtgttcatagacggcgattatcctgagtccatgaaaaataacctgtcctcgatccttccagatttcacggagagtgagaaaaagtttatcaagggtacggctgattttttcgctctatgttttggtcctaccctttcattccaattgctggatccccacatgaaatttcgccaactcgagagtcctaatctgcggcagctactcagttggattgatctcgaattcaatcaccctcagatattcattgtggagaacggatggtttgtctccggcacaaccaagagagacgatgctaagtatatgtactatctaaagaaatttattatggagactctgaaggctataaaacttgacggggtcgacgtgattggctacactgcttggtctctgatggatggctttgaatggcatagaggttactcaatcaggcgcggactattctacgttgactttctctctcaggataagatgttgctgccaaagtcctcagcactgttttatcagaaattgattgagaaaaatggtttcccaccattgccggagaatcaaccgctcgaaggaactttcccatgcgattttgcttggggagtagttgataactacattcaggttgatactaccttgtcacagtttacggatttgaacgtctatttatgggacgtgcatcactccaaacgtttgattaaggttgacggagttgttacgaagaagcgtaagtcttattgcgtcgactttgctgctatccagcctcagattgctctgttgcaggagatgcatgttacacatttcaggttctcacttgattgggcactaatacttccccttgggaaccagtcacaagttaaccacactatacttcaatactataggtgtatggcctcagaattggtcagagttaatataaccccagtggttgctttgtggcagcctatggcaccaaaccaggggttaccaagacttctggctagacaaggagcttgggaaaatccttacacagctttggctttcgctgagtacgctagattgtgttttcaggaattgggtcatcatgttaagctatggatcacaatgaacgagccttatacccgcaatatgacttatagcgcaggacataatttattgaaagcgcatgccttggcttggcacgtttataacgagaagtttaggcacgcccagaacgggaagatttctatagctcttcaggcagactggattgaacctgcatgtccatttagccaaaaggataaggaggttgccgaacgtgtcctagaatttgatattggatggctggctgaacctatcttcggttcaggtgactatccttgggttatgagagactggttgaatcaacgtaataacttcctgctgccttactttacagaggacgaaaaaaaactgattcaggggaccttcgacttccttgcgcttagtcactacactaccatcttggttgattcggagaaagaagacccaattaaatacaacgattaccttgaagttcaggagatgactgatataacttggctcaattccccatctcaagtcgcagtcgtcccctgggggttgaggaaggtgctcaactggctgaaatttaagtacggagatcttccaatgtacataatttcaaacggtattgatgatggacttcatgcggaagatgatcagctgagagtgtattacatgcagaactacattaacgaagcacttaaggcacatattctcgacggaataaatttgtgtggttattttgcttattcttttaacgataggacagccccaagattcggactatacaggtacgctgcagaccagtttgaaccaaaggcatctatgaagcattataggaaaattatagattcaaacggctttcctggtcctgaaacattggagagattctgtccagaagagtttacagtctgcactgaatgctcgttcttccacactaggaaatcattgttggctttcattgcttttctctttttcgcttccattatttctctaagcttgattttctactattcaaaaaagggacgccgttcttataaa

SEQ ID NO: 149811 - DNA, 3036 bp, Artificial Sequence
  derived and/or modified sequence
atgcctgcttctgcaccaccccgccgccctcgcccaccaccaccttcgctgtctctactgctggttctactaggcctggggggtcgacggctacgagctgagcctggtgatggggctcagacttgggcgcgcttctcccgaccacctgcccctgaagccgctggtttgttccagggtacgttcccagatggttttctttgggcagtgggtagcgccgcatatcagacagagggagggtggcagcagcatggaaagggtgcaagtatctgggacacattcacccaccaccccctggctccccccggagacagccggaacgctagcctgccgttgggagcccctagcccactgcagcctgctactggtgatgttgcaagcgacagctacaacaacgtttttcgggacaccgaagcactgcgagaactaggggtgacccactaccggttttcaatctcctgggcccgagttctgcctaatgggtccgccggagtccctaatagagaaggcctccgttattacaggcgtcttctcgagcggctccgcgagctgggcgtgcagccagtcgttacactataccactgggatcttccccagcggctgcaggatgcttacggaggttgggcaaaccgagcattggccgaccactttcgtgattacgctgagctgtgtttcaggcatttcgggggtcaagtgaagtactggattacgatcgacaacccatatgttgtggcttggcacggttatgcaactgggaggctggccccaggcattcggggaagccccagactcggctacctggtggctcataatctcctgctggcacatgcaaaggtgtggcatctttacaacactagcttcagaccaacacagggcggacaagtgtcaattgccttgagttcacattggatcaacccccgccgcatgaccgaccacagtatcaaggagtgccagaagtccctggactttgttctcggttggttcgcgaaacctgtgttcatcgacggtgactatcctgagtccatgaagaacaacctaagcagcattcttcctgatttcaccgagtctgaaaagaagttcatcaagggcaccgccgacttcttcgcactgtgttttggccctaccttgtccttccagctcctggacccacacatgaaattccgacagctcgagtcaccaaacctacggcagctgttgtcttggatcgacctggagttcaaccatccccagatcttcattgtggagaacgggtggttcgtgtccggtacaacgaagagggacgatgcaaagtatatgtattacctgaaaaagttcattatggaaaccctgaaggccataaaattagatggtgtggacgtgattggctacaccgcatggagcttgatggacggatttgagtggcaccgcggctatagcattagaagaggacttttctacgtcgacttcctgagccaagacaaaatgctacttccgaaatcaagtgcgttattctaccaaaaactgatagagaaaaacggattcccgccccttcctgaaaatcagcccctcgaaggaaccttcccctgtgactttgcgtggggggttgtggataactatatccaagtggatactaccttgagccagttcacagatcttaacgtctacctctgggatgtgcaccacagtaaacggttaataaaagttgatggagtggtgacaaagaaacggaagtcttattgcgtggattttgccgcaatccagcctcagattgcactccttcaggagatgcacgtgacccacttccggtttagcctggattgggccctgatccttccattgggcaaccaatctcaagtgaatcacacgatcttgcagtattatagatgtatggccagcgagttagtgagggtgaacatcactccggtcgtggcgctgtggcagcccatggcccctaaccagggtctcccccggttgctggcccgtcagggggcatgggagaatccctatactgcactcgcctttgcggaatacgcgcgtctctgtttccaggagttagggcatcacgtgaagctgtggattaccatgaatgagccctataccagaaacatgacctatagtgcaggccataatctcttgaaggcgcacgccctcgcttggcacgtatataatgaaaaattcagacatgctcagaacggtaagatttcaattgcactgcaggcggactggatcgagcctgcctgtccattttcacagaaagacaaggaagtcgccgagagagtcctagagtttgatattggctggttagccgaaccaattttcggaagtggggattatccctgggttatgcgagactggctgaaccaaaggaacaacttcctattgccctacttcactgaagatgagaaaaaattaatccagggcacatttgattttctcgctctgtcccactacacaacgatcttggtggacagcgagaaggaagatcctataaaatacaacgactatctggaagtgcaggagatgaccgacattacatggctgaactctcctagccaggttgccgtcgtgccttggggcctcaggaaagtgctcaattggcttaaattcaagtacggtgatctgcccatgtatatcatcagcaatggcatagacgatgggctacatgctgaggacgaccagctcagagtgtactacatgcagaactatataaacgaagctctcaaagcccacattttggatggcattaacctgtgtggatatttcgcctattctttcaacgatcgaacagcgccccgcttcggactctatcggtacgctgcggatcagtttgagccaaaggcaagtatgaaacattatcggaagatcatcgattcgaatggcttcccaggcccagagactttggagaggttctgcccggaagagttcactgtgtgcacagagtgcagtttttttcatactcgcaagtcgctgttggccttcatagcatttctcttttttgcctcaataatttcactgagtttaattttttactactccaagaagggccggagaagctataaa

SEQ ID NO: 149812 - DNA, 3036 bp, Artificial Sequence
  derived and/or modified sequence
atgcccgccagtgcccccccgcgacgaccccggccaccaccacccagcctgtctcttttattggtgttgctcgggctgggcgggcggcggctgcgggctgagcctggtgatggcgcccagacctgggccaggttttcccgtcctcctgcacccgaggccgccggcctgtttcaaggcacgttccccgacggatttctgtgggccgtgggcagcgcggcctatcagaccgaggggggctggcagcagcacggcaagggggcatcaatttgggatacattcacacatcatccccttgccccccccggagattcccgcaacgccagtctgcccctcggggcaccctcccccctccagcctgccacaggagacgtggccagtgattcctataacaacgttttccgcgacactgaagctttgagggagcttggcgtaactcattacagatttagtatcagctgggcccgcgtgctcccaaatggatccgccggcgtgccgaaccgtgagggcctgcgctactaccgcagattgctggagcgcctgcgggaattaggagtccagccggttgtcactctctaccactgggatctcccccaacggcttcaggacgcctacggaggatgggccaatagagcactggccgaccacttccgcgactacgccgaactttgttttaggcatttcggggggcaggtgaagtactggatcacgattgataacccctacgtggtggcatggcatggctatgccaccggacgacttgctcccggtatccgaggctcccccaggctgggttacctcgtggcccataacctactgttggcccacgccaaagtgtggcatctgtacaacacatcttttcgccccactcaaggtgggcaggtgagcatagccctgtcctcacactggatcaaccctaggaggatgacagatcactccatcaaggagtgtcaaaaatccctcgatttcgtgctaggatggttcgccaagcccgtgttcatcgacggcgactaccccgagtccatgaagaataatctgagtagtattctccccgacttcaccgaatctgagaagaaattcattaagggtaccgccgattttttcgcactatgcttcggccctacactgtcctttcagctgctcgatccccacatgaaatttaggcagctagaatcgccaaacctgcgccaacttctctcgtggatagacttggaattcaaccaccctcagatattcatagttgagaatgggtggttcgtgagcgggacaaccaaacgggatgatgctaaatacatgtattacctgaagaagttcataatggaaacactgaaggccattaagctggacggtgtcgacgtgatcggatacacagcatggtccctgatggacggcttcgagtggcacagaggctacagcatccgcagggggctcttttacgtcgacttcctgtctcaggataaaatgctgctccccaagtccagcgccctgttttaccagaagctgatcgagaagaacggcttcccacctcttcctgaaaaccaacccctggagggtaccttcccatgtgactttgcctggggagtagtggacaactatattcaagtcgatactacactgagccaatttactgacctgaatgtctatctttgggacgtgcaccattcaaagaggctgatcaaggtggatggcgtagtgacaaaaaagcgcaagagttattgcgtcgactttgccgcgatccagccccagatcgccctgctgcaggaaatgcatgttacacattttcggttttctctggactgggccctaattttaccgctgggcaatcagagtcaggttaaccataccattctgcagtattaccgctgtatggcttccgaattagtgcgggtcaacattacaccagtggtggcactgtggcaacccatggcccctaaccaaggccttccccgactgctagctcgacagggagcgtgggagaatccgtacactgccttggcctttgccgaatacgctaggctgtgtttccaagaattaggacatcatgtgaagctgtggatcaccatgaatgagccttatactcgtaacatgacatactccgccgggcacaatctgctgaaggcgcacgccctggcatggcatgtgtacaatgagaaatttcgtcacgcgcagaatggtaagatcagtattgcattgcaggcggattggatagagccggcctgtccgttctcacagaaggacaaagaagttgcagagagagtacttgagtttgatatcggttggttggcagaaccaatcttcggcagcggagactacccttgggtgatgcgggattggctcaatcagagaaacaattttctgctaccctatttcaccgaggatgagaagaagctgatccagggcacatttgactttttggctctctcccattatacgaccattctggtcgactccgaaaaggaagatcccatcaagtacaatgattatcttgaagtccaggaaatgacggatatcacttggctaaacagccccagccaggtcgccgtcgtcccatggggtctgcgtaaagtattgaattggctgaaatttaagtatggcgatctgccaatgtatattatttctaacgggatcgatgatggactccacgcagaggacgatcaattacgcgtttattatatgcagaactacattaacgaggctctgaaggcccatattttggatggcatcaatctttgcgggtactttgcttattctttcaatgacaggacagcacccaggttcggcctctatcgttatgccgccgatcagtttgagccaaaggcctccatgaagcactatcggaagatcattgattctaatgggtttccaggcccagagacgctcgaacggttctgcccagaggaattcaccgtgtgtacagagtgcagcttcttccacacgcgcaagagtcttttggctttcatcgctttcctcttcttcgcgtctataatttccctgtctttaatcttttactactcaaagaaaggccgccggagctacaaa

SEQ ID NO: 149813 - DNA, 3036 bp, Artificial Sequence
  derived and/or modified sequence
atgccagcttcggccccgcctcgccggcctcggcctccgcccccatcactgtccctccttttggtcctcctcgggctcgggggcagacggctgcgggctgagccaggggacggagcccaaacgtgggcccgattcagccgcccaccagcacctgaggctgcaggcttattccagggaacattccccgatggctttctgtgggccgtgggatcggccgcttaccaaaccgagggtggttggcagcagcacggcaagggtgcttcgatttgggatacgtttacacaccacccactggcccctcccggagactctcgcaatgccagccttcccctgggcgcaccctcaccactacagcctgctaccggggacgtcgcttctgactcctataacaacgtgttccgagacaccgaggccctcagagaactgggagtgacccattaccgattctctattagttgggcgagggtgcttccgaatggaagcgcgggggtgcctaatcgggagggccttcggtattataggcgcctgttagagcggctaagggagctgggagtccagcctgtggtgacgttatatcactgggatctgcctcaaaggttgcaggacgcctacggagggtgggcaaatcgagctcttgccgaccattttagggactatgccgagctctgctttcgacacttcggcggccaagtgaaatactggataacaattgacaacccttatgtggtcgcttggcacggatatgcgaccgggcggctggccccaggcattcgaggcagccctagactgggatatttggtggcgcataacctgttgcttgcccacgcaaaagtgtggcatctctacaataccagctttcggccaacacagggcggacaagtctctattgctctgtctagccattggattaacccacgcaggatgacagatcattcgatcaaagagtgccagaaatcactggacttcgtactgggctggttcgctaagccagtattcattgatggcgactaccccgaaagtatgaagaataatctgagttccatccttcccgatttcaccgagtctgagaagaagttcattaagggcactgccgacttctttgcattgtgctttgggccaactctcagcttccagctcctggatccccatatgaaattcaggcagctagaatcgccaaaccttaggcaactgctgtcctggatagacctggagttcaaccatccacaaatttttattgtggagaacggctggttcgtctcaggcaccacaaagcgagacgacgccaagtacatgtattacctaaagaaatttataatggaaacactgaaagcaatcaagctcgatggagtggatgtcatcggttatacagcttggtcgctcatggacgggttcgaatggcataggggctatagcatcagacgaggactgttttatgtggactttctttcccaagacaagatgttgctgcctaagagtagcgcattgttttatcaaaaactgattgaaaaaaacggttttccaccgctcccagagaatcagcctctagagggtactttcccatgtgactttgcctggggagtggttgataactatatccaggtagacacgacactgtcccagttcaccgacctcaacgtgtatctttgggatgttcaccactcaaaacgtctaatcaaggtggacggagtggttaccaagaagcggaagtcctactgtgtcgacttcgccgccatccagccccagatagctctgttgcaggagatgcacgtgacacatttccgtttcagtctggactgggccctgattcttcctctgggaaaccaaagccaggtaaatcatacaatacttcaatattaccggtgcatggcaagtgaactcgttcgggtgaacatcactccggttgtggctctctggcagcccatggcaccaaaccaggggctcccgagattgctcgcacgtcagggagcctgggaaaatccttacactgcattggctttcgccgaatacgcacgcctctgtttccaagaactaggtcaccatgtgaagctgtggatcactatgaacgagccatacacacgcaacatgacctactccgcgggccacaacttgctgaaggcacacgctctggcatggcacgtttacaatgaaaaatttcgacacgcacaaaatgggaagattagtatcgctttacaggccgactggatcgagcccgcttgcccgttctcacagaaagataaagaagtcgctgagcgagtgctggaatttgacattgggtggctggctgagcctatatttggtagcggtgattatccctgggtgatgagagactggctcaaccaacggaacaatttcctactaccttattttacagaagatgaaaagaagctgatacaaggcaccttcgactttctagctctctctcattacacaaccatcctggtggacagtgaaaaggaagaccccatcaaatataacgactatttagaagtgcaggagatgactgatatcacctggttgaattctccgtcacaggtggcggtggttccttggggcctccggaaagtcctgaactggcttaagttcaagtatggtgacctgcccatgtacataatctcaaacggcatcgatgacggactgcatgctgaagacgatcagttgagagtgtactacatgcagaactacataaatgaagccctgaaagcacacatattagacggaatcaatctttgtggatacttcgcatacagctttaacgatcggaccgcacctaggttcgggctgtataggtatgccgcagaccagtttgagcccaaagcttccatgaagcattaccgcaagattattgactccaatggattcccaggtcctgaaacactggaacggttctgtcctgaagagtttaccgtatgcactgagtgcagctttttccacactagaaagtcattgttggcgttcatcgcgttcttgttcttcgccagcattatttcactgtccctcatattttactattccaaaaaaggcaggcgcagctacaag

SEQ ID NO: 149814 - DNA, 3036 bp, Artificial Sequence
  derived and/or modified sequence
atgccggcctccgcaccacccagacgccccagacccccccccccatctctttcactgcttctggtcctgctaggtcttggtgggagacgactccgcgcagaacctggtgatggagctcagacttgggcacgcttttctaggcccccagctcccgaagcggcaggactgtttcaagggacatttccagatggcttcctgtgggccgtcggatcagcggcataccaaacggagggaggatggcaacagcacggaaagggcgcttctatttgggataccttcacccatcaccccctggctcctccaggagacagcagaaatgcttccctgcccctgggggccccatcccccctccagcctgcaacaggagacgtcgcttccgactcttacaataatgttttcagagatactgaagcactgcgagaactgggagtgacccactaccgtttctctattagttgggcacgagtgcttcccaacggctcagctggcgtgcccaatcgggaaggtctgcggtactatcgtcggctcctggaacgccttagggaactgggggtacagccagtggtcaccctgtaccactgggacctgcctcagcggctccaggacgcctacggtggctgggcaaaccgcgctttggccgaccactttcgcgactatgccgagctgtgtttcaggcactttggcggacaggttaaatattggatcaccattgataacccatacgtggtggcctggcacgggtacgctacaggacggttagcccccggaatccggggctcgcctcgcctgggatacctcgtcgcacacaacctgcttctggctcacgctaaagtttggcacctttacaatacttcttttaggccgactcagggaggtcaagtgtcaatcgccctttcaagccattggatcaacccacgaaggatgaccgatcactccatcaaagaatgccaaaagagcttggatttcgttctgggttggttcgccaaaccggtctttatcgatggagactaccccgaatccatgaaaaataacctcagcagcatattgccggactttacagaaagcgagaagaagtttataaagggtaccgccgacttttttgccctgtgtttcggcccgacactgtcattccagcttttggacccccacatgaagtttcgacagctggagagtccaaatctgaggcagcttctgtcgtggatcgatcttgagttcaaccatccccaaatcttcatagtggaaaacggttggtttgtctctggcacgaccaagcgcgacgatgccaaatacatgtattatctgaaaaaatttattatggaaaccctaaaggctatcaagctggacggagtggacgtcatcggatacacagcctggtcactcatggatgggttcgaatggcatcgcggctactcgatccgccgaggcttgttttatgtggatttccttagccaggataaaatgctcttgcctaaaagcagcgctctgttttatcagaaactgatcgagaagaacggattccctccgctccctgaaaaccaaccactcgagggaacctttccctgtgacttcgcctggggagtagttgacaactacatccaggttgacaccaccttgagccagttcacagatctgaacgtgtacttatgggacgtccaccatagcaagaggctcatcaaagttgacggggtagttacaaaaaaacgcaagtcttactgcgtcgacttcgctgcaattcagccccaaatcgctttgcttcaagagatgcacgttacacacttccgcttcagtctggattgggcacttatcctgcccctggggaaccagtctcaggtgaaccacactattcttcagtactacaggtgcatggcaagcgagctggttagggtcaacatcacaccggtggtggccttgtggcagccaatggccccaaaccaaggcctgcctaggctgcttgctagacaaggagcttgggaaaacccctacacagcactggcctttgccgagtacgcacgcctgtgttttcaagaattgggccaccatgtgaagctgtggatcaccatgaacgagccctataccagaaacatgacatatagtgccggacataacctcctgaaagcacatgcgctcgcctggcacgtatataacgagaagttcaggcatgctcagaatggaaagataagcattgctctgcaggccgactggattgagcctgcttgtccttttagccaaaaggacaaggaggtcgctgagcgggtccttgaattcgacatcgggtggttggcagagcccatattcgggagtggcgattacccttgggtaatgcgcgactggctgaaccaaaggaacaacttcctcctcccatacttcactgaggatgagaaaaagctgatacaaggcacgttcgactttctcgcgttaagccactacaccacaattctggtggattcagagaaggaggatcctattaagtataatgattacctggaggttcaggaaatgactgatatcacatggctcaactcgccttctcaagtggccgttgttccatgggggcttaggaaggtgttgaactggttgaagttcaaatacggagacttgcctatgtacatcataagcaatggaattgacgacggactgcacgcggaagatgatcaactgagagtgtactacatgcagaactacatcaacgaggcccttaaggctcatatcctggatggaataaacctgtgtggatacttcgcctattcattcaatgatcgcactgctccaagattcggactttatagatacgctgccgaccagttcgagccaaaggcctccatgaagcattatagaaaaatcatcgattccaacggctttcccggcccggagacactcgaaaggttctgtccggaagagttcacagtttgcaccgagtgtagctttttccataccagaaagtcactgttggccttcattgcatttctttttttcgcaagcattataagcctctccctgatcttttactatagtaaaaaaggacgccggtcctacaaa

SEQ ID NO: 149815 - DNA, 3036 bp, Artificial Sequence
  derived and/or modified sequence
atgcccgcgtcggctccccctcgcagacccaggccccctcctcctagtctgtccctcctactagtgctgctgggccttggagggcggcgtctaagagcggagccaggcgatggtgctcagacatgggctcgattctctagacctcctgcccctgaggccgccgggctgtttcagggcaccttcccggatgggttcctctgggctgttggctccgcagcatatcaaaccgaaggaggatggcagcagcacggcaaaggggcttctatctgggataccttcacacaccatcctctggctccgcctggtgactcccgtaacgcgtccttgccacttggagccccctctccgcttcagccagccaccggtgatgtcgcatcggacagctacaacaacgtgtttcgagacactgaggcattgcgggagcttggggtcacacattatcggttcagcatctcctgggcccgggttcttcccaatgggtcggccggcgtgcccaaccgtgagggtctgcggtactaccggcggctgttggagagactgcgggaactgggtgtgcagcccgtggtaaccctctatcattgggatctgccccagcgcctacaagatgcatatggaggctgggctaacagggcactggccgaccactttagagactacgccgagctgtgctttcgccacttcgggggacaggttaaatattggattaccattgacaacccttatgtggtcgcctggcatggatacgccaccggcaggctagctcccggcataagagggtctccaaggctcggctacttagttgctcacaacctcctgttagctcacgctaaagtctggcatctgtacaacacctccttccgacccacccagggcgggcaggttagcatagccctgagctcacattggataaaccctagacgtatgaccgatcactccatcaaagaatgtcagaagtctctggattttgtcctaggatggtttgccaagcccgtctttattgacggggattaccccgagagcatgaagaataatcttagctccattttacctgacttcaccgagtccgagaagaaattcattaaagggactgcggatttttttgcgctgtgttttggacctacattgtccttccaactcctcgaccctcatatgaagtttcggcagcttgagtctccgaatctgagacaattgctgtcgtggatcgatctggaattcaaccatccccagatcttcatcgttgagaacggctggtttgtcagcggcacgaccaagcgtgatgacgccaagtatatgtactacctcaaaaaattcatcatggagactctcaaagcaattaagcttgatggggtggacgttatcggttatacagcatggtccctcatggatgggtttgaatggcacagggggtacagcatcagacggggcctcttttacgtcgacttcctcagccaagacaagatgttgttgcccaaatcctctgccttgttttaccaaaagctgattgagaagaacggattccctcccctgccagagaaccagccgttggaaggcacattcccctgtgacttcgcctggggagtggtggacaattatattcaggtggatactacactatctcagttcacagatctaaacgtctatttgtgggacgttcaccactccaaaagactgatcaaagtcgacggggtggtgaccaaaaaaaggaagtcgtactgcgtggatttcgctgccatccagcctcagattgccctcctccaggaaatgcacgtgacccactttcgatttagcctggattgggctctaatccttcccctgggcaaccagtcgcaggtcaatcacacgattctgcaatactatagatgtatggcatcagagctggttagagtaaacatcacccccgtcgtcgcattgtggcagccgatggcccctaatcagggcctcccccgcctgctggcgaggcaaggggcctgggagaatccctatactgccctcgcgttcgccgagtacgcgcggctttgcttccaggaactcggtcatcatgtgaagctgtggatcacgatgaacgagccatatacgcgcaacatgacatactccgcagggcataatctgctgaaagcacacgccctggcctggcatgtttataacgaaaagttccgccatgcacagaatggaaaaattagcatcgcattgcaagctgattggatcgaacccgcctgtcccttctctcagaaagataaggaggtggcagaaagggttttggagttcgacattggctggcttgcagaaccaatcttcggtagcggcgactacccatgggtgatgagagactggcttaaccagcggaacaactttctactgccctatttcacggaagacgagaagaaactcatccaaggtacgttcgattttctggccctaagtcattatactacaattcttgtagactctgagaaagaagatcccattaagtacaacgattatcttgaggttcaggagatgacagacattacctggctcaactccccaagccaggtggccgttgtgccatggggactgcggaaagtattgaactggctaaagttcaaatacggagatctaccgatgtatatcatctctaatgggatagacgacggcctccacgccgaggacgaccagctgcgggtgtactacatgcagaattatattaatgaagctctaaaagcccacattttggacggcatcaatctatgtggctatttcgcctattctttcaatgacagaaccgccccaaggttcgggctgtatcgttacgctgcagatcagttcgaacctaaagcttccatgaaacattacaggaaaatcatcgactcgaacggatttcccggaccagaaacgttggaacgcttctgccccgaagaattcactgtttgcaccgaatgctctttttttcatactaggaaatccctgcttgcctttatagctttccttttcttcgccagcatcatcagtctgtccctgatcttttattactcgaaaaaagggaggagaagttacaag

SEQ ID NO: 149816 - DNA, 3036 bp, Artificial Sequence
  derived and/or modified sequence
atgcccgcttcggctcctccccggcgtccccgtcccccacccccgtcactctctctgttactagttctgctcggtcttggaggtcgacgacttcgagcagagcctggcgacggtgctcaaacgtgggcccgcttttccaggcccccagccccagaggccgcgggactcttccaaggcacgttcccagatggatttctttgggctgttgggtcagccgcatatcagacagagggcggatggcagcagcacggcaaaggcgcctcgatatgggacactttcacacaccaccctttagcgccgcctggtgattcgcgcaacgcaagcttaccactgggggccccatctccactacagcccgccaccggggacgtcgcctcagattcgtacaataatgttttccgcgatacggaggccttgcgtgagctaggcgtaacccattaccgattctcgatttcatgggccagagtgcttcccaacgggtcagccggtgtacctaacagagaaggcctgagatactacaggcgtctactggagcggttgagagaactgggagtccagcccgtcgtgacattgtatcattgggatcttccacagaggctacaggatgcgtacggaggatgggctaatagagcacttgctgaccattttcgtgattacgcggagctttgttttcggcacttcggtggtcaggtcaaatactggatcacaattgataatccttatgtagtggcttggcacggctacgccaccggcaggttggcaccaggtattagagggagtccccgccttggctacttggtggcacacaacctcctactggcgcacgcaaaggtatggcacctgtataacacttcatttaggcccacacaaggtggccaggtgagcattgcgttgagcagccactggatcaacccccggcggatgaccgaccactccatcaaggagtgccagaaatcgcttgattttgtgcttggttggtttgctaagcccgtgtttatcgacggtgattatccggagtccatgaaaaacaacttgtcctcaatacttccagatttcactgaaagcgagaagaaatttatcaagggaacagcagattttttcgctttgtgtttcggccctaccctgagtttccagttgttggatcctcatatgaagttccgccagcttgagtcaccgaacctccggcagcttttgtcatggattgacttggagtttaaccatccgcagatcttcatcgttgaaaacggatggtttgtgtccggtaccacgaagcgcgatgacgctaagtatatgtactaccttaagaagtttataatggaaactcttaaggcgatcaagctcgacggcgtggatgtcattggatatactgcgtggtcactcatggatgggttcgaatggcaccggggctatagcataagacgtggtctattctacgtggatttcctgtctcaagacaagatgctgctgcccaaaagctcggccctgttttatcagaagcttattgaaaagaacggcttccctccattgcctgaaaaccaacctctcgaagggacatttccttgtgatttcgcatggggcgttgtagataattatatacaggtagatacgacactgtctcagttcacagaccttaatgtatacttgtgggatgtgcatcactctaaaagattgatcaaagttgatggggtcgtcactaagaagcgcaagtcatattgcgttgattttgcggccattcagccgcaaatcgccttgcttcaggagatgcatgttactcacttccgattctcattagattgggcgcttattttgcctttgggtaaccagtctcaggtgaaccacactatcttgcagtattatcgatgtatggcttccgaactcgtcagagttaacatcacacctgtagtcgctttgtggcagcctatggctcctaatcaggggctgcctagacttcttgcccggcaaggcgcgtgggaaaacccatacacagcgctagccttcgccgaatacgcgcgtttgtgtttccaggaacttggtcatcacgtgaaactatggatcaccatgaacgaaccatatacacgaaacatgacgtactcggcaggacataacctgctgaaggcgcatgctctcgcttggcatgtttataatgaaaaattcaggcacgctcaaaacggtaagatatcaatagccttgcaggccgattggattgaaccggcgtgcccgttcagccagaaggacaaagaggtggcggagcgtgtcttagagttcgatattggctggcttgccgagcctatcttcggaagtggagattacccatgggtgatgcgtgactggctcaaccagaggaacaactttttactcccttacttcacggaggacgagaagaagcttatccaaggtacttttgactttctcgctctgtcacattacacgacaatccttgtggactctgagaaggaagatccgatcaagtacaacgattatctggaggttcaagaaatgacagatattacctggcttaacagtccgagccaggtggcagtggtgccctggggtctcaggaaggtactaaactggttaaagttcaagtacggcgacctccccatgtatatcatttctaacggcatagatgacggtctccatgcagaggatgatcaactccgtgtgtattacatgcaaaattatattaatgaggcacttaaggcgcacatcctcgacggcattaatctgtgtggatattttgcatacagttttaacgaccgaaccgcgcctaggtttggcctctaccgctacgccgctgatcaatttgagcccaaggcatctatgaaacattaccgaaaaatcatcgactcaaacggtttcccaggccctgaaacgctcgagaggttttgtccggaggagtttacagtgtgtactgaatgctcatttttccatacgcggaaatctcttttagcatttatagcgtttctattctttgcttctataatctccctcagtcttattttctactattcaaagaaaggtcgtagatcttataag

SEQ ID NO: 149817 - DNA, 3036 bp, Artificial Sequence
  derived and/or modified sequence
atgccggcttctgcacctccgcgacgcccacgaccacctccgccgtcgctttctcttttgctagtattactagggttgggaggtcgcagattgagagctgaacccggggatggagcccaaacttgggcgcgttttagcaggccaccggctccggaggcagccgggttgtttcaaggaacttttccggatggatttttgtgggccgtcggttctgctgcataccaaacagagggtggctggcaacaacatggcaaaggcgcctcaatttgggacacgtttacccatcatccacttgctccgccaggagattcaagaaatgcttctcttccattgggagccccatctccactgcagccagcgactggagatgtcgcttctgattcttacaacaatgtgttccgagatactgaagcgttgagggagcttggagtaacacactatagatttagcatttcctgggcaagagttttgccaaatggatcagctggtgtgccaaacagagaaggactgcgttactatcggagactactggaacgattgcgtgaacttggagtccaacctgttgtaacattgtatcattgggacttgccacaacgattacaagatgcttacggcggatgggccaaccgggctctggcagatcactttcgggattatgccgagctgtgtttccgtcactttggtggacaagttaagtactggatcaccatcgacaatccatatgtcgttgcatggcatggatatgcaactggaaggctagctccgggtattcgaggttcgccccgtctggggtatttagttgctcacaatctgttgttggctcacgctaaagtttggcacctttacaatacttctttccgtccaactcagggaggacaagtttctatcgcattatcttctcactggattaatccacgacgaatgacagaccactcgatcaaggaatgccagaagtctcttgactttgtgttgggatggttcgctaaaccagtgttcatcgatggggactatccggaaagcatgaaaaacaatctctcatcgatccttcctgatttcacggagtctgaaaaaaagtttatcaaagggactgcggatttcttcgctctatgttttgggcctacactctcttttcaacttctagatccccatatgaagtttagacaacttgaatcacctaatttgagacaattactatcatggattgatctcgaatttaatcatccgcaaatatttatagtcgaaaatggatggtttgtttctggaacaactaaacgtgatgatgcaaagtatatgtactatttgaagaagttcattatggaaactcttaaggctataaagttagatggtgttgatgtcattggttatactgcatggtccttgatggatgggttcgagtggcataggggatactctatcagacgtggactcttctatgtcgatttcctgtcacaggacaaaatgcttttaccaaagtcgagtgcattgttttaccaaaaacttatcgaaaaaaatggattcccaccgttgccagagaaccaaccactcgaaggtacctttccatgcgattttgcctggggagttgtggataactacatacaagtggacaccactctgagtcagttcaccgaccttaatgtatacctttgggatgtgcatcatagtaagaggctcattaaagttgatggtgtggtcactaagaagcgcaagtcttactgcgtggattttgccgcgattcaaccacaaattgcattgcttcaagagatgcacgtaactcatttcagattttcccttgactgggcacttatcttgccgctgggaaatcaatcacaagtaaatcacacaattctgcagtactatcgctgtatggcatcagaactcgtacgggtgaacatcaccccggttgtagcactgtggcaacctatggctccaaaccagggactccctcgcttactggctcgccaaggagcctgggagaatccatacaccgctttagcatttgcagaatacgcgcgtctctgttttcaggaattagggcaccatgtcaagttatggataacaatgaatgagccttacacacgtaacatgacttactctgctggacataacttattgaaagctcatgcgttggcttggcatgtctataatgagaaatttcgtcatgctcaaaatggcaagatatctatcgccctacaagcggactggattgaacctgcgtgcccattcagtcaaaaagacaaagaagttgcagaacgcgtcctggagtttgatatcggctggttggcagagccgatatttggttctggtgattacccgtgggtgatgcgagactggttaaaccaaagaaacaatttcttattaccgtatttcactgaggacgagaaaaagttgatccagggtacattcgactttcttgcactatcccactatacgaccatcttagttgattcagagaaggaagacccaataaaatacaatgattatctagaggtccaggagatgactgatatcacttggctcaatagtccaagccaagtggccgtagtcccatggggacttcgcaaagttctcaactggctcaagttcaaatacggagacttgccgatgtacatcataagtaacggtatagatgatggcttgcacgcggaagatgatcagcttcgcgtatattatatgcagaattacattaatgaggctcttaaagcacatatccttgatggtatcaatctatgtggctacttcgcttacagtttcaacgataggacagctcctcgttttggactttacaggtacgcggccgatcaatttgaacctaaagcatcaatgaaacactaccgaaagatcattgacagcaatggattcccgggaccagagacgctagaaaggttttgtccagaggaatttacagtgtgtactgagtgttctttctttcacactcgcaagtcgctgctggcctttatcgcattcttgttcttcgccagtattataagtcttagcctgattttttattattcaaaaaagggaagacgtagctataag

SEQ ID NO: 149818 - DNA, 3036 bp, Artificial Sequence
  derived and/or modified sequence
atgccggcctctgctccaccccggaggccgaggcccccccccccatctctgtctctgttgttggtcctcctgggcctgggggggagaagactccgcgccgagcctggcgatggagcccagacttgggcccgcttttcacgccctccagctcccgaggccgcagggttgtttcagggaacattccccgacggattcctgtgggctgtggggtctgcggcataccagaccgaaggggggtggcagcagcacggaaaaggagcctccatctgggacaccttcactcaccatcctctggcacccccgggggatagtcggaacgccagcctcccgctgggggccccttcccctcttcagcccgccacgggggatgtcgcatcagattcatataacaacgtgttccgggatacagaggcgctgagagaattgggcgtgactcactacagattcagcattagctgggcccgggtgctgcccaacggttccgctggcgtgccaaaccgggaggggctccgctattatagacgcctgctggaaaggctgcgcgagttgggtgttcagcccgtcgtcaccctgtaccattgggatctgcctcagcgcctccaggatgcgtacggcggttgggctaaccgagctctcgccgaccatttcagagattacgccgaactctgtttcaggcattttggagggcaagtgaaatattggatcacaatcgataacccatacgtagtggcttggcatggctatgcaactgggagactggctcccgggattagagggagcccacggctcggctatctcgtggcgcataatctgctgctggcccacgctaaagtgtggcatctgtacaacacctcattcaggcctactcagggtggccaggtgtcaatcgccctctctagtcactggatcaatcctcgccggatgaccgaccattccataaaggaatgccaaaagtctctcgacttcgtcctgggatggttcgccaaacctgtctttatagatggggactaccctgagtccatgaaaaataatctctctagcattctgccagattttacagaaagcgagaaaaagttcattaaagggactgcggacttcttcgcactttgtttcggccctacgctgagctttcagttgctggacccacacatgaagtttagacagctggagagtcccaacctccggcagctgctctcttggattgacctcgagttcaatcacccccagatcttcattgtggagaacggatggttcgtgtcaggtacgactaagcgggacgatgctaagtacatgtactacttgaaaaagttcatcatggaaactctgaaggccattaagctggacggagttgatgtcattgggtacactgcctggtcactcatggacggatttgaatggcatcgcggctattccattcggcggggcctcttttatgtcgactttctgtctcaagataaaatgctcctccctaagtccagtgcccttttctatcagaaacttatagaaaaaaacggctttccccccctgccagagaaccagcctctggagggcacattcccctgtgatttcgcatggggcgtggtcgacaactacattcaagtagataccacgctttctcagtttactgatttgaacgtgtacctgtgggacgtgcatcattccaagcgcctcattaaggtagatggtgtcgtgacgaaaaagaggaagagctattgcgttgatttcgctgccatacagccacagatcgcgctcctgcaggagatgcatgttacgcatttccggttctccctggactgggccctgattctgccactcggaaaccagtctcaggtgaatcacaccatacttcaatactaccggtgcatggcgtcagagctggtgcgcgtgaacattacacccgtggtggcactgtggcaaccgatggcacctaatcaagggctcccacgcctgctggccaggcagggagcatgggaaaatccctataccgctctggccttcgccgagtatgcacggctgtgtttccaggaactgggccatcacgtcaagctgtggatcactatgaatgaaccatacacccgcaacatgacctattcagccgggcacaacttgcttaaggcccatgcccttgcctggcatgtgtacaatgaaaaatttagacacgcccagaatggaaagatttcaatcgccctgcaggccgactggatagagccagcatgccccttcagccagaaagacaaagaagtggccgagcgagtgctggagtttgacatcggctggctggctgagcccatcttcggctcaggtgattacccctgggtcatgcgggactggttgaatcaacgcaacaacttcctgttgccatacttcacagaagacgagaagaaattgatccagggtacgttcgactttctcgctctgtctcactacaccacgatccttgtggactccgaaaaggaggaccctattaagtacaacgactacctggaagtgcaggagatgaccgacattacatggctgaactctccatcacaggtcgccgtcgtgccgtggggactgcgcaaggtgctcaactggcttaagttcaagtatggcgatctcccgatgtacataatctctaacgggatcgatgacgggcttcacgcagaagacgaccagctgagggtgtattacatgcagaattacattaatgaggcactgaaggcacacatcttggatggcatcaacctgtgcggatatttcgcctactcttttaacgacaggaccgccccgcgcttcggcctctatagatatgccgccgatcaattcgagcccaaagcttccatgaagcactaccgcaaaataatcgacagcaatggtttccctgggcctgaaacgttggagcggttttgccccgaggagtttaccgtgtgcacagagtgcagcttctttcatacaaggaagtcattgttggccttcatagcattccttttctttgccagtataatcagtttgagcctgatcttctactacagtaagaagggacgaagaagctacaag

SEQ ID NO: 149819 - DNA, 3036 bp, Artificial Sequence
  derived and/or modified sequence
atgccagcctcagctccccctcggcggcccagaccccctcccccctctctttctctgttgctggtcctgctgggcctgggcggcaggcgcctgcgggctgagcctggcgatggggcacagacctgggctcgcttcagtaggcccccggcgcccgaggcagctgggcttttccaaggaacctttcctgacggattcctttgggcagttggatctgccgcttaccagaccgaaggaggctggcaacagcacggcaagggtgcctcgatctgggacaccttcactcaccaccctcttgctcccccgggcgactcgaggaacgctagcttaccactcggagctcctagtccacttcagccagcaaccggggacgtcgcttctgatagctacaacaacgtgttcagggataccgaggccctgcgagaactgggtgtgacccactatagatttagtatctcttgggcccgcgtgctccccaacggctctgctggcgtgccgaaccgagaaggtctcaggtactacaggcgtttgcttgagagactacgagaattaggggtacagcctgtcgtgacgttgtatcactgggaccttccacaaagactgcaggacgcttatggtggatgggccaaccgggccctggctgaccactttcgcgactatgccgagctgtgctttagacacttcggcggccaggttaaatactggattacaatcgataatccctacgtggtggcatggcacgggtacgcaacgggccggctagcccccggcattcgtgggagccctcgcctcggatatttggtggcgcacaaccttctgcttgcacacgccaaggtttggcacctttacaacactagctttcgccccacacaagggggccaagtttcaatcgccttatctagccactggatcaatccccggcgcatgaccgatcacagtatcaaggagtgtcagaagagcctcgattttgtgcttggatggttcgccaaacccgttttcatcgatggagactaccccgaatctatgaaaaataatctttcgtctatcttgcctgatttcacagaatccgaaaaaaaatttattaagggcacagccgacttcttcgcactctgttttggacctacactttcatttcaactcctcgatccacacatgaagtttagacagcttgaaagcccgaatctgaggcagcttctgtcctggatcgacctcgagttcaaccatcctcagatatttatagtagaaaacggctggttcgtctctggcacgacgaaaagagatgacgctaagtacatgtactaccttaaaaagttcataatggaaacgttaaaagctatcaagctggacggagtggacgttatcgggtacaccgcttggtcactgatggatggctttgaatggcataggggctattcaattcggagaggtctgttctatgtggatttccttagtcaagataagatgttacttcccaagtcatcagctttgttctatcagaaattgatagagaaaaatggattccctccattgcctgagaaccaacccttagaagggaccttcccctgcgattttgcttggggagttgttgacaactacatacaagtagacaccactctgagccagttcactgatctcaacgtgtatctctgggacgtacaccattctaagcggttgataaaagtggacggcgttgttactaagaagagaaagtcatactgcgttgattttgctgccatccagccccaaatcgcattactgcaggagatgcatgtgacccatttcagattctctctcgattgggccctcattctgccacttgggaatcagagtcaggtgaaccacacaattctgcagtactatagatgtatggcctcagaattggtacgcgtcaacattacacccgtcgtggcactgtggcagcccatggcccctaaccagggcttaccccgcctgcttgcccggcagggagcgtgggagaatccttatacagccctggcttttgctgaatatgcgcgcctctgcttccaggagcttggccatcacgtgaagctgtggatcaccatgaatgaaccctatactcgcaatatgacatactctgccggccataacctgctgaaagcccatgccctggcctggcacgtgtacaacgagaaattccgtcacgcccaaaatggcaagatttccatcgctctgcaggccgattggattgagccagcctgtcctttctctcaaaaggataaggaggttgccgaacgggtccttgaattcgacatagggtggctggccgagccgatctttggaagcggagactatccttgggtaatgagggattggctgaaccagaggaataacttcctgctgccatatttcacagaggatgaaaagaagttaatccaaggtacctttgacttcctggcgttgtcccactacaccactatcctggttgatagcgaaaaagaggatcccatcaagtacaatgactacttggaggtgcaggaaatgaccgatattacgtggctgaattctccatctcaggtagctgtggtcccctgggggctaaggaaggtgctgaattggttgaagttcaagtacggagatctgcctatgtacatcatatctaacggaattgatgatggactgcacgcggaggatgaccaactgagggtgtactacatgcagaattatattaatgaggcccttaaagcacacatcctggacgggatcaatctgtgcgggtactttgcctactccttcaatgaccgcactgccccaaggttcggactgtatcggtacgccgctgaccagttcgaacctaaggccagcatgaagcattataggaagattatcgattctaatgggtttcctggcccagaaacactggagaggttctgcccagaggaatttaccgtgtgcacagagtgtagcttttttcacactcggaagagccttctggccttcattgcctttttgttttttgctagcattattagcctcagcttgatcttttactactctaagaaggggagacgtagttacaaa

SEQ ID NO: 149820 - DNA, 3036 bp, Artificial Sequence
  derived and/or modified sequence
atgccagcctccgctccgcctcgtagaccccggccacctccaccatcactttcgcttcttctcgttctgctgggtcttggcggcagacggttacgggctgagccaggtgatggagcccagacctgggcccgcttttctaggcccccagccccagaagcagccggcctctttcaggggaccttcccggatggatttttgtgggccgttggaagcgccgcatatcaaacagaaggtggctggcagcaacacggtaagggagctagcatttgggacactttcacacaccacccactggcgcccccaggagatagtagaaacgcctctttacccctgggagccccctcccctttgcagccagcaaccggggatgtcgcaagcgactcgtataacaacgttttccgcgacacagaggcattgcgagaactgggtgtgacccactaccgcttctctatctcctgggcccgcgtgcttcctaatggctccgcgggtgtccccaatcgggagggattgcgatactatcggcggttactggagcggttaagagaactcggcgttcagcccgtcgttaccctgtatcattgggacctgccccaacgcctgcaggacgcctacggagggtgggccaaccgggctctggccgatcattttcgtgactatgcggagctgtgtttccgccacttcggcgggcaggtgaaatattggatcaccatcgacaatccatacgttgtggcctggcatgggtatgccacaggccgcctcgctcccgggattaggggcagtccccggctgggctatctggtcgctcacaacttgctcttagcccatgctaaagtgtggcacctgtataacactagttttcgccctacacagggcggacaggtgtcaattgctttgagcagtcactggattaacccaaggcgaatgaccgatcactctataaaggagtgtcagaaatcccttgacttcgtgctgggctggtttgccaagccagtgtttatcgacggcgactaccctgaatccatgaaaaataatttgtctagcatattgcccgattttacagagtccgagaaaaagtttataaagggcacggctgacttcttcgctctctgcttcggaccgaccctctcatttcaattactggatcctcatatgaagttccgacagctcgaatcgcccaacctcaggcagctgctttcgtggatcgatctagaattcaatcacccccaaatatttatcgtcgagaatggctggtttgtgtccgggacaacgaagcgcgacgacgccaagtatatgtactatttgaagaagttcattatggaaactctaaaggctatcaaactagacggcgtggatgtcattggttacactgcatggtctctcatggacggctttgagtggcacaggggatattctatccgacggggattgttttatgtagatttcttatcacaagacaaaatgctcctgccaaaaagttctgccctgttttatcaaaagctcattgaaaaaaatggtttccctcctttaccggagaaccagccactggaaggcacctttccgtgtgacttcgcctggggggtggtagataattacattcaggtcgatacaacattgagtcagttcactgacttaaatgtatatttgtgggatgttcaccacagtaaacgactaattaaggtggacggggtggtaacaaagaaaagaaagtcttactgcgtggacttcgccgctatccagccccagatcgccttactgcaggaaatgcatgttacacacttcaggttttcactcgactgggctttaattctgcccctgggaaaccaaagccaggtgaatcacacgatcttgcaatattaccgctgtatggcgagcgagctcgtgcgggtgaatattaccccagtggtggcactttggcagccaatggcacctaatcaaggactgcctcgcctgttggctcgccagggggcttgggagaacccttacacagctctggccttcgcagaatacgctagactgtgctttcaggagctgggtcatcatgtgaagctttggattacgatgaatgagccctacacaaggaacatgacttatagcgcaggccacaaccttcttaaggcccatgcactagcttggcacgtgtacaacgaaaagttccgccatgcccaaaatgggaaaatctcaattgcactccaggccgactggatagaaccagcctgtccttttagccagaaagacaaggaggttgctgagcgagtgttggaattcgatattggttggttagccgagcctatctttggctccggggactacccctgggtaatgagagactggctcaaccagcggaacaattttctattgccatacttcaccgaagacgagaagaagttgattcaaggcacgtttgactttttggcactaagccactacacaaccatactggtggattctgaaaaagaagaccccattaagtataacgattatttagaggtgcaggaaatgaccgacatcacatggctgaattcaccctcccaggtggcggtcgtgccatgggggttacgaaaggttctgaattggctgaaattcaagtacggcgatctgcccatgtatatcatctcaaatgggatagacgatgggctgcacgccgaggacgaccagctccgggtttattatatgcaaaattatatcaatgaggccctcaaggcgcacatcctggatggaatcaatctgtgcggttattttgcctatagtttcaatgatagaaccgctccaagattcggactgtaccggtacgccgctgatcagttcgaacctaaagcctctatgaagcactatcggaagatcatcgactctaacggctttcctggacccgagactctggagcgcttctgcccagaggagtttactgtatgcacagagtgcagcttctttcatacgcgcaagtctcttctggcctttattgctttcctcttcttcgcatccattatctctttgtccctcatattctattattcaaagaaggggcgccgatcctataaa

SEQ ID NO: 149821 - DNA, 3036 bp, Artificial Sequence
  derived and/or modified sequence
atgcctgcttcagctcctcctaggcggccaagacctccacctccttcccttagtctccttctggtgttattggggttaggaggcaggagactgagggctgagccaggagatggcgcacaaacttgggcacggttctctcgcccaccagcccctgaggccgcaggtttgtttcaagggaccttccccgatggatttttgtgggctgtcggcagcgccgcgtaccagacagaaggcggatggcagcagcacgggaaaggcgcctctatttgggatacttttacccatcatcccctggctcctcccggtgattcccggaacgcttctttacctctgggtgctccttccccactccagccagccaccggcgacgtcgccagtgactcatacaataacgtgtttcgggataccgaggcactgcgggaactcggggtgacccattaccgtttttcgattagctgggcacgggttctgccaaatggttccgcgggggtgcccaaccgtgaaggcctgcggtactaccgaaggcttttggaaagattaagagagttgggagttcagccagtggttaccctttatcactgggatttgccccagcggttgcaggacgcttacggtggttgggctaatcgagctctggctgaccacttcagggactatgctgaactgtgttttcggcacttcggaggacaggtcaagtactggattacaatagataacccctacgtcgtggcctggcatggctatgcaacgggacggttggcgcccggcatccgcggatcccccagactgggctacctagttgcacacaatctgttgttggcccacgctaaggtctggcacctgtataatactagttttaggcctacacagggcggacaggtatcaattgccctctcttctcactggatcaacccacgacggatgaccgatcactctattaaggagtgtcagaagagcctggactttgtgctcggctggttcgctaaaccagtattcatcgacggagactatccggagtcaatgaaaaataacctgtccagtatcctcccggattttacggaaagtgaaaagaagttcatcaaaggtaccgctgacttctttgccctctgcttcggccccacgttatcctttcagctgctagatccccatatgaagttccggcagctggagtcacccaacctcaggcagcttctcagctggatcgacttggagtttaaccatcctcagatttttatcgtcgagaatgggtggttcgtgagtgggaccacaaaacgcgatgatgccaaatatatgtattatctgaagaagttcatcatggagaccctgaaagctattaaactggatggcgtggatgttatcggctacacagcatggagcctgatggacggatttgaatggcatcgtggatattctattcggaggggcctcttttatgtggatttcctgtcccaggataaaatgcttctgccaaagagttccgcactgttctaccaaaaattgatcgagaaaaacggattcccacccttgcccgagaatcagcctctggaggggaccttcccatgtgactttgcttggggcgtagtagataactacatccaagtcgacacgacattgagccagtttactgacttgaacgtctacttgtgggacgttcaccactcaaagaggcttatcaaggtcgatggagttgtgaccaaaaaacgcaagtcctattgcgtcgacttcgccgccatccagccccagatcgcccttttacaggagatgcacgtaacgcactttcgcttttcccttgactgggcattaatcctgccgctggggaatcaatcccaggtgaatcatactatcttgcagtactacagatgtatggcgagtgagctggttcgcgtcaacattactcctgtggtggctctatggcagccaatggcaccgaaccaaggtctacctagacttctggctcgccagggcgcgtgggaaaatccttacactgccctggctttcgccgagtatgctcggctgtgttttcaagagttgggccatcatgttaaattatggatcactatgaatgaaccctacacccggaatatgacatacagcgctggtcacaatttgctgaaggcacacgctttggcatggcacgtgtacaacgagaaatttcggcacgcacagaatggaaagatctcaattgcgctgcaggcagattggatcgagccagcctgcccttttagccagaaagataaagaggtcgccgaacgtgtcttagaattcgacatcggctggctcgccgagcccatcttcggctccggagactacccttgggttatgagggactggctgaatcagcgcaacaacttcctgttaccatactttaccgaggatgagaaaaagctgatacagggcacctttgactttcttgcattatctcattatacaaccattcttgtcgattctgagaaggaagatcctataaaatacaatgactatctagaagtgcaggaaatgacagacatcacgtggctaaattcccccagccaggtcgccgttgtgccatgggggctaagaaaggtgttgaattggctgaaattcaagtacggcgatctgcctatgtatattattagtaatggtatcgatgacggcctgcacgccgaagatgatcagctgcgagtgtattatatgcagaactatatcaacgaggctctaaaggcccatattcttgacggaatcaacctctgtggttacttcgcctactcattcaacgaccggactgcacctaggttcggcctgtatcggtatgcggctgaccagtttgaacctaaggcttctatgaaacactatcggaagatcatagacagcaatggatttcccggcccggaaactcttgaacgattttgtccagaagaattcacagtttgtacagagtgttccttctttcacactagaaaaagtttattagccttcatcgcattcctgttctttgccagcatcattagcctgtcactgatcttttattatagtaaaaaaggaaggaggtcgtacaag

SEQ ID NO: 149822 - DNA, 3036 bp, Artificial Sequence
  derived and/or modified sequence
atgccagcctccgctcctccccgtagaccaaggccaccccctccaagtctaagtctgctactggtattgctcggcctcggcggccggcgcctacgggccgagcctggggatggtgcccagacttgggcaagatttagccgcccaccagctcctgaagccgcgggtctgtttcagggtaccttcccagacgggttcttgtgggcggtggggagcgccgcttatcagaccgagggtgggtggcagcagcatgggaaaggcgcttccatttgggatacgtttactcatcatccgttagcacctccaggtgacagcagaaatgcctccctcccgcttggtgcaccatctcctttacagccggcaacgggggacgtggcctcggattcctataataacgtcttccgagatactgaggccctgagggagttgggggtaactcactacaggttctccatttcctgggcaagagtgctgccaaatggatctgccggtgtcccaaaccgcgagggcttaaggtactatcgccggctcctggaaaggctgagagaactcggcgtccaacctgttgtgaccttgtaccactgggatctcccccagcgcttgcaggatgcatacggaggctgggcgaatagagccctcgcagatcattttagagattacgcagagctgtgttttcgccactttggaggccaggttaaatactggattactatcgacaacccttacgtcgtggcctggcacggctatgcaacgggccgccttgcaccgggcatacgaggatcacctagattgggctaccttgttgcgcataacctgctgctcgcgcatgccaaggtctggcatctctacaatacatcatttcgccccacgcagggcggccaggtctccattgcgctgagctcacactggataaatccccggcgtatgacggaccattctattaaggagtgtcagaagtcactcgatttcgtgctgggctggttcgccaagcccgtcttcattgatggcgattaccccgagagtatgaaaaacaacctctctagcatattgcctgattttaccgagtcagagaaaaagttcattaaaggcacagccgatttcttcgccctctgcttcggccccacactatcgtttcagttactagaccctcacatgaaattccggcaactcgaatcacctaaccttagacagctcctgtcgtggattgaccttgagttcaatcaccctcagatctttatcgtagagaacgggtggtttgtttccggcacgacaaagagggacgacgctaagtacatgtattatctgaaaaagtttataatggagaccctcaaagctatcaaactcgacggagtcgacgtcattggatataccgcctggtctctgatggatggatttgaatggcatcgaggttatagcattaggcggggactgttttatgtggatttcctctctcaggacaagatgctactccccaaatcctctgctctgttctaccaaaaacttatcgagaaaaatggcttcccacccctccccgagaatcagcccctcgagggcacttttccctgtgacttcgcatggggcgttgtcgacaactatatccaggtggacaccacgctctcccagttcacagacctgaatgtgtatctgtgggacgttcaccactccaagagactgatcaaggtggacggcgtggtgactaaaaaacgaaaatcgtattgcgtggatttcgcagccattcagcctcagatagctctcctgcaggaaatgcacgtgacccattttaggttttctctcgactgggctttgatcctgccactgggcaatcaaagtcaagttaatcatacaatacttcagtactacagatgtatggcctcagagctggtgagagttaacataaccccagtggtggcgctctggcagcccatggcccccaaccagggcttaccgcggctgctggcccgacagggggcttgggagaacccgtacacagctctcgccttcgccgaatatgcccggctgtgcttccaggagctgggacaccacgtgaagctctggataacaatgaatgagccctacactcgcaatatgacttattcggccggacataacctgctgaaggcccatgccctcgcttggcatgtgtacaatgaaaaattccgccatgctcaaaacgggaagatctcaattgcgctacaggcagactggattgagcccgcctgccctttctctcagaaagacaaagaggttgccgaacgggttctagaatttgatataggatggctggccgagcctattttcggtagcggagactatccttgggtcatgcgggattggctgaatcagagaaataactttctgctgccctacttcaccgaagacgaaaaaaagctcattcagggcacctttgatttcttggccctgtcacattatactaccatcttggtggactccgagaaggaagatccaataaagtataacgattatctggaagtccaagaaatgacagacatcacctggcttaacagtccttcacaggtggctgtggtgccatggggtcttaggaaggtattaaactggctcaagttcaaatatggcgacctgcccatgtacattatttcaaatggcatcgatgatggcctgcatgccgaagacgaccaactgagggtgtactacatgcagaactacatcaacgaggccctgaaggcccacatcctggatggcataaatctctgtggttattttgcctatagctttaatgacaggaccgcaccacgattcggcctctataggtacgccgccgatcagttcgagccaaaagcctctatgaaacattatagaaaaattattgacagtaacggcttcccggggcccgaaacactggagaggttctgtcctgaagagttcactgtgtgcaccgaatgctcttttttccacactaggaaatctctgctggcttttattgccttcctcttttttgccagcataatctccctgtccttgatattttattattcaaaaaagggccggagaagttataag

SEQ ID NO: 149823 - DNA, 3036 bp, Artificial Sequence
  derived and/or modified sequence
atgccagccagtgctccacctagacgcccacgcccacctcctccatctctcagtcttttgctagtgctgttagggctcggaggccgcagactgcgcgcagagcccggggatggagcccagacatgggcaaggttctcccggcctccggcccccgaggctgcggggctgttccaaggaactttccctgatgggttcttgtgggccgttggctctgccgcttaccaaaccgaggggggttggcagcagcatgggaagggggcctctatctgggatactttcacacaccacccactagctccaccaggcgactctaggaacgcttctctgccactcggggcacctagcccccttcagccagctaccggagacgttgcctctgattcatataacaacgtcttccgggacacggaagcactgcgtgagctaggggttacacattatcgcttcagcatctcatgggcgcgcgtcctgcctaatggttctgctggagtcccaaacagggagggtctgaggtactaccggcggctgctcgaaaggctccgagagctaggcgtgcagcctgtcgtcacactctatcactgggacctgccacagcggctccaggacgcctacggcgggtgggctaaccgcgctctcgcggatcacttcagagactatgccgagctgtgcttcagacattttggtggacaggtcaaatattggatcaccattgacaacccctacgtggtggcttggcatggctacgctaccggtcggctggcccccgggattaggggctcaccccgcctggggtacctggtggctcataatctcctcctcgcccatgccaaggtctggcatctgtataacactagctttcgacccacccagggaggccaagttagtattgccctgagctctcattggatcaacccacgccggatgacggatcactctatcaaggagtgccaaaaaagcctggattttgttttgggctggttcgccaagcccgtctttatagatggcgactacccggaaagcatgaaaaacaatctgtcctcaatcctgcctgattttacagagagcgagaaaaagttcataaagggcacagccgattttttcgctctgtgctttggccctacactttcgttccaattgcttgaccctcacatgaaattccgacaactagagtcccccaaccttaggcagctgttatcctggatcgaccttgagtttaaccacccacaaattttcattgtggaaaacggctggtttgtgagcgggacaacaaagagagacgatgccaagtacatgtactatcttaaaaaattcattatggaaactcttaaggccatcaagctcgatggcgtcgacgtgatcggctatacagcctggtcactgatggacggctttgagtggcaccgcggttactcaatccgaagaggtcttttctatgtagactttctcagccaggacaaaatgctcttgcccaagagtagtgcactgttctaccagaagcttattgagaaaaatggcttcccccccttgcccgaaaaccaacctctggaaggaacatttccctgtgattttgcgtggggcgtggtagacaattatatccaggtggacacaacactgagccaattcaccgatttaaacgtgtatctgtgggacgtgcaccacagcaaaaggctgattaaggtcgatggagtggtgactaagaagcgcaaaagctattgcgtcgactttgccgccatacaacctcaaatagcactactgcaggagatgcacgtgactcatttcagattctcccttgattgggctctaattctccctcttggcaatcagtctcaggtgaatcacaccatcctacagtactacaggtgcatggctagcgaacttgtgcgcgtgaatatcacgcccgttgtggctttgtggcagccaatggcacccaatcagggactgcctcggctgctggcccgccagggcgcttgggagaacccctacacagctctggcctttgcggagtacgcaagattgtgcttccaggagctaggccaccatgtgaaactgtggataactatgaacgagccttacactcgaaacatgacatactccgctggccacaacctgttaaaagcccatgcgctggcatggcatgtgtataacgagaaattccggcacgcccaaaacggcaagattagcatcgccctgcaagccgactggatcgagccggcttgtccattcagtcagaaggataaggaggtggccgagcgcgttctagaattcgacataggctggctagccgaaccaatctttggtagtggggactatccttgggtaatgcgcgactggttaaaccagcgaaataactttctcctgccatattttactgaagatgaaaagaaacttattcagggtacatttgacttcctcgctctctcacattacacaactatcctggtagattcagaaaaagaagacccgataaagtacaatgattacctggaagtccaggaaatgacagacatcacgtggttgaactctccttcacaggtggctgtggttccttggggcctcagaaaggtacttaattggctgaaatttaaatacggtgatctgccgatgtacatcatcagcaatggcatcgatgatggcctgcatgctgaagacgatcagctgcgagtctactacatgcaaaattatataaatgaagccttgaaggcacatattctggatggaatcaatctgtgtggctactttgcctactccttcaatgaccgcacggctcctcggtttggtctttaccgatacgctgccgaccagttcgaacccaaagctagtatgaaacactatagaaagattatcgatagcaacgggttccctgggcccgaaactttggaacggttttgtcccgaggaattcactgtgtgtaccgagtgcagctttttccatacgaggaagtccctcctggctttcatcgcttttcttttcttcgcaagcatcatttccctctcactcatcttctattattccaaaaagggtcgaagatcttataaa

SEQ ID NO: 149824 - DNA, 3036 bp, Artificial Sequence
  derived and/or modified sequence
atgcccgctagtgctccgcctagaaggcccaggccccccccaccgagtctatcgctcttgctggtcctcctgggcctaggaggccgccgactacgcgctgagcctggggacggtgcgcaaacatgggccaggttttcgaggccccccgcgcccgaggccgcagggctcttccagggaacatttccagatggatttctctgggctgtgggaagcgcagcctaccagactgagggaggctggcagcagcacggaaaaggcgcttcaatctgggacaccttcacccatcacccactcgctcctcccggagactcaaggaacgcgtcgctccccctgggagccccctctcccctacagcccgctacgggcgatgtggcatccgacagttacaataatgtgtttagggacactgaggctttaagagagttgggagtgacgcactaccgctttagcatctcctgggcccgggtgcttccgaacgggtcagcgggcgtgcccaatcgggagggcttgcgctactatcgccgtctgttggaaaggctgagagagctgggagtgcagcccgtggttactctgtatcattgggacttacctcagcgcttgcaggacgcgtacggaggatgggccaaccgcgcactggctgaccacttccgcgattacgctgaattgtgttttcgccatttcggcggccaggtgaaatactggattaccatcgataacccttacgttgtggcttggcatggctacgctacgggccggcttgcccctggaatacgaggaagtccgcgcctggggtatctcgtcgctcacaaccttctgctcgcacacgccaaggtatggcacctctacaatacatctttcaggccaacgcagggtggccaggtcagcatcgcgctgagttcacactggattaatccccgccgcatgacagaccactccatcaaggaatgccaaaagagccttgactttgtcctgggctggttcgcaaagcctgtctttatagatggcgattaccctgaatccatgaagaacaatctgtcctctatattgcctgattttaccgagtccgaaaaaaagtttataaaggggacagctgacttcttcgcactttgtttcggccctaccctgagtttccaactcctagatcctcacatgaagttccgccagctcgagtcgcccaatctcaggcagcttctgtcttggatagatctcgaatttaatcacccacaaatcttcattgtggagaatggttggtttgtatctggcacaactaagcgggatgatgcgaaatatatgtactacctaaaaaagttcatcatggagacacttaaggctattaaactggatggcgtggacgtgattgggtacacagcttggagtctgatggacggattcgaatggcacaggggatacagcatccgacgcgggctattttatgtagatttcctgtcccaggacaagatgcttctacctaagagctcggcgctcttttaccagaagctgatcgaaaagaacgggtttccaccacttccagaaaaccagcctcttgagggaacgttcccctgcgacttcgcctggggggtagtggataactacattcaggtggataccacattatcacaatttactgatttgaatgtctacctttgggatgtgcatcattctaagagattgattaaagtcgacggagtggtgacaaagaaacgcaaaagttactgcgtagattttgccgcaatccagccacagattgccttgctacaggagatgcacgtgacacactttcgatttagtctggattgggccctgattctgccactggggaatcagtcccaggtgaaccacacaatcttacagtactatcggtgcatggcctctgagttggtcagggttaatatcacaccagtcgttgctttgtggcagcctatggctcccaatcaagggttaccaagacttctggcacggcagggggcctgggaaaatccttatacagcccttgccttcgctgaatatgcccgtctgtgtttccaggagttggggcaccacgtgaagttgtggatcaccatgaatgagccctacaccagaaatatgacctactccgcaggacacaacctactgaaggcacacgccctcgcatggcatgtgtacaacgaaaagttcaggcacgcacagaatgggaagatatcaatcgctctgcaagctgattggatcgaacctgcttgcccgtttagtcaaaaggataaggaggtggcagaacgcgtgctggagttcgatatcggctggcttgccgagcctatttttggctccggcgattatccatgggtgatgcgtgactggttaaaccagcgcaacaactttcttttaccatattttaccgaggatgagaaaaagttgatccagggcacattcgattttctggccttgagccactatactacaatcctggttgactcagagaaagaggatcctattaagtacaacgactatttggaggtgcaggaaatgacggatatcacctggctgaattcaccgagtcaggtagccgtagtcccatggggcttgcggaaagtgctaaactggctcaagttcaagtacggcgacctccccatgtatattatctccaacggaatagatgatggactgcatgccgaagacgaccagttaagggtttactacatgcagaactatataaatgaggctctgaaagcccacatcctggatggtatcaatctctgtggctatttcgcatactcttttaatgaccgaaccgctcctcgcttcgggctgtacagatatgccgcagaccagttcgagcctaaagccagtatgaaacactaccgcaaaatcatcgactctaacgggtttccggggcccgagaccctcgagcggttttgccccgaggaatttactgtctgtaccgagtgctctttcttccacactcgaaaatcgctgctagcttttatcgccttcctgttctttgcttccattatatcactcagccttattttctactactcgaagaagggtaggcggtcttacaag

SEQ ID NO: 149825 - DNA, 3036 bp, Artificial Sequence
  derived and/or modified sequence
atgcctgcaagcgcgcccccacgccgaccccgccctccaccaccatccctgtctttacttctggtcctcttaggcctgggtggccgccggctgcgcgctgagcccggcgacggcgcacagacctgggcacgattctcccgcccccctgctcctgaggcagccggcctcttccagggaaccttcccagacggtttcctctgggccgttggctcagcagcttatcagacagaagggggatggcaacagcatgggaaaggcgcctctatatgggatacgttcactcatcatccactggcaccacccggcgattcacgcaatgccagtctccctctgggggcgccgtcccccctgcaaccggccacaggcgacgtggcctcggacagttacaacaatgtatttagggatactgaggccctgcgggagttgggggtaacacactaccgcttttcaatctcctgggcccgggtgctgcccaatgggagcgctggtgtgcccaaccgcgagggtctgagatattacagaaggctgttagaaagactaagagaattaggtgtgcagccagtggtgacattataccactgggacctgccccagcgcctgcaggatgcgtacggaggctgggcaaatcgcgcgctggctgaccactttagggactacgcagagttatgctttcgccacttcggtggccaggtgaaatactggattacgattgataatccgtacgtggtggcatggcatgggtacgctacaggccgattagcccctggtattcggggcagcccgcggctgggctacttagtcgcacataacctgcttctcgctcacgccaaagtttggcatctctacaatacctcattccgcccaacacagggggggcaggtgtcaattgcgctgtcctcacactggattaaccctaggaggatgactgatcattccattaaagaatgccagaaatctttggattttgtactgggctggttcgccaagcccgtgttcatcgacggggactaccccgagtccatgaagaacaacctgagcagtatcctcccagacttcactgagagcgagaagaagttcatcaagggcaccgccgactttttcgctctttgtttcggacctactctgtctttccagctgctagacccgcatatgaagttccggcaactggagtcacctaacctgaggcagctcctgagctggattgacctagagtttaaccacccccaaatttttattgtcgaaaatgggtggtttgtgagcgggaccactaagcgcgacgatgccaaatatatgtactacctcaagaagtttattatggagaccctgaaagccattaaactggatggagttgacgtcatcgggtataccgcatggtcactgatggacgggtttgaatggcaccgcggatactccatccgccgcgggttattctacgtggatttcctatcacaggataagatgttgctgcctaagtcctccgccttattttaccagaaactaattgaaaagaacggattcccccccctgcccgaaaaccagcctctggaaggcacatttccctgcgattttgcatggggagtcgtcgataactatatacaggtggatactaccctgtcccagttcaccgatctaaatgtctatttatgggacgtccaccactcaaaacgactgataaaggtggacggggtggtcacaaaaaaaaggaaatcatactgtgtggattttgccgccatccagccccagatcgccctccttcaggagatgcacgttactcacttccggtttagcctcgactgggcgctgatcctgccactggggaatcagtctcaggtaaaccacaccatcctgcaatactataggtgcatggcttccgagctggtcagagtcaatattacccctgttgtggctctctggcaacctatggcacctaatcagggactgccaagactgctggccaggcagggggcctgggaaaacccctacaccgccctcgctttcgcagagtatgctagactctgctttcaggagttggggcatcatgtgaaattgtggattaccatgaatgaaccatatacccggaatatgacctatagtgcgggccataacctcctgaaagcccacgctctggcttggcatgtttataacgaaaaattcaggcacgcccagaatggaaagatatccattgctcttcaagcagattggatagagcccgcctgcccctttagccaaaaggataaagaggttgcagaacgtgtgcttgaatttgacatcggttggcttgcggaaccaatcttcggctccggagattatccttgggtaatgcgtgactggctgaatcagaggaacaactttcttctgccctatttcacagaagacgagaaaaaactgatccagggaacatttgatttcctggcactcagccactacaccacaatcttggtggactcagaaaaagaagaccccattaagtataacgattacttggaggtgcaggagatgaccgatatcacttggctaaacagcccatcacaggtggccgtggtgccatggggcttgcgtaaagtgctgaactggctgaagtttaagtatggagatttgcccatgtatatcatctcaaatgggattgacgacggactgcacgctgaagatgaccagctcagggtgtactacatgcagaactatattaacgaggcgctgaaggcccatattctagatgggattaatttgtgtgggtacttcgcttactccttcaacgatcgcacggcacccagatttgggttgtataggtatgcggccgaccagttcgagcctaaggcttctatgaaacactatcggaagataatcgatagcaacggattccctggcccagagacattggaaagattctgcccagaggagttcacagtctgtaccgagtgttccttcttccacacacggaagtcactcctggctttcatcgctttcttgtttttcgccagcatcatctccctgtctctgattttctattattctaaaaagggacgaaggtcctataag

SEQ ID NO: 149826 - DNA, 3036 bp, Artificial Sequence
  derived and/or modified sequence
atgccagctagcgctcctcctcggcgccctaggcctcctccaccgtctttgtcattgctgctcgtgctgctggggctggggggccgaaggctgagagcagagcccggcgatggggcccaaacttgggcaaggttctcacgtccccccgctccggaagctgccgggctgtttcagggcacattcccagatggtttcctttgggctgttggcagtgccgcatatcaaacagagggcggatggcagcaacacggtaaaggagcgtccatctgggacacatttacacatcaccccttggcaccacctggagactctaggaacgctagtctcccacttggggcacccagtccactccagccggccaccggcgatgtagctagcgatagctataataacgttttcagggataccgaggctctcagagaactcggggtgacgcattaccgattttccatctcctgggcacgggtgctgcctaatggatctgctggagtgccgaaccgtgaggggttgcgttactacagaagactgctggagaggcttcgggaactgggcgtccagccagtggtcaccctttaccattgggacttacctcagcgactccaggacgcttatggcggctgggcgaatcgggccttggccgaccactttagggattacgcggaattgtgttttagacactttggtggacaggttaagtactggataacaatcgacaatccttacgtagtcgcctggcatggctacgcgaccgggcgcctggcacccgggatccgcggaagcccaaggctcggttacctggtggcccataatctgctgctcgcgcacgcaaaggtctggcacttgtacaacacctcgtttcgaccgacacagggcgggcaagtgtctattgccctctcctcacactggataaacccaagacggatgacagaccatagtattaaggaatgccagaaaagtttggatttcgtgctgggctggttcgcgaagccagttttcatcgacggagactaccccgagtcaatgaagaacaacctgagcagtatcctgccagatttcacagagagcgagaaaaagttcatcaaagggaccgccgacttttttgccctgtgttttgggcccacgttgagttttcaacttctcgatccacacatgaagtttaggcaattagagagcccaaacctccggcagcttttatcctggatcgatctggaattcaatcatcctcagatctttatagtcgagaatggctggtttgtgtccggaaccaccaagcgtgacgatgctaagtacatgtattatttgaagaagtttatcatggaaaccctgaaggcgatcaaactggacggtgtggacgtcatcggatatacagcatggagcctaatggacggcttcgagtggcaccggggatacagcatccgtcgaggtctcttctacgtggactttctgtcccaggacaaaatgctcctacccaagtcctctgccctcttttatcagaaactgattgagaagaatggctttccgcctctgccggagaatcagccccttgagggaacatttccatgcgatttcgcctggggcgttgtggacaactatatccaagtggacacgacccttagccaatttactgacctcaatgtctacctctgggacgtgcatcactccaagcggctgatcaaggtcgacggcgtcgtgaccaagaaaagaaagtcctattgtgtagatttcgctgcgattcaaccacagatcgcactcctccaagagatgcatgtgactcacttccggttctccctagactgggccttaatccttcctttaggcaaccagagccaggtgaaccacactatactgcagtattatcggtgtatggcctctgaactcgttcgcgtcaatatcacccctgtggtcgcgctgtggcagccgatggccccgaaccaggggttaccaagacttctggccagacaaggtgcctgggaaaacccatatactgcactggcattcgccgagtacgccaggctctgtttccaggagctgggacatcacgtgaagctgtggatcacgatgaacgagccatacaccaggaacatgacatatagcgcagggcacaatctcctgaaagcccatgcccttgcatggcatgtgtacaacgagaaattcaggcatgcacaaaatggcaagatcagtatagccctccaggccgactggattgagccagcgtgccctttctcccaaaaggataaagaggtcgcagagagagtgctcgagttcgacatcggctggctcgcagaacctatattcggctcaggggactacccttgggtgatgcgggattggctgaatcagcgtaacaacttcctcctcccatattttactgaggacgagaaaaagctgatccagggtacctttgatttcctcgccctttcacactacactaccatcctggtggacagcgagaaagaggatcccatcaaatacaatgattatctagaggtgcaggaaatgacagatattacttggctcaactcaccctcccaggtggccgtggtgccctggggcctacgcaaagtgctgaattggttgaaattcaaatacggcgatctgccaatgtatattattagtaacggaatcgatgatggtctgcacgcagaagacgatcaattgagggtgtattatatgcagaactatattaatgaggcccttaaggcacacattttggacggtatcaatctgtgtggctacttcgcctattcattcaacgatagaactgccccacgattcggcctatataggtatgcagctgatcaattcgagcctaaagcatcaatgaagcactacaggaagattattgatagtaacggtttcccgggtccagagacactggagcgtttttgccctgaagagttcacagtctgcactgagtgctctttcttccacaccaggaagtctctgctcgcttttatcgcctttctgttttttgcatcaatcatttccctctccctgatcttctattattccaagaaaggccgcagaagttacaag

SEQ ID NO: 149827 - DNA, 3036 bp, Artificial Sequence
  derived and/or modified sequence
atgcccgcctcagccccgcctagaagacctagaccaccccccccttcgctgagcctcttactggtcctgcttggtctgggcgggcggcgactccgcgctgaaccgggcgacggcgctcagacctgggccagattttcccgtccaccggccccggaagctgcaggcctcttccagggcacatttcctgacggatttttatgggcggtgggtagcgccgcctatcaaaccgaaggaggatggcagcagcacgggaagggagcgagcatttgggacaccttcacacatcatcccctggctccacccggcgattccagaaatgcatctctccccttaggtgcaccttcgccgctccaacctgctacaggggatgtcgctagcgactcatataacaacgtgttcagagatacagaggccctgagagaactgggtgtcacccattatcgcttttccatcagttgggcccgagtgctgcctaatgggtcagctggcgttccaaatcgcgagggcctaaggtactaccggcggcttttagaacggctgcgcgagcttggggtgcagccggtggttaccttgtaccactgggacttaccccaaagactgcaggacgcatacggcggatgggccaaccgagccctggccgatcactttagggactacgcagagctctgcttcagacacttcggagggcaggtaaaatattggataaccattgacaacccgtacgttgtcgcctggcacggttacgccacaggcagactggcgccaggcatccgcgggtctccccgacttggctatctggttgctcataatctgttgttggcgcatgcaaaggtctggcacctctacaacacctcctttaggcccacccagggtggacaggtgtccatcgccctgtctagccactggataaacccgcgacgcatgacagatcacagtattaaggagtgtcagaagtcactcgatttcgtcctcggatggttcgctaaacctgtcttcattgatggggactaccccgaatctatgaagaacaacctgtcatccattttaccggatttcaccgagtctgaaaaaaaatttatcaaaggtactgccgacttcttcgcactgtgcttcggacccaccctgagcttccaactcctcgaccctcatatgaaattccggcagctagaatctccgaatcttaggcagttgctttcttggatagatttggagttcaatcaccctcagatcttcattgtggagaatggttggtttgtgagcggtaccacaaagagagacgacgcgaagtatatgtactacctaaagaaatttatcatggagaccctgaaggccatcaagctggacggcgtggatgttataggttataccgcttggagcctgatggatggattcgagtggcatagaggctatagtatcagacgtggcctattttacgtggacttcctgtcccaggacaagatgcttttgccaaaaagtagtgccttgttttatcagaagctcatcgagaagaatggattcccacctctgccagagaaccagccattagagggaacatttccttgtgatttcgcttggggcgtggttgataattacatacaagtggacactaccctgagccaatttacagacctcaacgtgtatctatgggacgtgcaccattcgaaaagacttataaaggtggacggagttgtcacaaaaaagaggaaatcatattgtgttgacttcgctgctatccaaccacaaatagctctgcttcaggagatgcacgttacccacttccgcttttcgctcgattgggcactcatcttgcccctcggcaaccagtcacaggtgaatcacacgatcctgcagtactataggtgcatggcaagtgaactggtccgcgttaacatcacccccgtggtggcactttggcagcctatggctccgaaccagggcctgcccaggctccttgcgcgacagggcgcatgggagaatccttataccgcactagccttcgccgaatacgctaggttgtgctttcaggagctgggtcaccacgtcaaactatggatcactatgaatgagccgtacaccagaaacatgacctactcggcgggtcataacctcctgaaggcccacgccttggcgtggcacgtgtacaacgagaaatttagacatgcccaaaacggtaagatcagcatcgccctccaggcggactggattgaaccagcttgtccgttttctcaaaaggacaaggaagtggcggagcgggtgctggagttcgatattggttggctcgccgaacccatcttcggcagcggcgattatccttgggtgatgcgcgactggttgaatcagcgaaacaacttccttctgccatattttaccgaggacgaaaaaaagctcattcaggggacctttgactttttggcgctgtctcactacaccaccatactggtggacagtgaaaaggaggatccaataaagtacaatgattacctggaggttcaggagatgacggacatcacctggttgaatagccccagtcaggtggcagtagtaccctggggccttcgcaaagtgctcaattggctgaaattcaagtatggagatctgcctatgtatattatttctaatggcatagacgacgggctacacgctgaggacgaccagttgcgggtttattatatgcagaattacattaacgaggctctgaaagcccacatcctcgatggcatcaacctttgcgggtactttgcatactccttcaacgaccggactgccccaaggttcggactgtacaggtacgcggctgatcagttcgaacctaaggccagcatgaagcactataggaagatcatcgactctaatggtttccctggccccgaaaccctggaacgcttctgtcctgaggaattcaccgtgtgtaccgaatgcagcttcttccatacccgcaagagcctcttggccttcatagctttcctgtttttcgccagtattatttctctgtcccttatattttactactccaaaaaaggacggcgctcatataag

SEQ ID NO: 149828 - DNA, 3036 bp, Artificial Sequence
  derived and/or modified sequence
atgccggcgtcggcgccgccgcgtcgaccgcgaccgccgccgccgtcgctatcgctattactagtattattaggtctaggtggtcgtcgactacgagcggaaccgggtgatggtgcgcaaacgtgggcgcgattttcgcgtccgccggcgccggaagcggcgggtctatttcaaggtacgtttccggatggttttctatgggcggttggttcggcggcgtatcaaacggaaggtggttggcaacaacatggtaaaggtgcgtcgatatgggatacgtttacgcatcatccgttagcgccgccgggtgattcgcgaaatgcgtcgttaccgttaggtgcgccgtcgccgttacaaccggcgacgggtgatgtagcgtcggattcgtataataatgtttttcgagatacggaagcgttacgtgaactaggtgtaacgcattatcgattttcgatatcgtgggcgcgagttctaccgaatggttcggcgggtgtaccgaatcgagaaggtttacgatattatcgtcgactactagaacgtctacgagaattaggtgtacaaccggtagtaacgctatatcattgggatttaccgcaacgtttacaagatgcgtatggtggttgggcgaatcgagcgctagcggatcattttcgagattatgcggaactatgttttcgacattttggtggtcaagttaaatattggataacgatagataatccgtatgttgtagcgtggcatggttatgcgacgggtcgtttagcgccgggtatacgaggttcgccgcgactaggttatctagttgcgcataatttactattagcgcatgcgaaagtatggcatttatataatacgtcgtttcgaccgacgcaaggtggtcaagtttcgatagcgttatcgtcgcattggataaatccgcgacgaatgacggatcattcgataaaagaatgtcaaaaatcgttagattttgtactaggttggtttgcgaaaccggtttttatagatggtgattatccggaatcgatgaaaaataatttatcgtcgatattaccggattttacggaatcggaaaaaaaatttataaaaggtacggcggatttttttgcgttatgttttggtccgacgttatcgtttcaattactagatccgcatatgaaatttcgtcaattagaatcgccgaatttacgtcaattactatcgtggatagatttagaatttaatcatccgcaaatatttatagtagaaaatggttggtttgtatcgggtacgacgaaacgagatgatgcgaaatatatgtattatttaaaaaaatttataatggaaacgttaaaagcgataaaattagatggtgtagatgttataggttatacggcgtggtcgttaatggatggttttgaatggcatcgtggttattcgatacgacgtggtctattttatgtagattttttatcgcaagataaaatgctattaccgaaatcgtcggcgttattttatcaaaaactaatagaaaaaaatggttttccgccgttaccggaaaatcaaccgctagaaggtacgtttccgtgtgattttgcgtggggtgttgtagataattatatacaagttgatacgacgttatcgcaatttacggatttaaatgtatatttatgggatgtacatcattcgaaacgtttaataaaagtagatggtgttgttacgaaaaaacgtaaatcgtattgtgttgattttgcggcgatacaaccgcaaatagcgctactacaagaaatgcatgttacgcattttcgtttttcgctagattgggcgttaatattaccgctaggtaatcaatcgcaagtaaatcatacgatactacaatattatcgttgtatggcgtcggaactagtacgtgttaatataacgccggtagtagcgttatggcaaccgatggcgccgaatcaaggtttaccgcgattattagcgcgtcaaggtgcgtgggaaaatccgtatacggcgttagcgtttgcggaatatgcgcgtctatgttttcaagaattaggtcatcatgtaaaattatggataacgatgaatgaaccgtatacgcgaaatatgacgtattcggcgggtcataatctactaaaagcgcatgcgttagcgtggcatgtttataatgaaaaatttcgacatgcgcaaaatggtaaaatatcgatagcgctacaagcggattggatagaaccggcgtgtccgttttcgcaaaaagataaagaagttgcggaacgagtactagaatttgatataggttggctagcggaaccgatatttggttcgggtgattatccgtgggtaatgcgtgattggttaaatcaacgaaataattttttactaccgtattttacggaagatgaaaaaaaattaatacaaggtacgtttgattttctagcgttatcgcattatacgacgatattagttgattcggaaaaagaagatccgataaaatataatgattatctagaagtacaagaaatgacggatataacgtggttaaattcgccgtcgcaagttgcggtagtaccgtggggtctacgtaaagtattaaattggttaaaatttaaatatggtgatttaccgatgtatataatatcgaatggtatagatgatggtctacatgcggaagatgatcaactacgtgtttattatatgcaaaattatataaatgaagcgctaaaagcgcatatattagatggtataaatctatgtggttattttgcgtattcgtttaatgatcgaacggcgccgcgttttggtttatatcgatatgcggcggatcaatttgaaccgaaagcgtcgatgaaacattatcgtaaaataatagattcgaatggttttccgggtccggaaacgctagaacgattttgtccggaagaatttacggtatgtacggaatgttcgttttttcatacgcgaaaatcgctattagcgtttatagcgtttttattttttgcgtcgataatatcgctatcgttaatattttattattcgaaaaaaggtcgacgatcgtataaa

SEQ ID NO: 149829 - DNA, 3036 bp, Artificial Sequence
  derived and/or modified sequence
atgcctgcctctgcgcccccccgacggcccagaccaccacccccatctctgagtctattgctggtgctcctaggtctcggtggcaggcgtctgcgagccgagcctggggacggcgctcaaacatgggctagattctcaagacctcccgcccctgaggccgccggcctgttccagggcacttttcccgacgggtttctgtgggcggtaggttccgccgcctatcagacagagggagggtggcaacagcatggcaaaggcgcatcaatttgggatacttttacacaccaccctttggcacctccgggagacagtaggaatgcatctctacctctcggcgcaccttcccccctgcagcccgccacaggcgacgttgcgagcgactcctacaacaatgtcttccgagatacggaagctctgcgtgagctgggcgtgacacactatcgcttctctatcagctgggccagggttctgcctaatgggagcgctggggtcccgaatcgagagggtctgagatattatcgaaggttactggagaggctgagagagcttggcgttcagcccgtcgtcacactctatcactgggatctgccacagagactgcaggatgcttatggggggtgggcgaaccgagctctggctgatcattttcgagactatgccgagctgtgcttccgacattttggagggcaggtcaaatactggatcacaatagacaacccatatgtggttgcttggcacggatatgctacaggccgactggctcctggaattcgaggctcacccagattgggctatctggtcgcccacaacctgcttctcgctcacgcaaaggtgtggcatctctacaatacgtcattccgacccacacagggggggcaggtgtctatcgcattatcttcacactggatcaatccgagaaggatgaccgatcactccattaaagagtgtcaaaagagcctggacttcgtgcttgggtggttcgccaagcctgtgttcatcgatggagattatccagagtctatgaagaacaacttatcttcaattctgcccgactttaccgaaagcgagaaaaaattcataaagggcaccgctgatttctttgctctgtgttttggccccaccctgtccttccagctacttgatcctcacatgaagtttcgacaactcgagagtcctaatttaagacaactgctgtcctggatagatctggagttcaatcatccacagattttcattgtggagaacggatggtttgtgagcggtacgactaaaagggacgatgctaagtatatgtactacctgaagaagttcatcatggaaacactcaaggccattaagctggatggagtagacgtcatcggatacacagcatggtcactgatggatggtttcgaatggcaccgaggctacagtattaggaggggtctcttttacgtggactttctgagccaggacaagatgctgctgccaaaatcttccgctctgttctaccagaagctcattgaaaaaaacggcttcccacctctgcccgaaaaccagcctctcgaagggaccttcccctgcgatttcgcatggggcgtggtcgataactatatccaagtcgacacaacactgtcccagttcactgaccttaatgtatacctgtgggacgtgcatcattcaaaacggctcataaaagtcgacggcgtcgtcactaagaaaaggaagtcctactgtgtagacttcgccgcaattcagcctcaaatagccctgctccaagaaatgcatgtgacacacttcaggtttagtctggactgggccctcatcttgcctctgggtaatcagtcacaagtaaatcataccatcctccagtattacagatgcatggccagtgaactagtgagggtaaatataacacctgtcgtggcgctgtggcagcctatggcccccaaccaaggattgccacgactcctagcacggcagggagcatgggaaaacccttataccgctttagccttcgccgaatatgcccgactgtgcttccaggagctgggacatcacgttaaactgtggatcactatgaatgaaccgtataccaggaacatgacatattccgccgggcataatcttttgaaagctcacgccttagcttggcacgtgtacaacgagaaattccgacacgcccagaatgggaaaatctccatagcccttcaggccgactggattgagccagcctgcccttttagccaaaaagataaagaggttgccgagcgcgtgttagaatttgatattggctggctagcagagcctatcttcggcagcggcgactatccctgggtgatgcgagattggctgaatcagcggaataatttccttctgccatatttcacggaggacgagaaaaaactgattcaggggactttcgacttcctggcactttctcactacaccaccatcttggtggattcagagaaagaggatccaatcaaatacaacgactatctggaagtccaggaaatgacagacattacttggctgaattcacctagccaggtggccgtcgtaccctggggcttgagaaaagtgttgaactggctcaaatttaagtacggcgatctgcccatgtatatcatatctaacgggatcgacgacgggctgcatgctgaagatgatcagctcagggtatattatatgcagaactatatcaatgaggcattaaaagcccacattctggatggcatcaatctctgcgggtactttgcttattccttcaatgaccgcacagcacctcgctttggattgtataggtatgcagcggatcagtttgaacccaaagcatccatgaagcattatcgaaaaatcatcgactctaatggattccccgggcccgagaccttggagagattttgcccagaagaatttactgtgtgtacggagtgcagcttttttcataccagaaagtctttactcgcctttatcgcgtttctgttcttcgcatctataatcagtttaagcctcatcttttattactctaagaagggaagaaggtcctataaa

SEQ ID NO: 149830 - DNA, 3036 bp, Artificial Sequence
  derived and/or modified sequence
atgcccgcctcggccccgcctagaaggcctcggccaccaccgccctcactgtctctgctgttggtgctcctagggttgggaggcagacgcctgcgtgccgagccgggagatggtgcgcagacctgggctcggttctccagaccccccgcaccggaagcagcgggtctattccagggcactttccctgacggttttctgtgggctgtgggaagcgctgcctatcaaactgagggtggttggcagcagcacggcaagggggcgtccatctgggacaccttcactcaccatccccttgcgccccctggcgattcaagaaatgcctcgctcccccttggcgctccatctcccctccaaccagcaacgggtgacgtcgcatctgactcctataataatgtatttcgcgacacagaagccctcagagaattgggcgtaactcactataggttttcaatttcttgggcacgggttctcccaaacggatctgctggcgtgccgaatagagaaggactgcgttattatagacggctgctggagcgcctgagggaactgggagtccagccggtggtgacgctttatcattgggacctccctcagaggctccaggatgcctacggtggatgggcgaacagggcgttagcggatcatttccgagactacgctgagttgtgctttaggcattttggcgggcaggtgaagtattggattactatcgataacccgtatgttgttgcatggcacggttatgccacagggcggttggctcctgggatccggggtagcccccgcctgggttatttggtcgcccataatctgctcctcgctcacgccaaggtgtggcatctgtacaatacttcttttaggccaacgcagggaggccaagtgtcgatcgcattgtcctcccattggattaaccctagaagaatgactgatcacagcataaaagagtgccagaagtccctggacttcgtccttgggtggtttgccaaacccgtcttcatcgatggtgactaccctgagtcaatgaaaaacaacctttctagtatcctgccagacttcacagagagcgagaagaagttcatcaaaggaaccgccgacttttttgcactgtgctttgggcccacgctaagtttccagttgctggatccgcatatgaaattcaggcagctcgagtctccgaatctccgccagctcctcagctggattgatttggaatttaatcaccctcaaatcttcatcgtggagaatggttggtttgtctcaggaacaaccaagcgggatgacgcgaagtacatgtactatctgaagaagtttattatggagacactaaaggccatcaaactggatggcgttgacgtgattggctatacagcttggagccttatggacgggttcgaatggcacagaggctatagcattcgtcggggtctgttttacgtcgatttcctgagtcaggataagatgctgctgccaaagagctccgccctgttctatcaaaaactaatcgagaagaatggcttcccgcccttacctgaaaatcaacccttagaggggacttttccttgtgattttgcctggggagtcgtggataattacatccaagtggacaccactttgagccagtttaccgaccttaatgtctatctgtgggacgtgcatcattcgaaaaggctgataaaagtcgacggcgtggttaccaaaaaaaggaagagctattgtgtcgacttcgccgcaatccagccacagattgccctcctgcaggagatgcacgtgactcatttcaggttctcgctggattgggctctgatactgccactgggaaatcaatcccaggtgaaccacacaatcctccagtactacagatgcatggcttcagagcttgttcgggttaacataacccccgtggttgcactatggcagcccatggccccaaaccaggggctgccgcggctgttggcaaggcagggagcgtgggaaaatccctatactgccctcgcgtttgcggagtatgcacgtctgtgttttcaggaactggggcaccacgtgaagttgtggataacaatgaatgaaccatataccagaaatatgacatactcggcagggcacaacctgcttaaagcacacgcgttggcgtggcacgtttacaacgagaaatttcgtcacgctcagaacgggaagatatctatcgccctgcaggccgattggattgagcctgcgtgcccattctcccagaaagataaggaagtcgccgaaagagtgctggaatttgacatcgggtggttggcggagcccatatttgggtctggtgactacccatgggtgatgcgggattggctcaatcaaagaaacaacttcctcctgccttattttactgaagatgaaaaaaagctcatccagggaacctttgacttcctggccttgtctcactacaccaccattcttgtggacagcgaaaaagaggatcccattaagtacaatgactatctcgaagtgcaagagatgactgacatcacctggctcaacagtcctagccaggtggcggtcgtgccatggggtctgcgaaaggtgctaaactggttgaaatttaagtatggcgacctccccatgtatataatatctaatggcatcgacgacggcctccatgccgaggatgaccagctgcgtgtgtactacatgcagaattacattaacgaagcccttaaggcgcatatactagacggtatcaatctgtgtgggtatttcgcctactcgttcaatgaccggacagcgcctaggtttgggctgtatcgatatgcggcagatcagttcgaacccaaagcttcaatgaaacactatcgcaaaatcatcgacagtaacggttttcctgggccggagacactggaaagattctgcccggaagagtttactgtctgtaccgagtgttccttttttcatacgcggaagtcactgttggcgttcatcgccttccttttcttcgcgagcattattagtctcagcctgattttctattatagcaaaaaggggcgccggtcatacaag

SEQ ID NO: 149831 - DNA, 3036 bp, Artificial Sequence
  derived and/or modified sequence
atgccagcctccgcccccccccgccggcccaggcccccaccaccctctctttccttattgctggtgctccttggccttggtggacgtcgactacgggctgaacctggagatggtgcccagacctgggcaagattttcacgccctcccgcccccgaagccgccggcctatttcaaggaacttttcccgacggttttctctgggctgttggctccgcagcctatcagacagagggagggtggcaacagcacgggaagggagctagcatttgggacacattcacccaccacccgcttgcacccccaggcgactctcgaaatgcctcactccccttgggtgctcccagcccactgcagcccgcaacaggcgacgtggcttctgatagttacaacaacgtctttcgagacacagaagctcttcgagaactcggcgttactcattaccgtttttctatttcatgggctcgggtcctgccaaatggtagcgccggagtgccgaatagagagggactccgctattatcggcgacttttagagaggttgcgcgagctcggcgtccagcctgttgtcacgttatatcactgggatttgccacagagactgcaagatgcttacggcggttgggccaaccgtgcactggcggatcatttccgggactatgctgagctgtgtttccgacacttcggaggtcaggtgaagtactggatcactattgataacccctacgtggtggcgtggcacggctatgccactggcagactcgctcctggtatccgtgggtctccacgtctgggctacctggtggcacacaatctgctgttggcccacgcaaaggtgtggcatctttacaatacttccttcaggcccacgcagggagggcaggttagcatcgccctcagcagtcactggataaacccccggcggatgactgaccactccatcaaggaatgtcagaagtccctggatttcgtcttgggctggttcgcaaagccagtgttcattgacggtgactaccctgagtcgatgaagaataacctgtctagcatcctccccgattttactgaatcagaaaagaagttcatcaaggggacagcagatttcttcgcgctgtgttttggacccactttgagcttccagctgctggacccccatatgaagtttaggcagcttgagtcacccaacctgcgccagctgctgagctggatcgacctggaatttaatcacccacaaatttttattgtcgaaaacggctggttcgtctcaggcaccacaaagcgcgatgatgccaagtatatgtactacttaaagaagtttataatggagacactaaaggccattaagcttgatggtgtggatgtgatcggctacaccgcttggagcctcatggatggtttcgaatggcaccgtggttactcaatacggcgggggctgttctacgttgactttctaagccaggacaagatgctgctacctaaaagcagtgcattgttctatcagaagctcattgagaagaatgggtttccccccctgcctgaaaatcagcccttggaagggacctttccatgcgacttcgcctggggggtcgtggacaactacatccaggtcgatacgaccctttcccaattcacagacttgaacgtgtatttgtgggatgtgcaccattccaaaaggctgattaaagtcgacggtgtggtcaccaaaaagaggaagtcatattgcgtggactttgccgcaattcagcctcagatcgctctcctgcaagagatgcatgtgactcacttcagatttagtctggattgggccctgattctgccacttggaaaccagtcccaggtgaatcataccatcctccagtactacagatgtatggcttctgagcttgtccgcgttaatataacccccgtggtggccctgtggcagcctatggcacccaaccagggattaccccgcctactcgctcggcaaggggcttgggagaacccttatacggcattggctttcgcagagtacgcccggctgtgcttccaggagctaggccaccatgtcaaactgtggataacaatgaacgaaccatatacccggaatatgacttattccgcaggacacaacctcctgaaggcccacgcattggcatggcacgtgtacaacgaaaagtttagacatgcccaaaacgggaagatctccattgccctgcaggccgattggatcgaacccgcttgcccgtttagtcagaaggacaaagaggtcgcagaaagggtactggagtttgacattggctggctggccgaaccgatttttgggagcggtgactatccatgggtgatgagggactggttgaaccagaggaacaattttcttctaccttacttcacagaagacgagaagaaattgatccaggggacgttcgacttcctggcactcagtcactataccactattctggtggactcagaaaaggaggatccaatcaagtacaatgattatctggaagtgcaggaaatgaccgacattacctggttaaattctcctagccaggtggcggtcgtgccttgggggctcagaaaggtcctgaactggctcaaatttaagtacggggatttaccaatgtacattattagcaatgggatagatgacggcctgcacgcagaagatgatcagctgcgcgtctactatatgcagaactacatcaatgaagctctcaaggcccacatcttggatggcatcaatctgtgcggatacttcgcttactcttttaatgaccggaccgcgccgcggttcggtctgtatcgctatgcggccgaccagttcgagcccaaggctagcatgaagcactatcgcaagattattgatagtaatggttttcccggcccggagacgcttgagcggttttgccctgaggaatttactgtgtgtactgagtgctcctttttccatacaaggaagtccctgttggcctttatcgctttcctcttctttgccagtataatttcccttagcctgatcttctattactcgaagaaagggaggcgctcctataaa

SEQ ID NO: 149832 - DNA, 3036 bp, Artificial Sequence
  derived and/or modified sequence
atgcctgcttcagcaccacctcgaagaccaagaccaccaccaccaagtttatcacttcttttagttcttttaggattaggaggaaggagacttcgtgctgagccaggggacggagctcaaacttgggcaagattttctagaccaccagcaccagaagcagctggacttttccaaggaacttttcctgatggttttctttgggcagtaggtagtgcagcttatcaaacagagggaggatggcaacaacatggtaagggagcatcaatttgggacacgtttacacaccatccattagcacctcctggtgatagtcgaaatgcttctttaccattaggtgctccatctccattacaaccagcaacaggagatgttgcatcagattcatataacaacgtttttagagatactgaagctttaagagaattaggagtaacacattacagattttccatttcatgggcaagagttcttccaaatggatccgcaggtgttccaaatagagaaggattaagatattatagacgattacttgaaagacttagagaattaggtgttcaaccagtggttacactttatcattgggatcttcctcaaagattgcaagatgcttacggaggttgggcaaatcgtgctcttgcagatcattttagagattatgctgagttatgctttagacattttggaggacaagtgaaatattggattactattgataatccatatgtagtcgcatggcatggatatgctactggaagattagctccaggaattagaggatctccaagattaggatatttggtagctcataatcttttacttgctcatgctaaagtgtggcatctttataatacaagttttagaccaacacagggaggacaggtatcaatagcattaagttcacattggattaatccaagaagaatgactgatcattcaattaaggaatgtcaaaaatctttagattttgttttaggttggttcgcaaaaccagtttttattgacggagattatccagaaagtatgaagaataatttaagtagtattttacctgactttacagaatcagaaaagaaatttattaagggaactgcagatttctttgctttatgttttggtccaacacttagttttcaacttcttgatcctcatatgaaattcagacaattagaatcacctaatttaagacaattactttcatggatagatttagaatttaatcatccacaaatcttcattgtagaaaatggttggtttgtttcaggaaccacaaagagagatgatgctaaatatatgtattatcttaagaaatttattatggaaacattaaaagctattaaacttgatggagtcgatgtcatcggatatactgcctggtccttaatggatggatttgaatggcatagaggttatagtattagaagaggattattttatgtagattttttatctcaagataagatgttattacctaagtcatcagctttattttatcaaaagttaattgaaaaaaatggttttccaccacttccagaaaatcaacctcttgaaggaacttttccatgcgattttgcatggggagtagttgataactatattcaagttgatactactcttagtcaattcacagatcttaatgtttatttatgggatgttcatcactctaaaagattaattaaagttgatggtgtcgttacaaagaaaagaaaatcatattgtgtggattttgctgcaattcaaccacaaattgcattgttacaagaaatgcatgttacacattttagattttcattagattgggctcttattcttccacttggtaatcaatctcaagttaatcatactattcttcaatattatagatgtatggcttccgaattagtacgtgttaatattactccagttgtggcattgtggcaacctatggctcctaatcaaggtcttccaagacttttggctagacaaggagcttgggaaaatccttatactgctttagcatttgctgaatatgcacgtttatgttttcaagaattaggacatcatgttaaattatggattaccatgaatgaaccatatactagaaacatgacatattcagcaggacataatttattgaaagctcatgcactagcatggcatgtttataatgaaaaatttagacatgcacaaaatggtaaaatttctattgctttacaagctgattggattgagccagcttgcccatttagtcaaaaagataaggaagtagctgagagagttctcgagtttgatattgggtggttagcagaaccaatttttggttctggagattatccttgggttatgagggattggcttaatcaaagaaataattttcttttaccttattttactgaggatgaaaaaaaattaattcaaggaactttcgattttcttgctttaagtcattatacaacaattcttgtagactcagaaaaagaagatccaattaagtataatgattatcttgaagtacaagagatgacagatattacttggttaaactcaccaagtcaagttgcagttgtaccatggggattaagaaaagttttaaattggcttaaatttaaatatggagacttaccaatgtatatcatctcaaatgggattgatgatggtttacatgctgaagacgaccaactaagagtttattatatgcaaaattatattaatgaagcattaaaagcacatatccttgatggaataaatttatgtggatattttgcatattcatttaatgatagaacagctcctagatttggactttatagatatgcagctgatcaatttgaaccaaaagcatcaatgaaacattatagaaaaattatcgatagtaatggatttccaggaccagaaacattagaacgattttgtccagaagaatttactgtttgtactgaatgttcattctttcatacaagaaaatcattacttgcttttattgcatttttattttttgcatcaattataagtctttctcttattttttactatagtaaaaaaggacgaagaagttataag

SEQ ID NO: 149833 - DNA, 3036 bp, Artificial Sequence
  derived and/or modified sequence
atgccagcatccgcaccgccacgcagacctcgccctcccccgccctcactaagtctcctgctggtactgctgggcctgggaggtcggcgcctgagggccgagccgggggatggcgcgcaaacgtgggcgcggttctccaggccgcctgccccagaagccgcaggattgttccagggaacatttcccgatggctttctctgggcagttggatcagccgcttaccagacagaggggggatggcaacagcacggcaaaggtgcatccatctgggacacgtttacacatcaccccctggcacctccaggcgacagtagaaacgccagccttccactcggtgccccaagccccctacaacctgcgactggcgacgtagcatccgattcttacaataatgtgtttagggatacggaggctcttagggaactaggtgtaactcactacaggtttagtatctcgtgggctagggtactacccaatggcagcgctggggttccaaaccgcgaaggactcagatattatcgccgtctgctcgaaaggttacgggagttgggggtacagccagtggtgaccctgtatcattgggatttgccacagagactccaggatgcctatggaggctgggctaatagagctttggcagatcattttcgcgactacgcagaactgtgctttcggcacttcggcggacaggtgaaatactggatcacaatcgacaatccgtacgtggtcgcttggcacggatatgccacaggtcgactcgcaccgggtatacgcggcagcccccggcttggatacctggttgcccacaacttattattggcccatgcgaaggtctggcacctgtacaacacaagcttcaggccaacacagggaggtcaggtgagcattgccttgagtagtcattggattaatccaaggaggatgaccgatcattcaattaaagagtgtcagaaaagcctggattttgtgcttggttggttcgctaaacctgtcttcattgatggcgattaccccgagagcatgaagaacaatcttagcagtatcctgcctgacttcactgagagtgagaaaaagttcataaaggggaccgcggatttcttcgctttatgctttggccccaccttatcttttcagctgctcgaccctcacatgaaatttcggcaactggaaagtcctaacttgaggcaactgctcagttggatcgacctggagtttaatcatccccagatttttattgtggagaacggctggttcgtttcaggaacgaccaaacgtgatgatgcaaagtacatgtactatctaaagaaatttataatggagactctaaaagccattaagttggatggcgtcgacgtcattggttacacagcttggtcactgatggacgggttcgagtggcatagaggctatagtatcaggagaggcctgttttatgtcgattttctgagccaggataagatgctcctgcccaaaagttcagctcttttctatcagaagttgattgagaaaaatgggttccctccattgcctgagaaccaacctctggaaggtacatttccctgcgatttcgcatggggtgtagtggacaattacattcaggtggacaccaccctgtcccagttcactgatctcaacgtatacctctgggacgtgcaccatagcaagcggctaataaaagtcgacggagtggtgactaagaagcggaagagctattgcgtggactttgccgcgattcagccacagattgctctcctgcaggagatgcatgtgactcacttcaggtttagcctcgattgggccttaatactgcccttgggtaaccagagccaagtgaatcacacaattctacagtactaccgttgtatggctagcgaattggtacgcgtaaacataactccagttgtcgccctgtggcagcctatggcccctaatcagggacttccaagactgctcgcacgccaaggagcatgggaaaatccttacaccgccttagcattcgctgagtacgcaaggctgtgttttcaggagctaggacatcacgttaaattgtggataacaatgaatgaaccatatacgcggaacatgacatactccgctggacacaatctactgaaggcacacgccctggcatggcatgtatacaatgaaaagttccgtcacgcacagaatgggaaaatcagcatcgccctgcaggctgactggatcgagccagcctgcccgttttctcagaaagataaagaagtagcggagcgagtacttgagttcgacatcgggtggctagcagagcctatctttggcagtggtgactatccttgggtcatgagagactggctcaaccaaaggaataactttttgctcccatacttcaccgaggacgagaaaaaactgattcagggaacattcgacttcttggccctgagccactataccaccatcttggtagactctgagaaagaagatcctataaaatataatgattacctggaggtacaagaaatgaccgacatcacgtggctcaacagcccttcacaggtcgccgttgtgccttggggactccgtaaagtcctgaattggcttaagttcaagtacggtgatcttccaatgtacataatatccaatggaatcgatgacggcttgcacgcagaggacgaccagctacgtgtgtattatatgcagaattatatcaacgaagcactgaaggctcacattttagatggtatcaacctctgcggctacttcgcctactcattcaacgatcggaccgctcccaggttcggcctatatcgttatgccgcggaccagtttgagcctaaagcaagcatgaagcactacaggaaaataatcgattccaacggattccccggcccggaaactttggagcgcttctgccctgaggaattcactgtctgcacagaatgctcattctttcataccaggaagagcttactggcattcatcgctttcttgtttttcgccagcataatcagcttaagccttattttctactacagtaaaaagggcagacggtcgtataag

SEQ ID NO: 149834 - DNA, 3036 bp, Artificial Sequence
  derived and/or modified sequence
atgccagccagcgccccacccaggagaccccgtcctccccccccctccctgagcctgctcctggttctgcttggcctgggaggacgtcgcctcagggccgagccaggagacggcgcccagacttgggctcgtttttcacgcccacccgctcccgaggccgctggcctgttccagggcacatttcccgatggattcttgtgggctgttggttctgctgcctaccaaacagaaggaggctggcagcagcatggtaagggtgcaagcatctgggacacattcactcaccacccccttgcaccaccaggcgactcacgtaacgcctctttgcccctcggagccccatcaccactgcagcccgccacaggagatgttgctagcgacagctataacaacgttttcagggatactgaggctctgcgcgagctcggagtgacacactacagatttagtatctcttgggcacgtgtcctgcccaacggtagcgcaggtgtacctaatagggagggtctccgctactacaggcgtctcctggagcgcctcagagagctgggtgtgcagcctgtggtaactctctaccactgggacctgcctcagaggctccaagacgcatatggcggctgggcaaatagggcactggctgaccactttagggactacgctgagctgtgtttccgccactttggcggacaggtcaaatactggatcaccatcgacaatccctatgtggtagcttggcacggctacgctacaggtagactcgcaccaggcatccgcggtagtccacgccttggctacttggtggcccacaatctgctgctggcccacgccaaggtttggcacctttacaacacttccttccgccctactcagggaggtcaggtttctatagctctttctagtcactggatcaatcccagaaggatgacagaccattccatcaaggagtgtcagaagtccttggattttgtgctgggttggtttgcaaagccagtctttatcgatggcgattacccagagtcaatgaagaacaatttgtcttccatcctgcctgacttcaccgagtccgaaaaaaagtttattaaaggaactgccgacttttttgccctttgcttcggacctactctgagcttccaactgctggacccacatatgaaattcagacaactggaaagtcccaacctgcgccagctcctgagctggattgacctcgagttcaatcacccacagattttcattgtagagaatggatggttcgtgagcggaacaactaagcgtgacgacgctaaatacatgtattacctgaagaagttcatcatggaaacactcaaagctattaaattggacggcgtggatgttatcggttacaccgcttggtctctgatggatggtttcgagtggcatagaggctattctattagaagaggactgttctacgtggatttccttagccaggataagatgctgctgcccaaatcctccgcacttttctaccagaagctgatcgagaagaatggttttccacccctgcctgagaaccaaccacttgaaggtacctttccctgcgacttcgcctggggtgtagttgataactacatacaggttgacactactttgagtcaattcactgaccttaacgtatacctctgggacgttcaccactctaagagactgattaaggttgacggagtcgtcaccaagaaacgtaaatcttattgtgttgatttcgctgctatccaaccacagatcgccttgcttcaggaaatgcatgtaacacatttccgtttcagtcttgactgggcattgattctgcccctgggcaaccagagtcaagtaaaccataccatactgcagtactaccgctgcatggcttcagaactggtacgcgtgaatattacaccagtcgtggctttgtggcagcctatggcccccaatcaaggactcccacgtctgctggcacgccagggagcttgggagaacccatacacagccctggccttcgctgagtatgcaagattgtgcttccaagagcttggccatcacgtgaagttgtggattaccatgaacgagccatacacacgtaatatgacctattccgctggccacaacctgctgaaggcacacgctcttgcctggcatgtctacaatgagaagttcaggcacgctcaaaacggtaagatttccattgctctgcaggccgattggatcgaacctgcttgtcccttcagccagaaggataaggaagtagctgagcgcgtgctggaattcgacatcggctggcttgcagaacccatctttggatctggagactacccttgggtaatgagagactggctcaaccagcgtaacaatttcctgctgccatactttaccgaggacgagaagaagcttatccagggaaccttcgactttctggccctttctcactacacaacaatccttgtagactctgagaaggaagacccaattaaatataacgactatctggaagtgcaggagatgactgacattacatggctgaacagtccctctcaggtagctgtcgtgccctggggtctccgcaaggtgcttaactggttgaaatttaagtacggagacctgcctatgtacatcatctctaatggaatagacgacggactccacgcagaggatgaccagctgagagtgtactacatgcagaactatataaacgaagctcttaaagcccacatcctggatggtatcaacctgtgtggctacttcgcctattcattcaacgacaggactgcccctaggtttggtctttatcgctacgcagccgaccagttcgaacccaaagcttcaatgaagcattaccgcaagatcatagattctaacggctttccaggacccgaaacattggaaaggttctgccctgaagagttcaccgtctgtacagaatgcagctttttccataccaggaaatctcttctggctttcattgcttttttgtttttcgccagcatcatctcactctctctcattttctattatagtaaaaagggtagaagatcatataaa

SEQ ID NO: 149835 - DNA, 3036 bp, Artificial Sequence
  derived and/or modified sequence
atgcctgcctctgccccacctaggcgacccaggcctccaccgccgtcactttctctgctgttggttttgctgggcctcggtggccggcgtctccgagccgagcccggggatggcgcgcaaacatgggccaggttttcacgcccccctgcacccgaagccgctgggctctttcagggaactttcccagatggcttcttgtgggcagtcggatccgccgcttaccagaccgagggtggctggcagcagcacggcaagggcgcatcgatttgggacacatttacccaccatccgctggccccgccaggcgactcccgaaatgcctcacttcctctgggcgccccgtcaccacttcagccggccaccggggatgtggccagcgattcctataacaatgtgtttcgtgacacggaggccctgcgggaactgggcgtgactcattataggtttagcatttcctgggcgcgtgtactcccgaacgggtcggcaggcgtgccgaaccgtgagggccttcgatattaccgacggctcctggagcgtctgcgcgagttaggtgtgcagccggttgttacgctgtaccattgggacctgccgcagcgactccaagacgcttacgggggttgggcaaatagggccctggccgatcatttccgcgattacgctgagctctgttttcgtcactttggtgggcaggttaagtactggatcaccatcgataatccatacgtggtggcatggcacggctatgctactggccggttggctccaggaatacgaggtagtccacgcctgggctacttagtggctcacaatctgttactggcccatgctaaggtctggcacttatacaatacgtcgttccgaccgacgcaaggcggccaggtatcgatcgccctgtcgtcccattggatcaacccgcgaagaatgacggaccacagtatcaaggaatgccagaaatcgctggattttgttctgggttggtttgccaagcccgtcttcatcgatggcgattaccccgaaagcatgaagaataatctgagctccatcctaccggacttcaccgagagcgagaagaagttcatcaagggcaccgccgatttttttgccctgtgctttggcccaacgctttctttccaattgctggacccccatatgaagtttcgacaacttgagagcccaaacctacgtcagctactcagctggatcgacctggagttcaaccatccacagatctttatcgttgaaaatggctggttcgtttccggcactaccaagcgagacgacgcaaagtacatgtattacctaaagaagttcattatggaaaccctgaaagccatcaagctcgatggtgtagacgtgattggatacaccgcctggagtctgatggacggatttgagtggcacagaggttacagtattcgacgcggcttgttctacgtggatttcctgtcccaggataagatgctgcttccaaagagctccgcgttattctatcagaaattgattgagaagaacggattcccccccctccctgagaatcagccactcgagggcacgtttccgtgtgatttcgcctggggcgtcgttgataactacattcaggtggacacgacgctcagccagtttaccgacttaaacgtgtacctatgggacgtacaccattcgaagcgactgattaaggttgatggcgtggttaccaagaagcgcaaatcttactgtgtggatttcgcggctatacaaccgcagatagctctactgcaggagatgcacgtgacccactttcgtttcagtttggattgggccctcatcctcccactaggcaatcagagccaagtcaatcacacaattctccagtattaccggtgcatggcatcagagctggtgcgagtgaatattaccccagtggtggccctgtggcagccaatggcccccaaccagggactgccgcgactcctggcccggcaaggagcctgggagaacccctacacggccctagcctttgccgagtacgcccgcctgtgtttccaggagctgggccaccacgtgaagctctggattaccatgaatgagccctacacccgcaatatgacatactcagccggtcacaacctgctcaaagctcacgctttggcttggcatgtgtacaatgagaaattccgccacgcgcagaacggaaagattagcattgcgttgcaggccgactggatcgaaccggcctgtccgttcagccagaaagacaaggaagtcgcggaacgtgttctagagttcgacatcggatggctcgccgaacccatattcggaagcggagactatccctgggttatgagggattggttgaaccagagaaataattttcttttgccatacttcactgaggatgagaagaagctgatccagggaactttcgatttcctggccctctcgcattatacaactatactggttgattccgagaaggaggatccgattaaatataacgattatctggaagttcaggagatgacagacataacctggttgaattctcctagtcaggtggctgtggtcccgtggggtctgcgcaaggtcctgaactggctaaagtttaagtacggtgacctaccaatgtacataatttccaatggcattgacgacggtctacacgccgaagatgatcagctgcgtgtgtattatatgcaaaattatataaatgaggccctaaaggcccacattctcgatggcatcaacctgtgcgggtacttcgcatacagttttaacgatcgaacggcgccaaggttcggtctgtatcgctacgctgcagatcagttcgaaccaaaggcctcaatgaagcactatcgtaagataatcgattcgaacggcttcccaggaccggagacgctagaacgtttttgtccggaggaattcaccgtgtgcactgagtgctctttttttcatacccgcaagtcgctgctggccttcatcgccttcctgttctttgcgtccataatctcccttagtttgatattctactattccaagaagggccgccgaagctataaa

SEQ ID NO: 149836 - DNA, 3036 bp, Artificial Sequence
  derived and/or modified sequence
atgcccgcatcagcccccccacgaaggcctaggccaccaccaccaagtctatccctgcttttggtgctcttaggattgggcggtaggaggctgcgcgcggagcctggcgatggagctcagacttgggcacgcttttctcgccccccagcgcctgaagccgctggactgttccagggcacttttccagatgggttcttgtgggcagttggttccgcagcatatcagactgagggcggctggcagcagcacggcaagggggcaagtatctgggatacttttactcatcatccattggcaccgcctggggattcacgcaatgcctctcttcccctcggcgccccctccccgctccagccagccactggcgatgtggcaagtgactcatacaacaacgtgtttcgcgacactgaggcgcttcgagagcttggcgtgacacattacagattcagcatcagttgggcccgcgtactgcccaatggcagcgcaggggtgcccaatagagaaggactgaggtactaccggagactcctggagcgcctacgggagctgggggtgcagccagtggtgacactgtatcactgggatttaccacagcggttgcaagatgcctatgggggatgggcgaacagggcattagcagatcactttcgcgactatgcggagttatgttttagacatttcggtgggcaggtaaaatactggatcactatcgacaacccctatgtcgtagcctggcatggctatgcaactggccgcctggccccggggatacgtggcagccccagactggggtacttggttgcccacaacctccttttagcgcacgcgaaggtttggcacttgtacaacacctcgttccggccaacccaaggcggccaggtgagtatagcacttagctctcattggatcaaccctaggcgaatgaccgatcactcaattaaggagtgtcaaaaatctctggactttgtactcgggtggttcgccaagcccgtgtttattgacggcgattatcccgagtcaatgaaaaataatctttcctcaattctgccagactttacggagtcagaaaaaaaatttattaagggtacagctgacttctttgccctatgctttggtcctaccctgagttttcaactgctggacccgcacatgaagtttcgccaattagaaagtccaaatctgagacagttgctcagctggattgatcttgaatttaatcacccccagatcttcattgtggaaaatggttggttcgtatctggcacaactaaaagggatgatgctaagtatatgtattacctgaaaaagtttataatggagacgctgaaggcaatcaaactggacggagtggacgttatcggctacaccgcttggtcactgatggatggtttcgagtggcacagggggtactccatccgtcggggactattctatgttgatttcctttcccaagacaaaatgttgctcccaaaatcttctgcgctcttttatcagaaattgattgagaagaacggatttcctccactgccagagaatcaacctttggaaggtacgttcccatgtgacttcgcttggggcgtcgtggacaactatattcaagtcgatacgacgctgtctcagtttaccgacctcaacgtgtatctgtgggatgtgcaccactctaagaggctcataaaagtcgatggagtggtaacaaaaaagcgcaaaagctactgtgtggattttgccgccatacagccacagatagccctcctacaggagatgcatgtaacccattttcggttttctctggactgggccctgatactgccgttgggaaaccagtctcaggttaaccatacaatactgcagtattatcgatgtatggcgagcgaattggtgcgtgtgaacattacccctgtggttgctctgtggcagcctatggcgcccaatcaaggcctaccacgtctgctggcacgccaaggggcctgggagaatccttacacagccctggccttcgcagagtatgctcgactgtgctttcaggaactcggccatcatgtgaagctatggatcactatgaacgaaccatatacccgcaatatgacctactctgctggccataatctcctgaaagcacatgcactggcctggcacgtgtataacgagaagtttcggcatgcgcagaatggaaaaatctcgatagccctccaggccgactggatagagcctgcttgccccttcagtcagaaggacaaagaagttgcagagagagtgttggagttcgatatcggttggcttgctgaaccaatctttgggagtggagattacccatgggtcatgcgggattggcttaaccagcggaataacttcctattgccctatttcacagaagacgagaaaaagctcatacagggtacatttgattttctggcactcagtcattacactaccatccttgtggactccgagaaggaggacccaattaagtacaatgactacttggaagtgcaggagatgaccgacatcacatggctaaacagccccagccaagttgcggtggttccctggggactccggaaagtgctaaactggctgaaatttaagtacggggatttaccaatgtatataattagtaatggcatcgatgatggcttgcacgccgaagatgaccagctccgtgtctattatatgcagaattacataaatgaggctctgaaagctcacatactagacggcatcaacctttgcggctatttcgcatattcttttaacgaccggaccgccccgcgattcgggttatacaggtacgctgcagatcaatttgaacccaaggcgagcatgaagcactatcgcaagatcatagatagcaacggtttccctggccctgaaacgttggaaagattttgccctgaggaatttactgtgtgtaccgaatgctcctttttccatactagaaagagcctgcttgccttcattgcttttctcttttttgctagtattatcagcctgtcacttatcttttattactcaaaaaaggggcgccggtcttacaag

SEQ ID NO: 149837 - DNA, 3036 bp, Artificial Sequence
  derived and/or modified sequence
atgccagcatccgccccccctcggcggcctcggccacccccaccttccttaagtcttcttctggttcttctgggcttaggaggacgcaggctgcgcgcagaacccggtgatggcgctcagacttgggcaagatttagtagacctcccgccccagaagctgccggcctcttccaaggaaccttccctgacgggttcctatgggccgtaggatctgctgcatatcaaactgagggaggttggcagcagcacggcaaaggcgcctcaatatgggatactttcacccaccaccccctggctccccccggcgacagcaggaacgcaagcctgcctctgggggctcctagtccactgcaacccgcaaccggagatgtcgccagcgatagttataacaacgtttttcgagatacagaagcactaagggaactgggtgtgacacactatcggtttagcattagctgggcccgggtattaccaaacggctccgccggcgtgccaaaccgggaagggctgagatattaccggcgtctgctggagcgcttaagggagctcggcgttcagcccgtggttacactctatcattgggatttaccacagcgcctgcaggacgcctacggcggctgggccaaccgtgcattggctgatcacttccgcgattatgctgaattgtgcttccggcactttgggggccaagtcaagtactggatcactattgataacccttatgtggtggcctggcacggatatgcaaccggtcggcttgcacctggtattcgcggcagtccgcgactcggctacctggttgcccacaatctgctgctggcacacgccaaggtgtggcacctctataacacttccttcaggcccacccaaggcgggcaggtttcaattgcactgagcagccactggatcaatccacgcagaatgaccgaccattctattaaggaatgccagaagtccctggactttgttctgggttggtttgctaagccagtgtttatcgacggagactacccagaatcaatgaaaaacaatctgagcagcatcttacctgactttacagaatccgagaagaagttcatcaaaggcactgccgacttcttcgctttatgctttggccccacactgtcattccagctcttagacccacacatgaagttccggcagctggagtctcctaatctacggcaactcctgagttggatcgacctggaattcaatcacccacagatattcatagtggagaacgggtggtttgtcagcggcaccactaaacgggatgatgccaaatacatgtattatctaaagaaattcattatggagacactaaaggctatcaagctcgacggagtggacgtgatcggctacactgcctggagcctgatggatggcttcgagtggcaccgtggctactctatacgccggggcctcttctacgtggatttcttatctcaggataagatgctgctgcctaagagttctgctttgttctatcagaaattaatagagaagaacggctttccaccactgccagagaatcagccactggagggaacattcccttgtgactttgcctggggagtggtggacaactacattcaggtggatacaacactctcccagttcactgacttgaacgtgtacctctgggatgtgcaccatagcaaaagattaataaaggtggacggggtggtgaccaaaaaaagaaaatcttactgtgttgattttgccgctatacagccacagatcgccctgctgcaggaaatgcatgtcacccatttccgcttctccctggactgggcactgatcctgcccctggggaaccagtctcaggttaatcacacaattctacaatactaccgctgcatggcctccgagctggtccgtgtaaacattacaccagtggtcgctctctggcagccaatggcccccaatcagggtctgccacgcctacttgctcgccaaggtgcatgggaaaatccatataccgctctagcctttgctgagtacgcccggctctgtttccaggaactcgggcaccacgttaagttgtggattacaatgaacgaaccctatactcggaacatgacttacagcgctggccacaatttactgaaagcacacgcccttgcctggcatgtttataacgaaaaattccgacacgcccagaacgggaaaatatcaattgccctccaggccgattggatcgagccagcttgcccattcagccagaaagacaaagaagtggccgagcgggtcctggagttcgatatagggtggctcgccgagcccatcttcgggtccggggactatccctgggtcatgcgtgactggttaaatcagcggaacaactttcttcttccatacttcaccgaggacgaaaagaagctaatccaaggtaccttcgattttctggctctgtcccactacaccactatcctggtggattctgagaaggaggaccctatcaagtacaacgactacctagaggtgcaagagatgactgacattacctggctgaactcaccaagccaggtggccgtagtcccatggggcctgcgtaaggtcctgaactggctcaagttcaagtacggtgacctccccatgtatataatcagcaacgggatagacgacgggctgcatgctgaggacgatcagctacgcgtgtattatatgcagaattacataaacgaagccctgaaagcccatatcctggacggcattaacctgtgtggctactttgcttatagtttcaacgacaggactgctcctcgctttgggctctatcgatacgcagcagatcaatttgagcctaaggccagcatgaagcattatcgaaagataatagacagcaatggttttcccgggcctgaaaccttagagcggttttgcccagaggagttcaccgtgtgcacagagtgttcctttttccacactagaaagtcactactggcttttattgcatttctattttttgctagtataatatctctcagtttgatattctactactccaaaaagggcaggcgaagctataag

SEQ ID NO: 149838 - DNA, 3036 bp, Artificial Sequence
  derived and/or modified sequence
atgcctgccagtgccccccctagaagaccccgaccccctcctccaagtctctccctacttttagttctcctgggactgggaggaagacgcctaagggccgaaccaggagatggagcacagacatgggcccgattttctagacctcccgcccccgaggccgccgggctgttccaggggacattccccgatgggttcctttgggctgtaggaagtgcagcctatcagactgagggaggatggcagcagcacgggaaaggagcgagtatttgggatactttcacacatcatcctttggctccccctggggattctagaaatgcttcattaccacttggagctccttcacccctccagcctgccacaggagacgtcgcgtccgattcctacaataacgtgtttcgagatacagaagccttgagagaactcggagtgacacactatcggttttctatatcttgggcaagagttcttcctaacggatctgctggagtgcctaaccgagaagggcttaggtactaccggaggttattggaacgattacgggagttgggggtacagccagtagttacactgtatcactgggatctcccccagcggctccaggatgcctatgggggatgggctaacagagcactggccgatcactttagagattatgccgagctttgctttcgccattttggaggacaagtgaaatactggattactatcgacaatccatacgtcgtggcctggcatggatacgctacagggagactggcacccgggattcgggggtcacctagacttgggtaccttgtagctcataatctgctgctagctcatgccaaagtgtggcacctatataacacatctttcagacctactcagggaggacaggtatccatagccctgtcgtcacactggatcaatccacgccgcatgactgatcattccataaaagaatgtcaaaagtctctcgacttcgttcttgggtggtttgccaaaccagtttttatcgatggggattatccagaatctatgaaaaacaatctatcttctatcctgcccgatttcacggagtcagagaaaaaatttatcaaaggaacagccgacttcttcgccctttgttttgggcctactctctcctttcagctactagaccctcatatgaaatttaggcaactcgaatcaccaaacctcagacagctgctcagttggatcgacctcgaattcaaccatccccaaatttttatagtcgagaacggatggtttgtatctgggactacgaaacgcgatgacgcgaagtatatgtactatctgaaaaagtttattatggaaacattaaaagctataaagctggatggggtggatgtaattgggtatactgcttggtctctgatggacgggtttgaatggcatagggggtattctatcaggcgaggactcttttatgtggatttcttaagtcaggacaaaatgctcctgccaaaatcgtccgctctcttttatcagaaactgatcgaaaaaaacgggttccctcccctgccagagaaccagccccttgaagggacatttccgtgtgattttgcttggggagttgtcgataattatatccaggtcgatactacactgtctcagtttactgatcttaatgtgtacctttgggatgtccatcattcaaagcggttgatcaaagtggacggagttgtaacaaagaaaagaaaatcctattgtgtggatttcgctgctatacagccccagattgccctgctgcaggaaatgcatgtaacacactttcgcttttcattagattgggccttaatcctaccccttggaaaccagtctcaggtcaaccacacaatcctccagtattataggtgcatggcctcggaactcgtacgcgtaaacatcactccagtggtcgccctatggcagcctatggccccaaatcagggattgccccgacttctcgctcggcagggggcctgggagaacccttatacagctttagcgtttgccgaatatgccagactctgcttccaggaactgggacaccatgtgaaactgtggattactatgaatgaaccttatactaggaacatgacttattctgcaggacacaatctcctgaaagctcacgccttggcatggcacgtgtacaatgaaaagttcaggcacgcccagaacgggaaaatctccatagccctacaggccgattggatcgagcctgcatgtcctttctcccagaaagacaaagaagtagcagagagagtcctagaatttgatattgggtggttggcggaacctatatttggatctggagattatccctgggtaatgagggattggttgaaccaaaggaacaatttcctactcccatatttcacggaagacgaaaaaaaactgatccaggggacttttgatttcttagccctttcccattacactacaatccttgtagatagtgaaaaagaagatcccatcaagtataacgattatcttgaagtccaggaaatgacagatattacttggttgaacagtcctagtcaggttgctgtcgtgccttggggactgcggaaagtgttaaactggctgaaattcaaatacggggatcttccaatgtatatcatcagtaatggaattgatgatgggttgcacgctgaagatgatcagctgcgggtgtattatatgcagaactatataaatgaagctctgaaggctcatatcttagatgggatcaacctctgtgggtactttgcatattccttcaacgatcggactgccccacggttcgggctctacaggtacgcagcagaccagtttgaaccaaaagcatctatgaagcactatcggaaaatcattgattctaacggattccccggaccagaaacactcgagaggttttgtcctgaagaatttacagtgtgtacagaatgttccttttttcatactagaaaatcattattagcttttatcgcgtttctattcttcgcctccataatctctttgtcacttatattttactattcgaaaaaagggcggcgctcctacaag

SEQ ID NO: 149839 - DNA, 3036 bp, Artificial Sequence
  derived and/or modified sequence
atgcccgcctccgcacctcctcgccgaccccgcccaccacccccgtccctcagtctgttgctcgtcctgctggggttagggggaagaagattgcgtgccgagccaggagacggagctcagacgtgggcgagattttccaggcctcccgcaccagaggccgctggtctttttcagggcacttttccagatggcttcctctgggctgtgggttctgcggcttatcagacagagggcggatggcagcagcacgggaagggggcaagcatctgggacaccttcacccaccatcccctggctcctccgggagacagtaggaatgccagtcttccgctgggcgcaccatcgccattacaaccagccactggcgacgttgctagtgactcttacaataacgtgttcagagatactgaggctttgcgcgaattaggggtgacgcattaccgcttctccatttcttgggcccgggttctcccaaacggaagcgctggcgttcccaaccgggaaggacttaggtattataggcggttgctggaaaggttgagagaactcggcgtccaacctgtggtgacattgtatcactgggaccttcctcagcgactgcaggacgcatatggaggctgggctaatcgcgctctggccgaccattttagggactacgccgaactttgttttagacattttggaggccaggtcaagtattggatcaccatagataacccatacgtggtggcttggcatggttacgctacggggagactggctccggggattagaggatcaccccgcttaggatatctggtcgctcataacctgctcttagcccatgccaaagtgtggcatctgtataatacctccttcagaccgacgcagggaggccaggttagtattgccctgtctagccactggattaatccgcggaggatgacagatcacagtatcaaagaatgtcagaaatcactggacttcgttctggggtggtttgccaagccagttttcatcgatggcgattaccccgagtccatgaagaataacctctcttcgatcctgcccgacttcactgaatcagagaagaaatttattaagggaacagccgacttcttcgctctctgcttcggccctaccctctcatttcagctgcttgatccgcatatgaaattcagacagctcgagagccccaatttgcggcaactgcttagctggatcgacctcgagttcaatcatccgcagatatttatcgtggagaacggctggttcgtgagtggtacgaccaagcgggatgacgccaagtatatgtattaccttaagaagttcatcatggaaaccctgaaggccataaagctcgacggagtagatgtaattggctacacagcttggagtctcatggatggcttcgagtggcacaggggttattccatacgccgtggcctgttctacgttgacttcttgtcgcaggataagatgctgctccccaagtcctcagcccttttctaccagaaactgattgagaaaaatggattccctccccttcctgagaatcagcccttagagggcacctttccctgcgatttcgcctggggtgtggtcgacaactacattcaggtcgacacaacgctgtcacaatttacggacttgaatgtatatctctgggacgtgcaccactcaaagcgcctgatcaaagtggatggcgtggtaaccaagaaaaggaaatcctactgtgttgacttcgccgctatccaacctcagatcgcgctgctgcaagagatgcatgtcacgcatttcaggttttctttggactgggctctgatactgcccttgggtaaccaatcgcaggtgaatcacaccatcctgcagtactaccgctgcatggccagtgaactggtgcgagtgaacattacacccgtagttgccctatggcaacctatggctccaaaccagggacttcctaggctgttggcccgccaaggcgcatgggagaatccatataccgcgcttgcgttcgctgaatatgcaaggctttgttttcaagaactggggcaccacgtgaaactctggatcaccatgaacgaaccttacacacggaacatgacgtactccgccggacataacttgcttaaagctcacgccttagcatggcacgtatataatgagaaatttcgccatgcccagaacggtaagatctcaatcgcccttcaggctgattggatagagccggcctgtccgttcagccaaaaggataaagaagtggcagagagggtactggaattcgatatcggatggttggccgaacctatctttgggagcggggattacccatgggtgatgcgagactggttaaatcagcggaacaacttcttactcccctatttcactgaggatgagaagaaactgatccagggtactttcgatttccttgcattgagtcattacaccaccattttggtcgatagcgaaaaagaggatccaattaagtataatgattatctggaggtacaagagatgaccgacattacctggcttaatagcccatcccaggtggcagtggtcccttggggcctgagaaaggtgcttaattggctgaagttcaaatatggggacctgcctatgtatatcatctcaaatggcatcgatgacgggctgcacgctgaagacgatcagcttagggtttactatatgcaaaactatattaatgaggcattgaaagcccacatacttgacggcattaacctctgcgggtacttcgcatatagcttcaatgaccggaccgcgccaagattcggcctgtatcgatacgcggcggaccaatttgagcccaaggcgtcaatgaagcactaccggaaaataatcgactcaaatggattccctggcccagaaactttggaaagattttgtcccgaggaatttaccgtctgtaccgagtgctcattctttcacacacgaaaatcattgctggcctttatagccttcctgttctttgctagtattatatctctatctctcatcttttactacagcaaaaaagggaggagatcttataag

SEQ ID NO: 149840 - DNA, 3036 bp, Artificial Sequence
  derived and/or modified sequence
atgcccgcaagtgcaccaccacgtagaccacgaccaccacccccttcgctgtccctcctgctagtattactcggcctggggggccggagactgcgtgccgaacccggtgatggtgcgcaaacctgggccagattcagtaggccaccagcccccgaggcagctggtttgtttcagggcacgtttccagacgggtttctctgggcggtaggcagcgccgcttatcagaccgaaggcgggtggcagcaacacggaaagggggcctccatttgggacacattcacccatcaccctctcgcacccccgggggattcccgcaacgcgtccctgcccctaggtgccccatcacccttgcagcctgctaccggtgacgtggcctcagactcctacaacaacgtgttccgcgacacagaggctctacgcgagcttggcgtgacccactatcggttctctatcagttgggcccgggttctccccaacgggagtgccggggtgccgaatagagaaggcctccgatattatagacgcctgctcgaaaggcttagagaactgggcgtgcagcctgtagttacgctgtatcattgggatttgccgcagcgtctacaggatgcctacggtggttgggcaaatcgcgccctggcagaccatttccgcgactacgcagaactctgcttccggcatttcggtgggcaggttaaatattggattactattgataacccgtacgtggtggcttggcacgggtatgctactggtagactggcgcctgggatccgaggatccccacgcctcggatatctcgtggctcacaatctcctgctggcgcacgccaaggtatggcacctgtacaacacttccttcagacccacccagggaggacaagtgtccatcgcactgtccagccattggataaaccccagaaggatgacagaccatagcattaaggaatgccagaagtctctagactttgtactgggttggttcgccaagccggtcttcatagacggtgattaccctgaaagtatgaaaaacaatctctcctccatactcccagattttaccgagtccgagaaaaagttcattaagggaaccgccgatttcttcgccctgtgcttcggaccgactttgtctttccaattactagatccacacatgaaatttcggcagttggagtctcccaacctgcgccagctgctctcgtggatcgatctcgagtttaaccacccccagattttcattgttgaaaatgggtggtttgtgtccgggactacaaagagggacgatgcgaagtacatgtattacctaaaaaaatttatcatggaaaccttgaaggccattaaactcgatggagtggatgttatcggttacactgcttggtccctgatggatgggttcgaatggcatcgcggctattctatccgtcgcggcctgttttacgtcgattttctgagtcaagacaaaatgctcttgcctaagtcttccgccctcttttatcaaaaattaattgagaaaaacgggttcccacccttgcccgagaatcagcccctggagggcacatttccttgcgattttgcctggggtgtggtggataattacattcaggttgatacgaccctttcacagtttacggatcttaacgtctacttgtgggatgtgcaccatagcaagaggctgatcaaggttgatggcgttgttactaagaaaagaaaaagttattgcgttgacttcgccgctatacagcctcagatcgcactgctgcaggagatgcacgtaacacacttccgcttttctcttgattgggcccttatcttgcccctgggtaatcagagccaggtgaaccatactattctgcaatattatcggtgtatggcctctgaacttgtccgggtcaacattacaccagtcgtggctctctggcagccaatggctcccaatcaaggcctaccaagactgcttgcacgacaaggtgcctgggagaatccctacaccgctctagcttttgcggagtatgctcgcctctgcttccaggaactcggccatcacgttaagttgtggatcacaatgaatgagccgtatactaggaatatgacttattccgctggacataacctgctcaaagcccacgccttagcttggcacgtttacaatgagaagttccgccacgctcagaatgggaagatctcaatagccttgcaggcggattggatcgaaccggcttgccccttctctcaaaaggataaggaagtggcagaacgcgtgctcgaatttgacattggttggctcgcagaaccgatattcgggtcaggcgactacccttgggtcatgcgggattggctgaaccagcgtaacaattttctccttccatactttaccgaagacgagaagaaattaattcagggcacatttgattttcttgcattgagccattataccactattctggtcgacagtgagaaggaagacccaatcaaatataacgattacctcgaagtgcaggaaatgaccgacataacctggctgaatagtccaagtcaggtcgccgttgtcccctggggcctacgcaaggtgctcaactggctgaagttcaagtatggcgacctgccaatgtatatcatctcgaacggaattgatgacggcctgcacgccgaggatgatcagctgcgagtgtactacatgcaaaactacattaatgaggctctaaaggcccacatcctagatggcatcaacctatgcggctacttcgcatactcattcaatgaccgtaccgcccctaggtttgggctttatcgttacgcagccgatcaatttgaacccaaagccagtatgaaacactaccggaaaatcattgactcaaatggattccctggtcccgaaacacttgaaaggttctgccctgaagagtttaccgtgtgcactgagtgttctttctttcacacccgaaaatctttactcgcgttcattgctttcctttttttcgcctccataattagtctctcgctgattttttattactccaagaaggggcggcggagctacaaa

SEQ ID NO: 149841 - DNA, 3036 bp, Artificial Sequence
  derived and/or modified sequence
atgccggcttcggccccaccgaggcgcccacgtcctccgcctcctagcctcagcttgcttctagtgttgcttggcctaggtggtagaagattgagagccgaacctggagacggagcacagacctgggccaggttcagccgcccccctgcacctgaggccgccggtctgtttcaagggacctttcctgatggatttttatgggctgtcggctctgcagcctatcaaacagagggaggatggcaacaacatggaaagggagcctctatctgggacaccttcacgcaccaccctcttgcacctcctggggactccaggaacgccagccttcccttgggcgcccccagtcctctgcaacctgctaccggagatgtagccagcgatagctataacaacgtgtttcgggacacagaggcgcttcgggagcttggagtgacacattaccggttttccatctcatgggctcgggttctgccaaacggctcagcaggagttcctaacagagaaggcctgaggtactatagaagattgcttgagagattgagggaactcggcgtccagcccgtggtgacgctttatcattgggacttgcctcagagacttcaagatgcttatggcggttgggccaaccgcgcacttgccgatcacttccgggattacgcagaactatgttttagacactttggaggccaagtgaagtactggattacaattgacaatccatacgttgttgcctggcatggatacgctaccggcagactggctccaggcatcagagggtctccgaggctcggatacctggtggctcacaacctcctgctggctcacgctaaagtttggcatctgtacaacacttcatttaggcctacccaaggaggacaggtttccatcgccctgtcaagtcattggattaacccaaggcgtatgaccgaccacagcatcaaggagtgccagaaatctttggacttcgtgttgggctggtttgccaaaccagtgtttattgatggggattaccctgagtccatgaaaaataacctgagttcaatcttgcccgacttcacagagtcagagaagaagttcatcaagggcaccgctgattttttcgcgctttgttttggccccacacttagcttccaactgttagatccacatatgaaattcagacagttggaatcgcctaatttgagacagctgctgagttggatcgacctggagtttaaccacccacagatcttcatcgtggaaaatggatggttcgtgtctggaactacaaaacgcgacgatgccaaatacatgtactacctcaagaaatttattatggaaaccctgaaagctatcaagttggacggagtagatgttattggctacacggcatggtctttgatggatggctttgaatggcaccggggctattccatccgcaggggtctattctacgttgactttctaagccaggataaaatgcttctccccaaaagcagtgccctcttttaccagaagttaatcgagaaaaatggctttcctccccttccggagaatcagccacttgagggaacatttccctgtgattttgcttggggcgtcgtcgataactatattcaagtggacaccacactgtcacaattcacggatctgaatgtgtacctgtgggatgtgcaccattccaagaggcttataaaggtggatggggtggtcaccaagaaaaggaagtcttactgcgtcgacttcgcagcgatacagccacagattgctctcctgcaggaaatgcacgtaacacattttaggttttctctagactgggctctgatactgcctcttggaaatcaatcccaagttaatcacaccatcctccagtattacaggtgcatggcttcagaactggtgagagtaaacattacaccagtggtagcactgtggcaaccaatggctccaaatcagggactcccgagattactggctcggcagggcgcttgggagaacccttataccgctttagctttcgccgaatacgccagactgtgcttccaagaactgggccaccacgtgaaactgtggatcactatgaacgagccatataccagaaatatgacttatagcgccggccacaatctgctcaaagcacacgcgctggcttggcacgtctacaacgagaaattcagacacgcgcagaatgggaagatctcaatcgcccttcaggccgattggatcgagccagcatgtccctttagccagaaggataaggaagtggctgagcgggtcctggagttcgacatcggctggctggccgaacccatcttcggatccggtgactacccttgggttatgagagattggctgaaccaacgcaacaactttctcctgccctactttaccgaggacgagaagaagctgattcagggaacctttgatttcttggctctttctcattatactaccattctcgtagactcagagaaggaagaccctattaagtacaacgactacctggaggttcaggaaatgaccgacataacttggctgaacagccctagtcaagtcgccgtggtcccttggggattgcgcaaggtcctgaactggctgaagttcaaatatggggacttgccgatgtacattattagcaacgggatcgatgacggtctgcacgcagaggatgaccagttgcgggtttattacatgcaaaactacattaacgaggctctgaaggcacatatcctcgacggaattaacctctgcgggtattttgcgtacagctttaacgaccggacagcgcctaggttcggcctctaccgctacgcagccgatcagttcgagccgaaagccagcatgaagcattacaggaaaatcatagattccaatggattcccgggcccagaaacccttgagagattttgtcccgaggagttcacagtctgcaccgaatgcagttttttccacaccaggaagagcctgctggcatttattgcttttctcttttttgccagcattatcagcctcagcttaatcttttactacagcaagaaaggcaggagaagctacaaa

SEQ ID NO: 149842 - DNA, 3036 bp, Artificial Sequence
  derived and/or modified sequence
atgcccgcttctgcccctccacgccgcccgcgccccccaccgccttcactgtcccttctactcgtactcctggggctaggaggcagacgcctccgtgccgaaccaggcgacggcgcccagacatgggctcgattctccagacctcccgctccagaggcggccgggctttttcaggggacgtttccggacggttttctttgggccgtggggtccgccgcctaccagacggaaggagggtggcagcagcacggaaaaggagcgtctatttgggacacctttactcaccatcctttggccccgccaggagattcccggaatgcttctctccccttgggtgccccttcaccactgcagcccgccactggggatgtggccagcgactcttataataacgtgttcagagatacggaagcactcagggagcttggtgtcacccattaccgcttttctatttcatgggctagggttttgcctaatgggtccgcaggggtccctaatcgcgagggactgagatattatagacggctactcgagcggcttcgagaactgggcgtacagccagtggttacattgtatcattgggatttgccacaaaggttacaggacgcatacggtggctgggcgaacagagccctggccgatcacttcagagactatgccgagctgtgttttcgccacttcggcggacaggtcaaatactggataactatcgacaacccgtatgttgtcgcgtggcatgggtacgccaccggccggctggctccaggcatccggggcagtcctaggctgggatatttggtggctcacaatctgctcctggctcacgcaaaagtctggcacttgtacaatacgagcttccgtccgacgcaaggagggcaggtctccatcgccttgtccagccactggatcaatcctagaagaatgactgatcattcaatcaaagagtgtcaaaagtctctggactttgtgttgggctggttcgccaaacctgtgttcatcgacggcgactacccagagtctatgaaaaacaatctctcatcaatcctacctgacttcaccgaatccgaaaaaaagttcatcaagggaacagccgattttttcgctctgtgctttggacctacattgtccttccagttgctggacccgcacatgaaattccgccagctggagtccccaaatttgaggcagctgttaagctggatcgacctagaatttaatcacccgcagatcttcattgtagaaaacggttggtttgtctcgggcaccacaaaacgagatgacgccaagtacatgtactatctgaaaaaattcatcatggagacactcaaggccatcaagctggacggcgtcgatgtgatcggctatacagcctggtctctgatggatggcttcgaatggcaccgggggtacagcattcgacgcgggcttttctatgtggatttcctgtcccaggataagatgcttctgccaaaatccagcgccctgttttaccagaagcttatagagaagaacggttttccccctctccccgagaatcaaccacttgagggcacttttccctgtgactttgcgtggggagtcgtagataactacattcaggttgatacgacgctgagtcaattcactgacctcaacgtctatctgtgggatgtgcaccatagcaaacggctgatcaaagtggatggggtagtgacgaaaaagcggaagagctattgtgtagacttcgccgctatccagccacagatcgctctcctccaagagatgcatgtcactcatttcaggttcagcttagactgggcactgatactgcccctcgggaaccaatctcaggtcaatcacactattctccagtactaccgctgcatggcttcagaacttgtgagggttaacattactcctgtggtggctctgtggcagccaatggcgcccaaccagggactccctcgcttgctggcccggcagggggcgtgggagaacccttatacggcactggccttcgcagagtacgctcgactgtgttttcaggagcttggtcaccacgtgaagttatggatcacgatgaatgagccctacaccaggaacatgacttactctgcgggacacaacctgttgaaggcgcacgccttggcgtggcacgtgtacaatgagaagtttcggcacgcccaaaacgggaagattagtatcgccttacaggccgactggattgaacctgcatgcccatttagtcagaaagacaaggaagtggctgagcgcgtcctggaattcgatatagggtggctagcagaacctatatttggcagcggagattatccttgggttatgcgagactggctgaatcaacgtaataatttcttgctgccgtacttcacagaagacgagaagaaactgatccaaggaacgtttgatttcctcgccctgtcccactatacaaccattttggtcgatagcgagaaagaagaccccatcaagtacaacgactaccttgaagttcaggagatgacggacattacctggctgaattccccttcccaagtcgccgtagtgccatggggcctgcgaaaggtgttaaactggctcaagttcaagtatggagatttgcccatgtacatcatcagcaatggaattgacgatggactgcatgctgaagacgaccagctgcgagtgtattatatgcaaaactacataaacgaagccctgaaggcacatatcttggacggcatcaatctgtgcggctacttcgcctactcttttaacgacagaaccgcgcccaggttcggactgtacagatatgccgcagaccagttcgagcccaaagcttctatgaaacattaccgcaaaatcatcgattcaaacggctttcctgggccagaaaccctggaacgcttctgccccgaggagtttactgtgtgcaccgagtgcagttttttccacacccgcaagtctctgctggcctttattgctttcctattctttgctagcatcatatccctgtcactgatattttattattcaaaaaagggtcggagaagttataag

SEQ ID NO: 149843 - DNA, 3036 bp, Artificial Sequence
  derived and/or modified sequence
atgccagccagtgcgccccctcgcaggccacgccccccccctccctcactcagtctccttttggtgctgttgggtctcggcggcagaaggcttagagctgagcctggggatggggcacagacctgggccagattttctaggcctccagcaccagaagccgcgggactctttcaggggacatttccggatggttttctgtgggccgtcgggtcagcagcctaccagactgagggaggttggcagcagcatggcaagggcgccagtatttgggatacatttacacatcatccgctcgcgccacccggggacagtagaaacgctagtctgcctcttggtgctcccagtcccctgcagccggctaccggtgacgtcgcgagcgacagttacaacaatgttttccgggatactgaggcactccgcgagctgggggtgacacactatcggttctcaatctcttgggcccgggtgctcccgaatggctccgccggcgttccaaaccgagaaggccttagatattataggagactccttgagaggttgagagaactgggtgttcagccagtagtgacactgtatcattgggacctcccacagaggctgcaggacgcctatgggggatgggcaaaccgggctctggccgaccacttccgggattacgctgaactgtgtttccgccactttggcggccaggtgaaatactggattaccatagataacccatacgttgtggcctggcatggctacgctaccgggcggctggcccctggcatcagaggatcaccgagattggggtatcttgtggcacacaatcttctgctggcacacgccaaggtgtggcatctgtacaataccagcttccggccgacacaggggggtcaggtgtctattgcactcagctcccactggattaatccaagacgcatgactgaccacagtattaaggaatgccaaaagtccctcgattttgttctggggtggttcgccaaacccgtgttcattgacggagattaccccgaatctatgaagaataatctgagcagcattctgcctgatttcaccgaatccgagaaaaagttcatcaaggggacagccgattttttcgctttgtgttttgggccaacgttgtcatttcagctgctggatcctcacatgaagtttcgccaactggagtcccccaatttgaggcagctgcttagctggatagatttggaatttaatcacccccagatttttatcgtagaaaatggctggttcgtcagtgggaccactaagagagacgatgccaagtacatgtattaccttaagaagttcatcatggaaaccctgaaggcaatcaagctcgacggcgtagatgttattggctacacagcatggagcctgatggatggcttcgagtggcaccgaggttacagtattcgccggggattgttttatgtggattttcttagtcaagacaagatgttgctgcccaagtcctccgccttgttctaccaaaagctcatagagaaaaacggtttccccccactccccgagaatcagccactggaagggacctttccctgtgattttgcctggggagtggtggataactatatccaagtcgatactacgctgagccagtttacagacctcaatgtgtacctctgggacgtccaccacagcaaaaggctgattaaagtggatggagttgtaaccaagaaaagaaagagttactgtgtggatttcgctgcgatccaaccgcaaatcgcattgttgcaggagatgcacgtgactcattttaggttttctctggactgggccctgattctccctttggggaatcagagccaggtcaaccacaccatactccaatattacaggtgtatggcttctgaacttgtcagggtgaatattacaccagtcgtggccctgtggcagccaatggcccctaaccagggcctccctcggctgttggctcgccagggggcatgggaaaacccatacacagctcttgctttcgcagagtacgctcgactgtgtttccaagaactgggacaccatgttaaactctggatcaccatgaacgaaccatataccagaaatatgacgtattcagctgggcataatctgctgaaggctcatgcactggcttggcatgtgtataatgagaaattccgccacgcccagaatgggaagatcagcatcgctttgcaggccgattggatcgagcctgcctgcccattcagccagaaggacaaggaggttgccgaacgcgtgctcgagtttgacatcggatggctcgctgagcctatttttggttctggggattacccatgggtgatgagggattggctgaaccaaaggaataactttctcctgccttactttactgaggacgaaaaaaaactcatccaaggaacatttgacttcctcgccctgtctcactataccaccattctggtggactctgaaaaggaggaccccattaaatacaatgactacctcgaggtgcaggagatgaccgatattacgtggttgaacagtccatcacaggtcgccgtggtaccatggggacttagaaaggtgctcaattggctgaagtttaaatacggggacctgcccatgtacatcatttcaaacggaatagacgatggcctccacgcggaggatgatcagttgagggtgtactatatgcagaactatataaacgaggccctcaaggcgcatatcctggacggtataaatctctgtggctacttcgcatattcttttaatgaccggactgccccccgcttcggtctctatcgctacgccgcagaccagtttgaacccaaagcaagcatgaaacactacagaaaaatcatagacagcaatggatttcccggcccggagaccctggaaagattctgccccgaggaatttacagtgtgtacggaatgttcctttttccataccagaaagtctctgctggcattcatcgcttttctgttttttgcatctattatcagtctctccctcatcttttactacagtaagaagggaaggcggtcttacaaa

SEQ ID NO: 149844 - DNA, 3036 bp, Artificial Sequence
  derived and/or modified sequence
atgcccgccagtgcccctccgagacgtcccaggcctcctccgccctcactgagcctccttctcgttttgctgggcctgggtggcaggcgcctgcgcgccgagcccggcgatggcgcacagacatgggcccggttcagccgcccaccagcccctgaagctgctggactgttccaggggactttcccagatggctttctgtgggccgtgggcagcgctgcctatcagacggaggggggttggcagcagcacgggaaaggcgcaagcatctgggatacttttacacaccacccactggccccaccgggagattcccggaacgcatccctccctctcggcgccccctccccgctccagcctgctacgggggatgttgcgtctgatagctataataatgtctttcgggataccgaggctctccgcgagcttggggtcactcactatcgcttcagcatcagttgggcgcgcgtattgcctaacggatccgctggtgtcccgaaccgggaaggcctgcgctattaccggaggcttcttgagcgactgcgagaactaggcgtgcagcctgtggtgaccctctatcactgggatctcccacagcggctacaggacgcttatgggggatgggccaacagagctctggcagaccatttccgggattatgccgaactctgttttcggcacttcggaggccaagtgaagtattggatcacaattgataacccatacgtagtggcctggcacggatacgccactggcagattggcaccgggaatccggggcagtccccgcctaggctatctggtcgctcacaatctgctgcttgcccacgccaaggtgtggcatctgtacaacacaagttttcgacccacccagggtgggcaggtgtctatagctctgagttcgcactggataaacccaagacgcatgaccgaccattcaattaaggagtgtcagaaatctttggatttcgtgctgggttggtttgccaagcctgtgttcatcgatggggattaccccgaatcaatgaaaaataacctaagttctatactccctgattttactgaaagcgaaaaaaagttcataaagggcaccgctgatttttttgccctgtgcttcggacccacactcagtttccagctgttggacccccacatgaagtttcggcaactggaatcacctaatctccgtcaactcctcagttggatcgatctggaattcaaccacccacagatttttatagtcgaaaacgggtggttcgtgtccggcacaactaagagggatgacgctaagtatatgtactacctgaaaaaatttattatggagacgctcaaggcgattaaactggatggcgtggacgtgatcggatatacggcatggagtttgatggatggattcgaatggcaccggggttatagtatccggagaggcctgttttacgttgactttctgtcccaggataagatgttactcccaaagagctccgccctcttttaccagaaactgatagaaaaaaacggctttccgcctctccctgaaaaccagccattggaaggcaccttcccctgcgatttcgcttggggcgtggtcgataactatattcaggtggacaccacactgtcgcagttcacggaccttaatgtttacctatgggatgtgcatcattcgaagaggctgatcaaggttgatggagttgtgaccaagaagcgcaagtcttactgcgttgactttgcagcaattcagcctcagatcgccctacttcaggaaatgcacgtaactcattttaggttctctttggactgggccctgattttgcccctcggtaatcagagtcaggtgaatcacaccatccttcagtactaccgatgtatggctagcgaacttgtgagggtgaatattaccccagttgtcgctttatggcagcctatggctccaaaccagggcctcccacggctgctggcccgccagggcgcttgggagaacccctataccgctctagcgttcgccgagtacgcgcggttgtgctttcaagaacttggacatcatgtcaaactctggattacgatgaacgaaccatatactcgtaatatgacttacagtgccggccataacctgttaaaggcccatgcacttgcctggcatgtgtacaatgaaaagtttagacacgctcagaacggcaaaatttccatcgccctgcaggctgactggatagaacccgcgtgccctttcagccagaaggataaagaggttgctgaacgggttctcgaattcgacatcgggtggctagctgagccaatattcggctctggcgactatccctgggtaatgcgagactggttgaaccagagaaacaactttctgctgccctattttactgaagacgagaaaaaactaatccagggcacctttgatttcttggccctttcacattacaccaccatcttggtcgatagtgagaaagaggacccaatcaagtacaacgattatctcgaggttcaggaaatgaccgacatcacctggctgaatagtccctctcaagtggcagtggtcccctggggactgagaaaggttctgaactggctaaaattcaagtatggcgacttgccaatgtacatcatttctaacgggatcgatgacgggctacacgcggaggatgaccagctgagagtgtactacatgcagaactatattaatgaggccctaaaagcccatatcctggatggaatcaacctctgcgggtattttgcctattcgttcaatgaccgaacagcgccaaggttcgggctttatagatatgcagctgatcaattcgagcctaaagctagcatgaagcattatagaaagatcatcgactctaatggttttccgggacccgaaaccctggaacgcttctgcccagaagagtttacagtgtgcacggagtgcagtttctttcacacccgcaaatctctgcttgcttttattgcctttctctttttcgcgagcattataagtctgtctctgatattttactattccaagaaaggccggcgctcgtataag

SEQ ID NO: 149845 - DNA, 3036 bp, Artificial Sequence
  derived and/or modified sequence
atgccagcatccgcccctccccggaggccccgcccgccccccccatctttatccctattgttagtgttgcttggactaggagggcggaggctgagggccgaacccggggacggggcccagacatgggcccgcttttctcggcctccagctcccgaggccgcaggactatttcaggggactttccctgatgggttcctttgggccgtcggatcagccgcatatcagacagaaggagggtggcaacaacacggaaaaggggcttcaatctgggatacatttactcaccatcccctcgccccccctggagattcacgtaacgcatccctgcctctaggggccccctcacctctccagcccgcaacaggagatgtggcttctgactcatataacaacgtgttcagggatacagaagctctccgggaacttggggtgacacactatcggttctctatctcatgggcgcgggtcctcccaaacgggtcagccggagtacctaacagggaagggctacggtattatcgaagactccttgaaagactgagggaactcggggtccagcctgtagtgacactttatcactgggatctccctcagcgcttacaggatgcttatgggggatgggcaaaccgggccctcgctgatcatttcagagattatgcagaattatgctttcgacatttcggaggacaggtgaaatattggatcacaatagataacccatatgtcgtggcatggcatgggtatgccacaggaaggctagcacctgggatacgagggtccccacggcttgggtaccttgtggctcacaatctcctcttagctcatgcaaaagtgtggcacttgtataatacttctttccgccccacacagggagggcaggtgtccatagctctatcctcgcattggattaatccaagacgcatgacagaccattctatcaaagagtgtcagaaatcattggactttgtgctggggtggtttgctaaaccagtcttcattgatggagattaccctgaatccatgaaaaataatctttcttcaattcttccagattttacggaatctgaaaagaaattcataaaaggaactgccgactttttcgcactatgcttcggacccacactgtcgttccagctgctggatccacatatgaagtttaggcagctggaatctccaaatctgcgccagcttctctcctggatcgaccttgagtttaatcatccccagatctttattgtagagaatggatggttcgtatcagggactacaaagcgagatgacgcgaaatatatgtactatcttaaaaagttcatcatggagacactgaaagctatcaaactggacggggtcgatgtgatcggatatacagcttggtctctcatggatggattcgaatggcatcgagggtatagtataagacgggggctgttctacgtagattttcttagtcaggataagatgctcttgccaaagtcttccgctctgttctatcagaaactaatcgaaaaaaacggatttcctcctctgcccgaaaatcagccacttgaagggactttcccctgcgatttcgcatggggagttgttgacaattacatccaggtggatacaactctaagtcagtttacagatctgaacgtctacttgtgggatgtacatcactctaaacggctcataaaagtggacggagtggtgacaaagaaaaggaaatcgtattgtgttgatttcgccgctatccagccacaaatagcccttcttcaggaaatgcacgtgacacattttcggttcagtcttgattgggccctgatcctgcccctaggaaaccagtcacaggtcaatcacactatcctccagtactatagatgtatggcctcagaactggtaagggtgaacatcactccagtggtggctttgtggcaacctatggctcctaaccagggactccctagacttctagcccggcagggagcttgggaaaatccttatacagcccttgccttcgcagagtatgccaggctttgcttccaagaattgggacaccacgtgaaactctggatcactatgaacgaaccctatacacgcaatatgacttattccgcaggacacaatctcctaaaagctcatgctcttgcatggcacgtttataatgaaaaattcagacatgcacagaacgggaaaatttctatagccctccaggcagattggatcgaacccgcttgtccattttctcagaaggataaggaggtggccgaaagagtactggaattcgatataggatggctagcagaaccaatctttggatctggggattatccttgggtaatgagggactggcttaaccagcgcaacaacttcttgttgccttattttactgaagatgagaaaaaattgatacaggggacattcgacttccttgccctctcacactacactacaatattagtcgattcggagaaagaggatcctatcaagtataatgattatctagaagtccaagagatgacagatatcacatggttgaactctccctcccaggtagccgtggtcccttgggggctacggaaagtcctcaattggctcaagttcaaatacggggatctgcctatgtatataatatctaacgggatagatgacggactacacgccgaggacgatcagctcagggtatattacatgcagaactacatcaatgaggccctgaaggctcacattctcgatggaattaacttatgcggatattttgcgtattcgtttaacgatcggactgcccctcgctttgggctgtatcggtacgctgcagatcagttcgaacccaaagcttcaatgaagcattacaggaaaatcatagattctaacgggtttccagggccagaaactctcgaaaggttctgtcccgaagaatttacagtatgtactgagtgttccttttttcatacacgcaaaagtctcctcgccttcatcgcgttcctcttcttcgcgtctattatcagtctgtcactgatcttctattattctaaaaaagggcggcggtcctataaa

SEQ ID NO: 149846 - DNA, 3036 bp, Artificial Sequence
  derived and/or modified sequence
atgccagcctctgctccgccgagacgcccaaggccacccccgccgagcctgtcgctgctcctcgttctgctaggcctgggcggtcgcaggttacgtgccgaaccaggtgatggggcccagacttgggctaggttttcacgccctccggcaccagaggcggcaggtcttttccagggtactttcccggatggttttctgtgggctgttggtagcgcggcataccagacagagggaggctggcagcagcatgggaagggggcatccatctgggatacttttactcaccacccgctggcgccgccaggagactcacgcaacgctagcctgccgctgggcgcaccgagcccgctgcaacctgcaaccggcgacgtggcctctgactcatacaacaacgtatttagagataccgaagcactgcgcgagctgggcgtgactcattaccgtttttccatttcctgggcacgcgtactgccgaacgggtcagcgggcgtaccgaatagagagggactacgttattacaggcgcctgttagaacgcctgcgggagctgggcgttcagccggtagtcacactatatcactgggacctgccacaacgcctgcaggacgcctatggcgggtgggcgaatcgcgcactggcagatcacttccgcgactatgcggagctgtgttttagacactttggtggtcaggtgaagtactggataactattgataatccatatgtggtggcatggcatgggtatgccacgggtcgactggctccaggcatcaggggatccccacgactggggtaccttgtggcacacaatctactgctggctcacgctaaagtgtggcacctctataataccagtttccgtccaacgcaaggaggacaagtgtcgatagcgctgtccagccactggattaacccgagacgcatgaccgaccattccattaaagaatgccagaagagcctcgatttcgtcctgggttggtttgccaagcctgttttcatcgacggcgactacccggaaagcatgaaaaacaatctgagctccattcttccagatttcaccgaaagcgagaagaagtttattaaaggtactgccgatttcttcgcgctctgtttcgggccaaccctgagcttccagctgctcgacccgcatatgaagtttcgacaactggaatccccgaacctacgacagctgctaagctggatcgacctagaattcaaccatcctcagatctttatagtggagaacggttggttcgtgagcggcaccactaagagagacgacgccaaatatatgtactatctcaagaagtttatcatggaaactctgaaagcaataaaactggacggcgtggatgttatcggctataccgcatggagcttaatggacggctttgaatggcaccgcgggtatagcatccggcgggggctgttttacgtcgacttcttgtcccaggacaaaatgttgctgccgaaaagcagcgccctcttctatcagaaactgattgagaaaaacggttttccaccactgccggaaaaccaaccgctcgaagggacctttccatgtgattttgcatggggtgtggtggacaactatattcaagtggacaccaccctgagtcagttcactgacctgaacgtttacctgtgggatgtgcaccatagcaagcgcctgataaaagtagacggcgtggtcaccaaaaaacgcaagagctactgtgtcgactttgccgcgatccagccgcagatcgcccttttacaggaaatgcatgtcacacacttccgcttcagcctcgactgggccctgatcctaccactgggtaaccagtctcaagtcaaccacaccattctgcaatattaccggtgcatggcaagcgagttggtccgagttaacatcacaccggtagtggcgctgtggcagcctatggcgcctaaccaaggtctgccaaggcttctggcaagacagggtgcttgggagaatccctataccgcattggctttcgcggagtatgccaggctgtgctttcaggaattgggccatcacgtgaagctgtggatcaccatgaatgagccttatacccgtaacatgacgtactcagctggccacaatttgttgaaagcacacgcactggcatggcacgtgtacaacgagaagttccgccacgcacagaacggaaagattagcattgcactgcaagcagactggatcgagccagcttgcccattttctcagaaggataaggaggtggccgagcgcgtgcttgaatttgatatcggctggctggctgagccaatttttggtagcggcgactacccttgggtcatgcgtgattggctgaaccaacgcaataactttctgctcccgtactttacggaagatgaaaaaaagctcatacagggcactttcgattttctggcgctgtcgcattacaccacgattctggtcgacagcgaaaaagaggatccaattaagtataatgactaccttgaagtccaggaaatgacggatatcacttggctgaatagcccaagccaagttgcagtcgtcccctggggtctgcgcaaggttctgaactggctgaaatttaagtacggggatctcccaatgtacatcatcagcaatgggattgacgacgggcttcatgcagaagatgatcaactgcgcgtctattacatgcagaactatatcaacgaggccctcaaggcccacatcctggatggcataaacttatgcggttattttgcctatagcttcaacgacagaaccgcgcctcgctttggtctctatagatatgcggccgaccaatttgagccaaaagcgagtatgaaacactatcgtaagataattgatagtaacggattcccaggcccggagactctggaacgcttctgtcctgaggagttcaccgtctgcaccgagtgctccttcttccataccagaaaaagcctgttggcattcattgcgtttctgtttttcgctagcatcatttcactgtcactcattttctactactccaagaagggccgccgctcttacaag

SEQ ID NO: 149847 - DNA, 3036 bp, Artificial Sequence
  derived and/or modified sequence
atgcccgccagtgcccctccgaggcgacctagaccgccacctccttccctgtccttgctgctggtcttgctgggtctggggggccggcgcctcagggcagagccaggtgatggtgctcagacttgggccaggtttagcaggcccccggctccagaagccgctgggctgttccaaggtacattccccgatggcttcttgtgggctgtgggaagcgcggcttaccagacagaggggggctggcagcaacatgggaagggtgcatctatctgggacaccttcacccaccaccccctcgctccacccggcgacagtcgaaacgcaagcctgcccttgggtgcccccagccccctgcagcctgccacaggcgatgtggccagcgactcttataacaacgtgtttcgggatacagaggccctgagagaactcggggtgactcactatcgctttagtatctcctgggcacgcgtccttcccaacggatccgccggagtcccaaacagagaggggctgcggtactatagacggctgttggagagacttagagagctcggggtccagccagtggtaaccctgtatcactgggacctcccacagcgactgcaggacgcctacggaggctgggcaaatcgcgccctggccgatcacttccgggactacgccgagttgtgcttcagacactttggtgggcaagtgaaatactggatcaccatcgataacccgtacgtggtcgcctggcacggatacgcgacggggaggctggccccgggcattcgcggttccccgcgcctggggtatctggtagcccacaacttgctcttggcacacgctaaagtgtggcacctgtacaatacgtcatttcgacctacacagggagggcaagtctctattgccctgtcctctcactggataaatccaagacggatgaccgatcactccattaaggaatgccagaaatcattggacttcgtcctgggctggttcgccaagcccgtattcattgacggagattatcctgaaagtatgaaaaacaatctgtcttccatcttgcccgattttacagagagtgagaagaaatttattaagggaacagccgatttcttcgcactgtgtttcggtcctactctctctttccagctgctggatccccacatgaaattccggcaactggagagccctaatctgcggcaacttttgtcatggatagacttggaatttaatcatccacaaatatttatcgtggagaacggttggttcgtgtcagggacaacaaaacgcgacgatgctaagtatatgtactacctcaagaaattcattatggagaccctcaaggcaatcaaattggacggagtggacgtgatcgggtatacagcgtggtcactgatggacggcttcgagtggcataggggatacagcatccggcgggggttgttctatgtggacttcctctcccaggacaagatgctgctgcctaaatccagtgccctgttctatcagaagctcatcgagaagaatggattcccaccgcttccagagaatcagccgctggaggggacattcccatgtgactttgcgtggggggtggtagataattacattcaggttgataccacactgtctcagttcaccgatcttaatgtatacctgtgggacgtgcaccattccaaacgactgattaaggttgatggcgtggtcacaaagaaacggaaatcatattgcgtggacttcgcagcaatccagcctcagatcgccctgctgcaggagatgcacgttactcacttccgattttcactggactgggccctgatcctgcccttggggaatcagtcccaggttaaccacacgatcctgcagtattataggtgcatggcctctgagctggtacgggtgaatattacacctgtggttgcactctggcagcccatggctcctaatcaggggctgcctagacttttggcccgacagggggcttgggagaatccctatacggctctcgctttcgctgagtatgctcgcctttgctttcaggaactcggccaccacgtgaaactttggatcacgatgaatgagccctatacaaggaacatgacgtatagcgcgggccacaacctcctcaaagctcacgctctggcctggcatgtctacaacgagaaattcagacacgcccagaatgggaaaatctccattgcattgcaggccgattggatagagcccgcatgcccgttcagccagaaagataaggaggtagccgaacgggtcttggagtttgacattggctggctggccgagccgatcttcgggtctggcgattatccttgggttatgagggactggctcaaccaacgcaataatttcttgctgccctacttcacagaggatgagaagaaactcatccaaggaacattcgacttcttggcactttcccactataccacaatcctggtcgattcagagaaggaggatcctatcaaatacaacgactacctcgaggttcaggagatgaccgacatcacctggctgaattccccgtctcaggtcgctgttgtgccctggggcctgaggaaggtactgaattggttgaaatttaagtacggcgatctgcccatgtatataatctctaacgggatcgacgatggcctgcacgcagaggatgatcaactgagggtgtattacatgcagaactatattaatgaggccctgaaggcccatatcttggatgggattaacttgtgcggatacttcgcctactcatttaatgatcgaactgccccccgctttggcctgtacaggtatgctgctgatcagttcgaacctaaggctagcatgaagcattacaggaagataatcgacagcaacgggtttcccggacctgagacattggaaaggttctgtccagaggagttcactgtttgcacggagtgcagcttcttccatacccgaaaaagcctgctggcgtttatcgcttttctgttttttgcttctataatatctctcagtttgattttctactattctaagaagggaaggcgctcatacaaa

SEQ ID NO: 149848 - DNA, 3036 bp, Artificial Sequence
  derived and/or modified sequence
atgccggccagcgctcctcctaggaggccccgacctccacccccctctctgtcactgctcctcgtgctgctcggattgggtggacggcgtctccgggccgagcccggcgacggggcccagacatgggccaggttttccagaccacctgccccagaagctgctggactttttcagggaacgtttccagacggctttctatgggctgtgggcagcgcagcttatcagacagagggcggctggcagcagcatggtaagggagcctccatttgggatactttcacccatcaccctctggccccgcctggcgactctcgaaacgccagtctaccactgggcgctccatctcccttgcagccagccactggggatgtggcctccgatagctataacaacgttttcagagacacggaagcattgcgggaactgggggtgactcattaccgcttctcgattagctgggcaagagtgctcccaaacggaagcgctggagtacccaatcgtgagggtctgagatattaccggaggttgctggagcggcttcgggaactgggggtccagccagttgttacactgtaccactgggacctgccacagcggcttcaagatgcctacggcgggtgggctaatcgcgcgctagctgatcacttccgggactatgctgaactttgctttagacacttcggggggcaagtgaaatattggattacgattgataatccttacgtggtcgcctggcacggctatgccacaggccggctggcccctggaattagaggttctcctcgactgggctatctcgtagctcacaatctcctcctggcgcacgctaaagtatggcacctctacaataccagcttcaggccaacccagggaggacaagtgagcatcgcactgtccagccactggatcaatccacgtcgtatgaccgaccactcaatcaaagagtgccagaagagtttggacttcgttctaggttggtttgccaaaccggtctttatagacggggattatcctgagagtatgaagaataacctttcctccattctgcccgactttacagagagcgagaagaagtttataaaggggactgctgacttttttgctctctgttttggccccacactgagttttcagctgctagatcctcacatgaaatttcggcagctagaaagccctaatctgagacagctgttaagctggatagacctggaatttaaccacccgcagatctttatcgtcgagaacggatggttcgtaagcgggacgacaaagcgcgatgacgcgaaatatatgtattaccttaagaagtttatcatggagacactcaaagcgataaagttggacggggtggacgtcataggatatactgcctggtcattgatggacgggttcgaatggcaccgcggttattccatccgccgaggcttgttctatgtggatttcctgtctcaggacaagatgctccttcccaaaagctccgcacttttttaccagaaattgatagagaagaacggatttcccccactgccagaaaatcagcccctcgagggtactttcccctgcgacttcgcctggggggtagttgataactacatccaggtcgataccacacttagccagtttaccgatctaaatgtatacctctgggacgtgcaccattcaaaaaggttgatcaaggtagacggagtcgtaaccaaaaagaggaagagttactgcgtggatttcgctgccatacaaccccagatcgcattactgcaggaaatgcacgtgacgcacttcagattcagcctagactgggctttaatccttccccttggaaaccagtcacaggttaaccatactattctacagtactatcgctgcatggcaagcgaactggtacgagtcaacatcaccccagtggtagctctctggcagcctatggctcctaatcagggtctcccaagactgctggcccggcagggtgcctgggaaaatccctatacagcactggcatttgctgagtacgctagattgtgtttccaggaattagggcaccacgtcaaattgtggatcacgatgaatgagccttatacaaggaacatgacctactcggccggccacaaccttctcaaggcccatgccttggcatggcatgtttataacgagaagttccggcacgcgcaaaacgggaagatctctattgccctgcaggcggactggattgaacctgcatgtccctttagtcagaaagacaaggaggtcgcggaacgggtgctagagtttgatattgggtggctggcggagcccattttcggatccggagactacccttgggtgatgagagattggcttaatcagaggaataactttctcctcccttactttactgaggatgagaagaaactgatccagggaacctttgacttcttagcactgagtcattatactacaatcctggtcgattctgagaaggaagaccctatcaagtacaatgattacttggaagttcaggaaatgaccgatattacctggttaaactcacccagccaggtcgccgtcgtgccttggggacttcgaaaagttttaaattggctcaaatttaagtacggggatcttcccatgtacatcattagcaacggcattgatgacggcttgcacgcagaagacgatcaactcagagtgtactatatgcagaactacatcaacgaagctcttaaggcacatattttggacgggattaacctatgcgggtattttgcgtactctttcaatgatcgcaccgcgccaagatttgggctgtacagatacgcagctgaccaattcgaacctaaggccagcatgaagcactaccggaagattattgactccaacgggttccctggacctgaaactctggagaggttctgccccgaggagttcacagtctgcactgaatgttcttttttccatacgcggaagagtttgctcgcgttcattgcttttctgttctttgccagcatcatcagcctctcactgatcttttattatagcaagaaagggcggcgaagttacaaa

SEQ ID NO: 149849 - DNA, 3036 bp, Artificial Sequence
  derived and/or modified sequence
atgccggcgagcgccccgccgcgtcgcccgcggccaccaccgccgtccctgtccctgctcctcgtgctccttggtctgggaggcagacggctgcgcgccgaaccaggagatggcgcacagacttgggcgagattctccagaccgccagccccggaagcggcgggactgttccagggcacctttccggacggattcctgtgggccgtcgggtcggcggcttaccagactgagggaggatggcaacagcacggcaagggcgcctcgatctgggatacttttacgcaccatccacttgctcccccaggagacagcaggaacgcatcattgcccttgggagccccttcgccgttgcaacccgccactggtgacgtcgcgtcggatagctataacaacgtgtttcgcgacactgaagcactcagggaactcggagtgactcactaccgcttcagcatctcgtgggctcgggtcctccccaacggctcggccggagtgcctaatcgcgaagggttgcggtactaccggcggctcttggagcggctgcgggagcttggggtccaaccggtggtgaccctgtaccattgggacctgccgcagaggctccaggatgcctacggtggttgggctaaccgggcactggcagaccacttccgggattacgcggaactctgctttcggcatttcggaggacaagtgaagtactggatcaccatcgacaatccatatgtggtcgcttggcacggttacgccaccggtaggcttgcgccgggaattagaggatccccgcggctgggatacctggtggcgcataatctgctgctggcccacgcaaaggtgtggcatctgtacaataccagctttcgccctacccaggggggacaggtgtcaatcgctctgtcgtcgcattggattaacccaagacggatgaccgaccattccatcaaggagtgccagaagtctctggacttcgtgctcggatggttcgccaagccggtgttcatcgacggagactaccctgagtcgatgaagaacaatctcagctcaatcctcccggactttaccgaatccgagaaaaaattcatcaagggaaccgccgatttcttcgccctgtgcttcggaccgactctgtcattccagctgcttgaccctcacatgaagtttagacagctggagtcaccaaacctgagacagttgctgagctggatcgacttggagtttaatcacccgcagatcttcatcgtggaaaacgggtggttcgtgtcaggaaccaccaaacgggatgatgccaaatatatgtactatctcaagaagttcattatggaaaccctgaaggccatcaagctcgatggcgtggacgttatcgggtacactgcctggtcgctgatggacggatttgaatggcatagaggttactcgatccgaagaggcctgttctacgtggacttcttgtcgcaggataagatgctgctccctaagtcgtctgcgctgttctaccaaaagttgatcgaaaagaacgggttcccaccgcttcccgagaatcagcctctggagggcactttcccatgcgacttcgcgtggggtgtggtggacaactacatccaggtggacactacgctctcccaatttacggacctgaacgtgtacctgtgggacgtgcaccactccaagcgcctgatcaaggtggacggcgtcgtcactaagaagaggaaatcctactgtgtggatttcgctgcaatccaaccacagatcgcactgctgcaggaaatgcatgtgacccacttcaggttcagcttggattgggcgctcattctgccgctcggaaaccagtcccaagttaatcataccatcctccaatactatcgctgcatggcgtcagagctggtacgcgtcaatatcaccccggtcgtggcgctgtggcaaccgatggcaccgaaccaaggactgccacgcctgttggcccgccagggggcatgggagaacccctacacggcgctggccttcgccgaatacgccagactttgtttccaagaactgggccatcacgtcaaactgtggatcactatgaacgagccttataccaggaacatgacttactccgcaggccacaacctcctgaaagcacacgccctggcttggcatgtctacaacgaaaagttcagacacgcccagaatggaaagatcagtattgctctccaggctgactggatcgaaccggcctgccctttctcacagaaggacaaagaagttgccgagcgcgtgctcgagtttgatattggatggctcgcagagccaatattcggatcgggggactacccttgggtgatgagagattggctgaaccagcgcaataattttctcctcccttacttcactgaggatgaaaagaaactgatccaaggaactttcgacttccttgctctttcacactacaccaccatcctggtcgattcggaaaaggaagatcccattaaatacaacgactacctcgaagtccaagaaatgactgatattacctggctgaactccccatcccaggtggccgtggtgccttggggcctccgaaaggtgctgaattggctcaagttcaaatacggagatcttcccatgtacatcatcagcaacggcatcgacgatggcctgcacgccgaggatgaccagctgcgcgtctactacatgcaaaactacatcaatgaggcgctgaaagcccacatcctggacggtatcaacctgtgcggatacttcgcgtacagctttaacgaccgcaccgccccgcgctttgggctctaccgctacgctgcggaccagtttgaaccgaaagcatccatgaagcattaccggaaaattatcgatagtaatggcttcccgggccctgagactctcgaacgcttctgtccagaagaattcaccgtctgcacggagtgctccttcttccacactcgcaaatcccttctggctttcattgccttcctctttttcgcatcaatcatctcgttgagcctgatcttttactacagcaagaagggacgacggagctacaag

SEQ ID NO: 149850 - DNA, 3036 bp, Artificial Sequence
  derived and/or modified sequence
atgcccgcatccgcccccccgcgccgccctagacctccgccccccagtctctcgttgttgttggtcctgctcggactcgggggtcgccggctccgagcagaacccggcgacggtgctcagacctgggcacggttctcccgcccacctgcccccgaggccgcaggactgttccagggcaccttccctgacggcttcctttgggcagttgggagcgcagcctaccagaccgaaggcggatggcaacaacacggtaagggtgctagcatctgggatacattcactcatcatcccctcgcaccccccggggattcccgtaatgcttctttgcctctcggcgcgcccagtccgctccagcccgccactggggatgtcgcaagcgactcttacaataacgtcttccgtgacactgaggctctccgcgagctgggtgttacccattaccggttctccatcagctgggctcgagttcttcctaacggctctgccggtgtcccgaatcgtgaaggcctgcgctactatcggcgtcttctggagcgcctccgtgagcttggcgtccaacccgtggtcaccctttaccactgggacttgccccagcgtctgcaggatgcttacggcggttgggccaatcgggctctggcggaccatttccgtgactatgctgagctatgcttccgccatttcggtggacaggtcaagtactggatcaccattgacaacccgtacgtggtcgcctggcatggctacgctacaggccgactagctcctggtatccgtggctctccccgcctcggctacctcgtcgctcataatctccttctggctcacgccaaggtatggcacctctacaatacaagtttccgccctactcagggtggccaggtctcgatcgcgctgagctctcactggatcaaccctcgtcgcatgaccgatcactctatcaaggagtgtcaaaagtccctcgatttcgtcctcggctggttcgcaaagcctgtgttcattgacggcgactaccccgagtccatgaagaacaacctgagctccatcctcccggacttcaccgaatcagagaagaagttcatcaagggaaccgccgatttctttgccctctgctttggccctactctgagcttccaacttctggacccacatatgaagtttagacaactggaatcgccgaacctgcgtcaactgctctcttggattgatctggagttcaaccacccacaaatcttcattgtcgaaaacggctggttcgtcagcggcaccaccaagcgggacgatgctaagtacatgtactatctcaaaaagttcatcatggagacccttaaagcgattaagcttgacggtgtcgacgtcatcggctacactgcttggtctttgatggacggcttcgaatggcacagagggtacagcatccggcgaggcctcttctacgtggatttcctgagccaggataagatgttgctgcccaaatccagcgccttgttctaccaaaagctgatcgaaaagaacggatttccgcctttacccgagaatcagccgctcgagggtacgttcccctgtgacttcgcttggggagtggtggataactacatccaagtcgatacgaccttaagccagttcactgacctcaacgtgtacctttgggacgtccaccactctaagcgtctcatcaaggttgacggcgtcgtcaccaagaagcgcaagtcgtactgtgtggactttgcggcgattcagccccagattgccctgctgcaagagatgcacgtcacccacttccgcttctctcttgattgggctcttattctgcccctcggcaatcagtcgcaggtcaatcatacaattttgcagtactaccgctgcatggcctcggagctcgtgcgggtaaacatcacccccgtcgtcgcactgtggcaaccgatggcgcctaaccagggcctcccccggttgctcgcccggcagggcgcttgggaaaacccctacaccgccctagccttcgccgagtacgcccgtctgtgcttccaggagctggggcaccatgtgaagctttggatcacgatgaacgagccctacacccgtaatatgacgtactccgcaggccacaacctgctgaaggctcacgctcttgcctggcacgtatacaacgagaagttccgtcacgctcaaaacggtaagatcagtattgcgctccaggctgactggatcgagccagcgtgccccttctctcagaaggataaggaggtggccgaacgcgttctggaattcgatattggatggctcgcagagcccatcttcggatccggtgactacccgtgggtgatgcgtgattggctgaaccagcgtaacaattttcttctgccctacttcaccgaagatgagaagaagcttatccagggcacctttgacttcctcgctttgtcccattatactactatcttggtagattcggagaaggaagatcctatcaagtacaacgattacttggaagtgcaggaaatgacagatataacctggctcaattcgccctcccaggtcgccgtcgtgccctggggactgcgtaaggttctcaattggctcaagttcaagtacggcgaccttcccatgtacattatctccaatggtatcgatgatggcctccatgcagaggacgaccaactgcgcgtttactacatgcaaaactatattaatgaagcacttaaggctcacatcctcgatggcatcaatttgtgcggatacttcgcctacagcttcaatgacagaactgcaccccgctttggcctctaccgttacgccgccgaccagttcgagcctaaggcctccatgaagcattaccgcaagatcatcgatagcaatggattccctggacccgagaccctcgagaggttttgcccggaggaattcacagtttgtaccgaatgctccttcttccacacccgtaagtctctgctagcatttattgccttcctcttctttgcgtccataatctccctgtccctgattttctactattctaagaagggcaggagaagttataag

SEQ ID NO: 149851 - DNA, 3036 bp, Artificial Sequence
  derived and/or modified sequence
atgccagctagcgcaccaccgcggcggcctcgacccccacccccaagccttagcctgctgctggtgctcctgggtttaggaggtcggcggctgagagcggaacccggcgacggcgctcagacatgggcgcgcttttcacgaccacctgcccccgaggcagcaggattgttccagggaacctttcctgatgggtttctgtgggcggtcggaagcgcagcttatcagacggagggaggatggcagcagcacggtaagggggcctctatttgggacacgttcactcaccatccattggcccccccaggggactctcgtaatgcgtcactgccgctgggcgcccctagtcccctgcagcccgcaacaggggacgttgctagtgactcatacaacaatgtatttagggataccgaggcactgagggagctgggcgtcacacattacaggttctcaatcagctgggccagggtcctgcctaacggctccgctggagtcccgaatcgggaaggactcaggtactaccggcgcctactggaaagacttagggagctgggcgttcagcctgtggtgactctctaccactgggaccttccccaacgcttgcaggacgcttatggcggatgggctaaccgcgcattggccgatcactttcgagattacgcggagctctgctttcgtcactttgggggccaggttaaatactggattacgatagataatccctatgtggtcgcctggcacggttatgcaaccgggaggcttgcaccgggaattagaggctcgccgagacttggctatctggtggcacacaatctgcttctggcccacgctaaggtctggcacctgtataacacaagctttcgtccgacacagggcggtcaggtgtctatcgctctatctagtcactggattaaccctcgcaggatgaccgatcacagcattaaggagtgtcagaagtcattggacttcgtgctcggatggttcgccaagcctgtgtttatagatggtgactaccctgagtcaatgaagaacaatttaagtagtattcttccggacttcaccgagtcagagaagaaatttattaaagggacagctgactttttcgccttatgcttcggaccaactctcagcttccagttgctggatcctcacatgaagttccgacaactagagtcccccaatctgcgtcagctgctgtcgtggatagacttagagttcaatcatccccaaattttcattgtcgagaacggatggttcgtatctggaaccaccaagagggacgatgcaaagtacatgtactacctgaaaaagtttatcatggaaaccttaaaggcaatcaagctggatggtgtggatgtgataggttatacagcatggtccctgatggacggctttgagtggcaccgtgggtatagcatccgtcggggattattttatgtggactttctgtctcaagataaaatgctgctgccgaagtccagtgccctgttttatcagaagttgattgagaagaacggattcccacctctgcctgagaaccagcccctggaaggtacatttccatgtgatttcgcgtggggcgtagtggacaactatatccaagttgataccaccctgtcccaattcacggacctgaatgtttatctgtgggacgtgcatcactccaaacggcttatcaaagttgatggggtggtgacaaagaaaaggaaaagctattgtgtggacttcgccgctatccaacctcaaatcgctttgcttcaggagatgcacgtgacacacttccgattctctctggattgggccctcatcctcccactgggaaaccaatcccaagttaaccatactattttacagtattatagatgcatggctagtgagctggtaagggtgaacataactcctgtggtggcattgtggcagccaatggcccccaaccagggcctgccccgcctgctcgcccggcagggtgcctgggagaacccttacaccgcccttgcttttgctgagtacgctcgcctgtgctttcaggagcttggccatcacgtgaagttgtggattactatgaatgaaccgtacacacgcaacatgacctactccgctggacataatttgctgaaggcccacgctctcgcctggcacgtgtataatgagaagttccggcatgcgcagaatggcaagatcagcattgcattgcaagctgactggattgagcccgcctgtccattttcccaaaaagacaaagaggtcgctgaacgagtactagagttcgacataggatggcttgccgaacctattttcggctcaggcgattacccatgggttatgagagactggctgaaccaaagaaacaatttcttgctcccctacttcaccgaagatgagaagaagttgatccagggcaccttcgatttcctggctctgtcacattacaccaccatactcgttgactcagaaaaagaagatcctatcaagtacaacgactatctggaggttcaggagatgacagacatcacctggctgaatagtccttcacaggtggctgttgttccttggggattgagaaaagtgctgaattggttaaagtttaaatacggtgatctccccatgtacattatatccaacgggattgatgatggcctgcacgccgaggatgaccagctcagggtttattatatgcagaactacattaacgaagcattgaaggctcacatcctggacggcatcaacttatgtggatattttgcctattcttttaacgatcgcacggctccacgctttgggctctacagatatgccgcagatcagttcgaaccgaaggcctcaatgaaacactaccgcaaaatcattgactccaacggatttcctggacctgaaacccttgaacgtttttgcccagaagagtttacagtgtgtaccgagtgttcattctttcacacccggaagtccttattggcttttattgcattcctctttttcgccagtatcatcagcctgtccctgatattttactattcaaagaaggggagacgctcctataag

SEQ ID NO: 149852 - DNA, 3036 bp, Artificial Sequence
  derived and/or modified sequence
atgcctgcgagcgccccccctcggagacccaggccccctccccctagcctgagcctattactggtgcttcttggccttggcggcagaaggcttcgcgccgagcctggcgatggagcccagacgtgggcccggttctcgcgacccccagcccctgaggccgccgggctgtttcagggtacctttccagacggtttcctctgggccgtgggctccgctgcttatcagaccgagggaggctggcagcaacacgggaagggcgcctccatatgggacacattcacacaccacccactggcccccccaggagactctcggaacgccagtttaccgctcggggctcccagccccctgcaacccgccacgggcgatgttgcaagcgactcttataacaatgtgtttagggatactgaggctctgcgcgagctcggggtgactcattatcgcttctccatctcatgggctagggtcctgcccaatgggtctgccggagtcccaaatcgagaagggttacgctattaccgccggctgctcgagaggttaagagaattgggtgtgcaacccgtggttactttatatcattgggacctaccccaacgactgcaggatgcctacggagggtgggcaaatcgggctcttgcagaccactttagggattatgctgaactttgctttagacattttggaggacaggtaaagtattggataaccatcgataacccctacgtggtggcctggcatggatacgccacaggccggctcgctccggggatccggggcagccctagactcggttacctggtggctcacaacctcctgctggcccacgctaaagtctggcatttatataacacgagctttcggccaacacagggcggccaggtgtcaatcgcactgtcctcccattggatcaatccaaggcggatgaccgaccactccatcaaagagtgtcaaaagtctctcgactttgtgctggggtggttcgcaaagcctgtgtttatcgatggcgattaccccgaatccatgaaaaataacttgagctctattttgccagactttacagaaagcgagaaaaaattcataaagggcacagcggacttctttgcactgtgctttggccctaccttaagctttcagctgctggatccacacatgaaattcaggcagctggagtcccccaacttgcggcaactccttagctggatcgacttagagtttaatcacccccagatcttcatcgtggagaatgggtggttcgtatcaggaactacgaagcgagatgacgcaaagtatatgtattacctgaagaaattcatcatggaaacactcaaggccataaaattggacggagttgatgtcatagggtatactgcatggagtctgatggatgggttcgagtggcacaggggatactctattcgacgtggccttttttatgtcgattttctgtctcaggacaaaatgctgcttcctaaatcatctgcacttttttatcagaagttgatcgaaaaaaacggctttcctccccttcccgagaaccaaccgctggagggtacattcccatgcgactttgcctggggagtggtagataattacatacaggtcgacacaacactttcccaattcacagacctcaatgtgtacttgtgggatgtgcaccacagcaagcgccttattaaagtggatggcgtagtgacgaaaaagcgaaaatcgtactgtgtggatttcgcagcgatccaaccccagatcgcccttctgcaagaaatgcatgtgacacactttcggttcagcctggactgggctttgattttgccccttgggaatcagtctcaagtgaaccatactatcctgcagtactatcgctgcatggcatcagagctggtgcgagtgaacataacgccggtcgttgctctgtggcagcccatggcccccaatcagggcttgccaagactgcttgccaggcagggagcctgggagaatccatataccgccctggcattcgcagaatatgcaagactctgttttcaagagttgggccaccatgttaagctctggattacaatgaatgagccgtatacccgcaatatgacgtatagtgctggccataaccttttgaaagcccacgccctggcgtggcacgtctacaacgagaaatttcgccatgcccaaaacggcaagatatcaatcgcgctacaggcagactggattgaaccagcatgtcccttttcccagaaggataaagaggtggcagaacgggttcttgaattcgacatcggatggctggccgagccaatctttgggtcaggggattacccatgggtgatgcgcgattggctcaatcagcggaataacttcctgttgccctatttcacagaggacgaaaagaagcttatacaggggacttttgattttctggctctctcccattacactaccattctcgttgatagcgagaaggaggatcctatcaaatataacgactatctggaggtccaggagatgacagacatcacgtggctgaattccccgagccaggtcgccgtagtcccctggggcttgcgcaaagtactcaactggctaaagttcaaatatggcgatctgcctatgtatataatttctaacggaatcgacgacgggctgcacgccgaggacgatcagctcagggtgtattatatgcagaactacatcaatgaggcgttgaaagcccacatactggacggcatcaatctgtgcggctatttcgcatacagtttcaatgaccgaaccgcacctcgctttggcctgtaccggtatgcagccgaccagttcgagcctaaggcatcgatgaagcactataggaaaatcatcgacagcaacgggttcccaggtcctgagactctggagcgcttttgccctgaagaattcacggtctgcacggagtgctcattctttcacacacgcaagtcattgctggcgttcatcgccttcttgttcttcgccagtattatttccctttccttgatattctactattccaagaagggaagacgctcctacaaa

SEQ ID NO: 149853 - DNA, 3036 bp, Artificial Sequence
  derived and/or modified sequence
atgccagcatccgcccctccgaggcgcccccgcccgccacccccgtcacttagtctcctgctggtgttgttgggacttggtggaagacgccttagagccgagccgggcgatggcgcacagacctgggctcgcttcagtaggccaccggccccagaggctgctggcttgttccagggtactttcccggacggcttcctgtgggcagtgggctccgctgcataccaaacggagggaggctggcagcagcacggaaaaggcgcctctatttgggataccttcacgcatcatccccttgccccccccggtgacagcaggaatgcttctctcccgctgggcgctccgtctcccctgcagcccgccaccggcgacgtggcctccgattcctataacaatgtgttccgcgacacagaggcattgagggagcttggcgtgacgcactacagattcagcattagttgggctcgcgtgctgcccaacggcagcgcaggcgttccgaatagagaaggcctgaggtactatcgcagactgctggagagactgagggaacttggcgtacaacctgtggtaactctgtaccattgggatttgccacagcgcctgcaagacgcctacggcggttgggccaatagggcacttgccgaccattttagagactacgccgaattgtgctttcgccattttggaggacaggtgaaatactggataacaattgacaacccatatgtggtcgcatggcacggttacgctaccggacgcctggctcctggcatcaggggttcacccagactgggttacctggtggcgcataacctgttgctggcgcatgctaaggtgtggcatctctacaatacatcatttagacctacccagggaggacaggtcagcatagccttgtccagccactggataaaccccaggcgcatgaccgaccacagcatcaaggaatgccagaagtccttggactttgtcctgggttggtttgccaagcctgttttcatcgacggtgattatcccgagagtatgaaaaacaatctctcctctattctgcccgactttacggaaagtgagaagaaatttattaagggtacggcagatttttttgccctttgcttcggacctactttgtctttccaactcttggatccacatatgaaatttaggcagcttgagagcccaaacctgcgccagctcctctcctggatcgacttggagttcaaccatccccagatcttcattgtcgaaaatggttggttcgtgtctggaaccaccaagagagatgacgctaaatacatgtactaccttaagaagttcatcatggaaactctcaaggccataaagctggacggcgtcgacgtgattggttacactgcatggagcctcatggacggatttgagtggcacaggggctactctataaggagaggactgttttacgtcgattttttgtcccaggacaaaatgctcctccccaagtctagcgccctcttctatcagaaactgatcgagaagaacggtttcccccctcttccagagaatcagcccctcgagggaacgtttccatgtgacttcgcgtggggtgtcgtcgataactacatccaagtagacacaacactgtctcagttcactgatcttaacgtctacctgtgggatgtccatcatagtaaacgcctgataaaggtggacggtgtggtgacaaagaaaaggaagtcctattgcgtggactttgctgccatccagcctcagattgccttgttgcaggaaatgcatgtcacgcactttaggttctcccttgactgggctctgatcctgccgcttggtaaccaaagccaggtgaatcataccatcttgcaatattaccgctgcatggcctcagagctcgttcgcgtgaatattaccccagtagtggccttgtggcagccaatggcccctaatcagggccttccaagacttctggctcgccagggagcctgggagaatccctacacagcactcgctttcgcggagtacgccagactgtgctttcaggaactgggtcatcacgtgaaactctggatcactatgaatgagccatacactaggaacatgacctactctgctggccataacctgctgaaagctcacgccctggcctggcatgtctataatgagaagttcaggcacgcgcagaacggtaagatatcaattgctctgcaagcggattggatagagcccgcatgtccgttttcacagaaagacaaggaggttgcagagcgcgtcctggaattcgatattggttggctggcagagccgatcttcggaagtggtgactacccttgggttatgcgcgattggctgaaccagaggaataacttcttgttgccttacttcaccgaggatgagaaaaagctgatacagggcactttcgacttccttgcgctgagccactatacaacgattctcgtggactccgagaaggaggaccctataaagtacaacgactacctggaagtgcaggaaatgactgacatcacatggctcaattctccctctcaagttgcggtcgtgccctggggactcagaaaagtgctgaactggcttaagttcaagtatggtgatttgcctatgtacatcatcagtaatggcattgacgatggcctccacgccgaggacgaccagttgcgcgtgtattacatgcaaaattacatcaacgaggctctcaaagcgcacatcctggatggaatcaacctgtgcggctatttcgcatattcctttaacgatagaaccgccccccgctttggtttgtaccgctacgctgctgaccaatttgagcccaaggcctctatgaagcactacaggaaaatcatcgatagcaacggttttcctggtcccgaaactctcgagcgcttctgccccgaggagtttacagtgtgtaccgagtgctcctttttccacacaaggaagtctttgctcgcttttatagcgttcctcttctttgcttctattattagcctgtctttgatcttctactactcaaagaaaggtaggagaagctacaag

SEQ ID NO: 149854 - DNA, 3039 bp, Artificial Sequence
  derived and/or modified sequence
atgcccgccagcgccccccccagaagacccagaccccccccccccagcctgagcctgctgctggtgctgctgggcctgggcggcagaagactgagagccgagcccggcgacggcgcccagacctgggccagattcagcagaccccccgcccccgaggccgccggcctgttccagggcaccttccccgacggcttcctgtgggccgtgggcagcgccgcctaccagaccgagggcggctggcagcagcacggcaagggcgccagcatctgggacaccttcacccaccaccccctggccccccccggcgacagcagaaacgccagcctgcccctgggcgcccccagccccctgcagcccgccaccggcgacgtggccagcgacagctacaacaacgtgttcagagacaccgaggccctgagagagctgggcgtgacccactacagattcagcatcagctgggccagagtgctgcccaacggcagcgccggcgtgcccaacagagagggcctgagatactacagaagactgctggagagactgagagagctgggcgtgcagcccgtggtgaccctgtaccactgggacctgccccagagactgcaggacgcctacggcggctgggccaacagagccctggccgaccacttcagagactacgccgagctgtgcttcagacacttcggcggccaggtgaagtactggatcaccatcgacaacccctacgtggtggcctggcacggctacgccaccggcagactggcccccggcatcagaggcagccccagactgggctacctggtggcccacaacctgctgctggcccacgccaaggtgtggcacctgtacaacaccagcttcagacccacccagggcggccaggtgagcatcgccctgagcagccactggatcaaccccagaagaatgaccgaccacagcatcaaggagtgccagaagagcctggacttcgtgctgggctggttcgccaagcccgtgttcatcgacggcgactaccccgagagcatgaagaacaacctgagcagcatcctgcccgacttcaccgagagcgagaagaagttcatcaagggcaccgccgacttcttcgccctgtgcttcggccccaccctgagcttccagctgctggacccccacatgaagttcagacagctggagagccccaacctgagacagctgctgagctggatcgacctggagttcaaccacccccagatcttcatcgtggagaacggctggttcgtgagcggcaccaccaagagagacgacgccaagtacatgtactacctgaagaagttcatcatggagaccctgaaggccatcaagctggacggcgtggacgtgatcggctacaccgcctggagcctgatggacggcttcgagtggcacagaggctacagcatcagaagaggcctgttctacgtggacttcctgagccaggacaagatgctgctgcccaagagcagcgccctgttctaccagaagctgatcgagaagaacggcttcccccccctgcccgagaaccagcccctggagggcaccttcccctgcgacttcgcctggggcgtggtggacaactacatccaggtggacaccaccctgagccagttcaccgacctgaacgtgtacctgtgggacgtgcaccacagcaagagactgatcaaggtggacggcgtggtgaccaagaagagaaagagctactgcgtggacttcgccgccatccagccccagatcgccctgctgcaggagatgcacgtgacccacttcagattcagcctggactgggccctgatcctgcccctgggcaaccagagccaggtgaaccacaccatcctgcagtactacagatgcatggccagcgagctggtgagagtgaacatcacccccgtggtggccctgtggcagcccatggcccccaaccagggcctgcccagactgctggccagacagggcgcctgggagaacccctacaccgccctggccttcgccgagtacgccagactgtgcttccaggagctgggccaccacgtgaagctgtggatcaccatgaacgagccctacaccagaaacatgacctacagcgccggccacaacctgctgaaggcccacgccctggcctggcacgtgtacaacgagaagttcagacacgcccagaacggcaagatcagcatcgccctgcaggccgactggatcgagcccgcctgccccttcagccagaaggacaaggaggtggccgagagagtgctggagttcgacatcggctggctggccgagcccatcttcggcagcggcgactacccctgggtgatgagagactggctgaaccagagaaacaacttcctgctgccctacttcaccgaggacgagaagaagctgatccagggcaccttcgacttcctggccctgagccactacaccaccatcctggtggacagcgagaaggaggaccccatcaagtacaacgactacctggaggtgcaggagatgaccgacatcacctggctgaacagccccagccaggtggccgtggtgccctggggcctgagaaaggtgctgaactggctgaagttcaagtacggcgacctgcccatgtacatcatcagcaacggcatcgacgacggcctgcacgccgaggacgaccagctgagagtgtactacatgcagaactacatcaacgaggccctgaaggcccacatcctggacggcatcaacctgtgcggctacttcgcctacagcttcaacgacagaaccgcccccagattcggcctgtacagatacgccgccgaccagttcgagcccaaggccagcatgaagcactacagaaagatcatcgacagcaacggcttccccggccccgagaccctggagagattctgccccgaggagttcaccgtgtgcaccgagtgcagcttcttccacaccagaaagagcctgctggccttcatcgccttcctgttcttcgccagcatcatcagcctgagcctgatcttctactacagcaagaagggcagaagaagctacaagtag

SEQ ID NO: 149855 - DNA, 1793 bp, Artificial Sequence
  derived and/or modified sequence
gggaaataagagagaaaagaagagtaagaagaaatataagagccaccatgcccgcgtcggcaccgccgagaaggccccgacctcctccaccttcacttagcctgctgctggtgctcctcggactgggaggacggaggctgagggccgaacccggagatggggctcaaacgtgggccaggttctcacggccaccggctcccgaggctgccggcttgttccaaggaacgtttccggacgggttcctttgggcggtaggatcggcggcataccagacggagggagggtggcagcagcacggtaaaggggcatcaatttgggacacgttcactcatcacccgctcgctccaccgggtgactccagaaatgcttcgcttccgcttggagcaccctcaccccttcaaccggccactggggatgtcgcgtcagattcgtacaataatgtgtttcgcgataccgaagcccttagagaacttggcgtcacacattaccgattttcaatttcatgggctagggtgttgcctaatgggtcggcgggtgtaccgaatagagaaggtctgaggtattatcgccgccttctcgaacgccttagggagcttggggtccaaccggtggtaacactttatcactgggacctcccacagcggctccaagatgcgtatggagggtgggccaatcgggcgttggccgaccactttagagactacgcggaactttgctttcgccacttcggaggacaggtcaagtattggattaccatcgacaatccttacgtggtagcctggcacggttacgccacggggaggctcgcgcctggtatccgcgggtccccgcgactcggttatcttgtcgcccacaacctcttgttggcccacgccaaagtgtggcatttgtataacacaagcttcaggccgacgcagggcggacaggtgtcaatcgcattgtcgtcgcactggatcaatcccaggcggatgaccgatcattcgattaaggagtgccagaagtcgctggactttgtactgggttggtttgcgaagccagtgtttatcgacggtgactaccctgaatccatgaagaacaatcttagctcgattttgcccgactttacggagtcagagaaaaagtttatcaagggcacggcggacttcttcgcactttgttttgggcccactctttccttccagctcttggacccgcatatgaaattccgccagcttgagtcgcccaatctcagacagctcctgtcgtggatcgatttggagtttaaccacccacaaatctttatcgtggaaaatggatggttcgtgtcgggtacgacaaagcgggatgatgcgaagtatatgtactacttgaagaaattcatcatggagacactgaaagccatcaaacttgacggcgtagatgtcatcggatatacagcgtggtcactcatggatgggtttgaatggcataggggctactcgattagacgcgggctgttttacgtcgactttttgagccaggacaaaatgctgctccccaaaagctccgccttgttctaccagaaacttattgagaaaaacgggttcccgccacttccggaaaatcagcccttggaagggacatttccgtgcgatttcgcgtggggtgtagtagacaattacattcaggtaagccagctgacaaaaccgatttcctcattgacaaagccctaccactgataagctgccttctgcggggcttgccttctggccatgcccttcttctctcccttgcacctgtacctcttggtctttgaataaagcctgagtaggaag

SEQ ID NO: 149856 - DNA, 3039 bp, Artificial Sequence
  derived and/or modified sequence
atgcctgcctctgcaccgccgcgccggcctagaccaccgcccccatccctgagcctgttgcttgtgctactgggtttgggcggtcggcgtctccgcgccgagccgggcgacggtgcccaaacctgggccaggttttcccggcctcctgccccggaggcagctggcctgttccagggtacattccctgatggttttctctgggcagtcggctctgctgcatatcagacagagggcgggtggcaacagcacggcaagggtgcaagcatttgggatacattcacacaccaccctttggcacccccaggcgactccaggaacgccagcctgcccctgggtgctccaagcccccttcagcctgcgactggagacgttgcctctgacagctataataacgtctttcgagatacggaggcactcagagagctgggcgttacccactaccggttcagtatatcttgggcccgggtcctccccaacggaagcgccggggtgcctaatcgtgagggcctgagatactaccggaggctcctagaaagacttcgagaattgggggtccagcccgttgtcaccttgtatcactgggatctgccacagcgcttgcaggacgcttacgggggttgggccaatagagccctggctgatcattttagagattatgcggaactctgcttcagacacttcggaggccaggtgaaatattggatcacgatcgataatccatacgtggtggcctggcatggatatgctaccgggagactggcgccgggaatccgcgggtctccccggctcggatatttagtcgcacacaatctgctgctggcccacgccaaagtgtggcacctctacaatacctcctttaggccgacgcagggaggccaggtcagcatcgcactgagctctcattggataaatccacggaggatgaccgaccactccatcaaggagtgccaaaagagtctggattttgtgcttggatggttcgcaaaaccagtctttatcgacggcgattaccctgaaagtatgaaaaacaacctgagctctattctgcccgatttcactgagagtgaaaagaaatttataaagggaactgcggatttttttgctctatgtttcggacctaccctctcgttccaactgctggatcctcatatgaagttccggcagctagagtccccgaacctgagacaactcttgagttggatagacctggagtttaaccatccccagattttcatcgttgaaaatggctggttcgtatctggtacgacgaaacgtgatgacgccaagtatatgtactacctgaaaaaatttattatggagacccttaaagcgatcaagttggatggcgtcgacgttatcggatacacagcatggtccctcatggatggttttgagtggcacagaggttacagtattcgacgagggctcttctacgtcgactttctgagtcaggataagatgcttctgccgaaatctagcgctctgttctaccagaagcttatcgaaaagaatggcttccctcctctgcccgagaatcagcccctggagggtacattcccatgcgacttcgcctggggcgtggtggataactatattcaggtcgacactacgctgagtcagtttaccgacctgaacgtctacctgtgggatgtgcaccatagcaagcggttgatcaaggtggatggggtagtgacaaaaaaacgaaagtcttattgcgtcgatttcgctgcgattcagcctcagatcgcgcttttacaggagatgcatgttacacactttcgatttagcttagactgggccttgattctgcccctgggcaaccaatctcaggttaatcataccatcctgcagtattaccggtgcatggcttcagagttggttagggtcaatattactcccgtggtggctctctggcagcccatggcccccaaccagggtctgcctagactcctggcccgacaaggcgcctgggaaaatccgtacaccgcactggcattcgccgaatatgcacgtttgtgttttcaggagctggggcatcatgttaagttatggatcaccatgaatgagccatataccaggaacatgacctattccgccggacacaacctcctgaaggcacatgccctggcctggcatgtgtataatgagaagtttaggcacgcccagaatggtaaaatctctatcgcgctgcaggccgactggatcgaacctgcctgtccattcagccagaaggacaaagaagtcgccgaaagagtgttggaattcgatattggctggcttgctgagccgatttttgggagcggtgattacccctgggtaatgcgggactggctgaatcaaaggaacaactttttacttccttactttaccgaggatgaaaagaagctgatccagggtaccttcgatttccttgccctcagtcactacaccacgatcctggtggattcggaaaaagaggatccaatcaaatataatgattacctggaggtgcaggagatgacagatatcacttggctcaactcaccttcacaggtcgccgttgtcccttggggtttgcgtaaagtcctgaattggctaaaattcaagtatggcgatcttcccatgtacattatctctaatggcatagatgatggtcttcacgcagaagacgaccagctcagagtttattatatgcagaactacataaatgaagctcttaaagctcacatcctggatgggatcaacttgtgtggctacttcgcctacagctttaacgataggacggccccccgtttcgggttgtaccgctatgctgccgatcagttcgagcccaaggcaagcatgaagcactaccgtaagatcatagattccaatgggtttccaggcccggaaacactggagcggttctgtccagaggagttcacggtatgcacagagtgttctttcttccacacgaggaaatccttgcttgctttcattgcttttttgttttttgcttcaattatctctttaagtcttatattttactattccaagaaaggacgccggtcttataaatag

SEQ ID NO: 149857 - DNA, 3039 bp, Artificial Sequence
  derived and/or modified sequence
atgcctgccagcgccccaccccggcggccccggcccccaccacccagcctgagcctgctgctggtgctgctgggcctgggcggccgccgcctgcgggcagagcctggagatggagcccagacctgggcccgcttcagccggcccccagcccctgaggccgccggcctcttccagggcaccttcccagatggcttcctgtgggccgtgggcagcgctgcctaccagacagagggcggctggcagcagcacggcaaaggagccagcatctgggacaccttcacccaccaccccctggcccctcctggggacagcagaaatgccagcctgcccctgggcgcccccagccccctgcagcctgccactggagatgtggccagtgacagctacaacaacgtgttccgggacacagaggccctgcgggagctgggcgtgacccactaccgcttcagcatctcctgggcccgggtgctgcccaatggatctgctggggtgcccaaccgggagggcctgcgctactaccgccgcctgctggagcggctgcgggagctgggcgtgcagcctgtggtgaccctgtaccactgggacctgccccagaggctgcaggatgcctacggcggctgggccaacagagccctggccgaccacttccgggactatgcagagctgtgcttccgccactttggaggccaggtgaagtactggatcaccatcgacaacccctacgtggtggcctggcacggctacgccaccggccgcctggcccctggcatccggggcagcccccggctgggctacctggtggcccacaacctgctgctggcccacgccaaggtgtggcacctgtacaacaccagcttccggcccacccagggcggccaggtgtccatcgccctgagcagccactggatcaaccccaggaggatgacagaccacagcatcaaggagtgccagaagagcctggactttgtgctgggctggtttgccaagcctgtgttcattgatggagactacccagagagcatgaagaacaacctgagcagcatcctgcctgacttcacagaaagtgagaagaagttcatcaagggcacagctgacttctttgccctgtgcttcggccccaccctgtccttccagctgctggacccccacatgaagttccggcagctggagagccccaacctgcggcagctgctgtcctggattgacctggagttcaaccacccccagatcttcatcgtggagaatggctggtttgtgtctggcaccaccaagagagatgatgccaagtacatgtactacctgaagaagttcatcatggagaccctgaaggccatcaagctggatggagtggatgtgattggctacacagcctggagcctgatggatggctttgagtggcaccggggctacagcatcagaagaggcctcttctacgtggacttcctgagccaggacaagatgctgctgcccaagagcagcgccctcttctaccagaagctgattgagaagaatggcttcccccccctgcctgagaaccagcccctggagggcaccttcccctgtgactttgcctggggcgtggtggacaactacatccaggtggacaccaccctgagccagttcacagacctgaatgtgtacctgtgggatgtgcaccacagcaagaggctcatcaaggtggatggagtggtgaccaagaagaggaagagctactgtgtggactttgctgccatccagccccagatcgccctgctgcaggagatgcacgtgacccacttccgcttcagcctggactgggccctgatcctgcccctgggcaaccagagccaggtgaaccacaccatcctgcagtactaccgctgcatggccagcgagctggtgcgggtgaacatcacccctgtggtggccctgtggcagcccatggcccccaaccagggcctgccccggctgctggcccggcagggcgcctgggagaacccctacacagccctggcctttgctgaatatgcccggctgtgcttccaggagctgggccaccacgtgaagctgtggatcaccatgaatgagccctacaccaggaacatgacctacagcgctggccacaacctgctgaaggcccacgccctggcctggcacgtgtacaatgagaagttcagacatgcccagaatggcaagatcagcatcgccctgcaggccgactggattgaaccagcctgccccttcagccagaaggacaaggaggtggccgagcgggtgctggagtttgatattggctggctggccgagcccatctttggaagtggggactacccctgggtgatgagggactggctgaaccagaggaacaacttcctgctgccctacttcacagaagatgagaagaagctgatccagggcacctttgacttcctggccctgagccactacaccaccatcctggtggacagcgagaaggaggaccccatcaagtacaatgactacctggaggtgcaggagatgacagacatcacctggctgaacagccccagccaggtggccgtggtgccctggggcctgaggaaggtgctgaactggctgaagttcaagtatggagacctgcccatgtacatcatcagcaatggaattgatgatggcctgcatgctgaagatgaccagctgcgggtgtactacatgcagaactacatcaatgaggccctgaaggcccacatcctggatggcatcaacctgtgtggctactttgcctacagcttcaatgacagaacagcccccaggtttggcctgtaccgctatgctgctgaccagtttgagcccaaggcctccatgaagcactacaggaagatcatcgacagcaatggcttccctggccctgagaccctggagcgcttctgcccagaggagttcaccgtgtgcacagagtgcagcttcttccacaccaggaagagcctgctggccttcatcgccttcctgttctttgccagcatcatcagcctgagcctcatcttctactacagcaagaagggccgccgcagctacaagtag

SEQ ID NO: 149858 - DNA, 3039 bp, Artificial Sequence
  derived and/or modified sequence
atgcccgccagcgcccccccccggcggccccggccccccccccccagtctctctctgctcctggtgctgctggggctgggaggtcggaggttgagagctgagccaggcgatggggctcagacatgggcacgttttagccgtcccccagcccctgaggctgctgggctattccagggtacttttcctgatggattcctgtgggccgttggcagcgccgcttaccagaccgagggcggctggcaacaacatgggaaaggcgcttccatttgggatacattcacccatcatcccctggccccccccggggattcgcgcaatgcatcgttgcccctgggtgctcctagcccactgcagcctgcaaccggagatgtggcatcagactcatataataacgtgttccgcgacaccgaagcgcttagggagttgggcgtgactcattacaggttttccattagttgggccagggtcctaccgaacggttctgccggcgtgccaaatcgggaggggctacggtactataggagactgctggaaagactacgcgagttgggggtccagcccgttgtcaccctttaccactgggacctcccccagcgcctgcaagacgcctatgggggctgggcaaacagagcactagccgaccactttcgggactacgccgaactttgcttccgacacttcgggggacaggtcaaatattggattacgattgataatccctatgtcgtggcgtggcacggctatgccacagggaggctggcaccgggcatcagaggatcgccgaggttggggtatctagtggcccacaaccttctgctcgcacacgccaaggtctggcacctgtacaacacttccttccgacccacacaggggggccaggtttcaattgctctgagctcccattggattaatcctcgcaggatgactgatcattctattaaagagtgccagaagtccttagacttcgttctgggctggtttgctaaacctgtgtttatcgacggagattacccagaatcgatgaagaacaacttgtctagcattctgcctgacttcacagagagcgagaagaagttcataaaaggaaccgcagattttttcgcactgtgcttcgggcccaccctgtcctttcagcttctcgaccctcatatgaaattccgccagctcgagtctccaaatctgaggcagctgttgagctggatcgaccttgaattcaaccacccacagattttcatcgtcgagaacggctggttcgtgagcgggacgacaaaaagggacgacgctaagtacatgtactacctgaagaaatttatcatggagactttaaaggcgatcaagctagatggcgttgatgtgattggttacacggcctggtcacttatggacggttttgaatggcacagaggctatagcattcgccgcggtctgttttatgtcgattttctgagccaggacaagatgctcctgccgaagagctctgcacttttttatcaaaagctgattgagaagaatgggtttccccctctgcccgaaaaccaaccccttgaaggaactttcccatgtgacttcgcctggggcgtggtggacaactacatccaggtggataccaccctcagccaatttaccgatctcaacgtttatctgtgggacgtgcaccattctaagagattaattaaggtcgacggcgtggtcaccaagaagcggaagagctactgcgtggattttgctgccatccagccccaaatagccttgcttcaagaaatgcacgttactcatttccgattctcgctcgattgggccctgattctgccactgggtaatcagagtcaggtgaatcacaccattttgcagtattaccgctgcatggcatctgagcttgtcagggtgaacatcacgcccgtggtagcactatggcaacccatggcaccaaaccagggcctgcctcgcctgctcgccagacagggggcatgggagaatccttacaccgcgctggcttttgcggaatatgcgaggctgtgtttccaggaattggggcaccatgtcaaattgtggatcactatgaacgagccctacacaagaaatatgacttatagtgccgggcataacctcttaaaggctcacgctctggcttggcacgtttacaatgagaagtttcgtcatgctcagaatggtaaaatcagcatagcgttacaggccgattggatagagcccgcctgcccattctcgcaaaaggataaggaagtcgctgagagggtcctcgagttcgacatcggctggctcgctgagcctatcttcggtagcggggactacccctgggtgatgcgagactggctcaatcagaggaacaatttcctgctaccctattttaccgaggatgagaaaaagttgatacagggcacatttgattttttggcactgtcccattataccacgattctcgtcgactccgagaaagaggatcccattaaatacaacgattatctcgaagtgcaggagatgaccgatatcacctggttaaactccccctcgcaagtggcagtggtaccttggggcctgaggaaagtgctcaactggctgaaattcaagtatggggatctcccaatgtacattatctctaacggcatagatgatggtctccatgccgaagacgatcagcttcgcgtttactatatgcaaaactacataaatgaggccttgaaggctcatattctggacgggatcaatctatgtgggtacttcgcctacagtttcaatgaccgcaccgccccacgcttcgggctgtacaggtacgccgcagatcagtttgagcctaaagccagcatgaaacattaccgcaaaatcattgactctaatggtttccccggacccgagaccctcgaacgcttttgccccgaggaattcaccgtgtgcacagaatgttctttttttcacacacgaaagtcattgctggcctttattgctttcctgttctttgcatccattatttctctctccctgattttttactactcaaaaaaagggcgacgaagctataagtag

SEQ ID NO: 149859 - DNA, 3039 bp, Artificial Sequence
  derived and/or modified sequence
atgcccgcatctgcaccacccagacgccctaggcctcccccaccctcgttgagcctgctgctggtgctcctggggctcggcggacggaggttgagggcagaacctggagatggtgctcaaacctgggctagattcagtaggcctccagcccctgaggccgctggcctattccaggggacttttcccgacggatttctgtgggcagtgggcagcgccgcttaccagacagaaggcggatggcagcagcacggcaaaggcgcatccatttgggatacttttacgcaccacccattggctccacccggagactctaggaacgcctctctacccctgggagcgccaagccccctgcagccggctacgggagacgttgcctctgactcctataacaacgtgttccgggataccgaggccctgcgggagttgggggtgacacattaccggttcagtatttcatgggcacgggtcctgccgaatggatcagcaggcgtgcccaaccgagagggcctgaggtattacagacggcttctcgagcggttgagggaactgggagtccagccagtcgtaaccttgtaccactgggatctgccacagaggttacaagatgcttatggcggatgggctaatcgggcacttgcagatcacttccgggattatgcagaactctgtttcagacattttggtggtcaagtaaaatactggattaccatcgataatccatacgtggtagcttggcacggttatgccactggacggctggctccagggatacgcggatcccctcgcctcgggtatctcgtggcccataacttactcctggcgcacgccaaggtctggcatctctacaatacgagctttcggcctactcaaggagggcaggtctcaattgccctgtcttcacactggattaatcctcggcgaatgaccgaccactctataaaggagtgccaaaagtctcttgatttcgttctcggctggtttgccaagcctgtgttcatcgatggggattacccagagtctatgaagaataacctgagcagcattttgcccgattttaccgaatcagagaagaaattcataaagggtactgccgacttttttgccctgtgctttggtccgactttatcattccaactgctcgatccgcacatgaaattccggcagctggagagccctaatctgaggcagctgttgtcttggatagacctggaatttaaccatccacagatctttattgtagagaatggctggttcgtgtccggtactaccaagagggacgatgccaagtacatgtattatctgaaaaagttcatcatggaaactctgaaggctatcaaattggacggagtggatgtcattggctacaccgcttggtctttgatggatgggtttgaatggcaccggggatattctatacgccgaggcctgttttatgtcgatttcctgagccaggacaagatgctgctgcccaagagctcagcgctcttttaccagaagcttatagagaagaacggatttccaccattacctgaaaatcagccactggaagggacattcccttgcgatttcgcgtggggggtcgttgacaactatatacaggtcgataccactcttagccaatttacagacttaaatgtgtacctctgggatgttcatcattcaaagcgtctcatcaaggtggacggagtcgtgactaagaaaaggaaaagctactgtgtggactttgcagctatacagccacaaatcgcactgctacaagagatgcacgttactcatttcaggtttagcttagactgggctctgatattgcccctcgggaaccaatctcaagtcaatcacaccattttgcagtattacaggtgtatggctagcgaactcgtgcgtgtcaacattactccagtggttgccctctggcagccgatggctcccaaccaaggcctgccccgactcctggccaggcagggcgcttgggaaaatccgtatacagcactggctttcgctgagtacgcaaggctctgcttccaggaattaggacatcacgtgaaactctggattacgatgaatgagccctataccagaaacatgacttacagcgcaggccacaatcttttaaaggcccacgcactcgcctggcatgtctataatgagaagtttaggcacgctcagaatggaaagatctccatcgccctccaggctgattggatagagcccgcatgcccattctctcagaaggacaaagaggtggctgaaagggtgctagagtttgatattggttggctggccgagcctatattcgggtccggggattacccctgggtgatgcgcgactggctgaatcagcggaacaatttcctgctcccatacttcaccgaggatgaaaaaaagctcattcagggtacattcgattttctcgcgttgtcccactacacgacaatactcgtggactctgagaaagaagacccaatcaagtataatgattatctagaggttcaggagatgactgacatcacctggttgaattctccttctcaggtggccgtggtgccctggggactccgaaaagtgttgaattggttaaaattcaagtacggcgatctaccgatgtatatcattagtaatggcattgacgatggcctgcacgccgaagatgaccaactcagggtatactatatgcagaattacatcaacgaggctctgaaggcacacattttggacgggatcaacctatgtggctacttcgcctactccttcaatgataggactgctcctcgatttggcctgtataggtatgccgctgaccagttcgaacctaaggcatcgatgaagcattatcgtaaaattatcgacagcaacgggttcccagggccagagaccttggaaaggttctgcccagaggagtttaccgtatgtaccgaatgctccttttttcatactagaaagtcactcctggcttttatcgcatttctgttttttgcatctattatcagccttagcttgattttctactacagcaaaaaaggacggaggtcatacaagtag

SEQ ID NO: 149860 - DNA, 5006 bp, Artificial Sequence
  derived and/or modified sequence
cgcgcagcatgcccgccagcgccccgccgcgccgcccgcggccgccgccgccgtcgctgtcgctgctgctggtgctgctgggcctgggcggccgccgcctgcgtgcggagccgggcgacggcgcgcagacctgggcccgtttctcgcggcctcctgcccccgaggccgcgggcctcttccagggcaccttccccgacggcttcctctgggccgtgggcagcgccgcctaccagaccgagggcggctggcagcagcacggcaagggtgcgtccatctgggatacgttcacccaccaccccctggcacccccgggagactcccggaacgccagtctgccgttgggcgccccgtcgccgctgcagcccgccaccggggacgtagccagcgacagctacaacaacgtcttccgcgacacggaggcgctgcgcgagctcggggtcactcactaccgcttctccatctcgtgggcgcgagtgctccccaatggcagcgcgggcgtccccaaccgcgaggggctgcgctactaccggcgcctgctggagcggctgcgggagctgggcgtgcagcccgtggtcaccctgtaccactgggacctgccccagcgcctgcaggacgcctacggcggctgggccaaccgcgccctggccgaccacttcagggattacgcggagctctgcttccgccacttcggcggtcaggtcaagtactggatcaccatcgacaacccctacgtggtggcctggcacggctacgccaccgggcgcctggcccccggcatccggggcagcccgcggctcgggtacctggtggcgcacaacctcctcctggctcatgccaaagtctggcatctctacaatacttctttccgtcccactcagggaggtcaggtgtccattgccctaagctctcactggatcaatcctcgaagaatgaccgaccacagcatcaaagaatgtcaaaaatctctggactttgtactaggttggtttgccaaacccgtatttattgatggtgactatcccgagagcatgaagaataacctttcatctattctgcctgattttactgaatctgagaaaaagttcatcaaaggaactgctgacttttttgctctttgctttggacccaccttgagttttcaacttttggaccctcacatgaagttccgccaattggaatctcccaacctgaggcaactgctttcctggattgaccttgaatttaaccatcctcaaatatttattgtggaaaatggctggtttgtctcagggaccaccaagagagatgatgccaaatatatgtattacctcaaaaagttcatcatggaaaccttaaaagccatcaagctggatggggtggatgtcatcgggtataccgcatggtccctcatggatggtttcgagtggcacagaggttacagcatcaggcgtggactcttctatgttgactttctaagccaggacaagatgttgttgccaaagtcttcagccttgttctaccaaaagctgatagagaaaaatggcttccctcctttacctgaaaatcagcccctagaagggacatttccctgtgactttgcttggggagttgttgacaactacattcaagtagataccactctgtctcagtttaccgacctgaatgtttacctgtgggatgtccaccacagtaaaaggcttattaaagtggatggggttgtgaccaagaagaggaaatcctactgtgttgactttgctgccatccagccccagatcgctttactccaggaaatgcacgttacacattttcgcttctccctggactgggccctgattctccctctgggtaaccagtcccaggtgaaccacaccatcctgcagtactatcgctgcatggccagcgagcttgtccgtgtcaacatcaccccagtggtggccctgtggcagcctatggccccgaaccaaggactgccgcgcctcctggccaggcagggcgcctgggagaacccctacactgccctggcctttgcagagtatgcccgactgtgctttcaagagctcggccatcacgtcaagctttggataacgatgaatgagccgtatacaaggaatatgacatacagtgctggccacaaccttctgaaggcccatgccctggcttggcatgtgtacaatgaaaagtttaggcatgctcagaatgggaaaatatccatagccttgcaggctgattggatagaacctgcctgccctttctcccaaaaggacaaagaggtggctgagagagttttggaatttgacattggctggctggctgagcccattttcggctctggagattatccatgggtgatgagggactggctgaaccaaagaaacaattttcttcttccttatttcactgaagatgaaaaaaagctaatccagggtacctttgactttttggctttaagccattataccaccatccttgtagactcagaaaaagaagatccaataaaatacaatgattacctagaagtgcaagaaatgaccgacatcacgtggctcaactcccccagtcaggtggcggtagtgccctgggggttgcgcaaagtgctgaactggctgaagttcaagtacggagacctccccatgtacataatatccaatggaatcgatgacgggctgcatgctgaggacgaccagctgagggtgtattatatgcagaattacataaacgaagctctcaaagcccacatactggatggtatcaatctttgcggatactttgcttattcgtttaacgaccgcacagctccgaggtttggcctctatcgttatgctgcagatcagtttgagcccaaggcatccatgaaacattacaggaaaattattgacagcaatggtttcccgggcccagaaactctggaaagattttgtccagaagaattcaccgtgtgtactgagtgcagtttttttcacacccgaaagtctttactggctttcatagcttttctattttttgcttctattatttctctctcccttatattttactactcgaagaaaggcagaagaagttacaaatagttctgaacatttttctattcattcattttgaaataattatgcagacacatcagctgttaaccatttgcacctctaagtgttgtgaaactgtaaatttcatacatttgacttctagaaaacatttttgtggcttatgacagaggttttgaaatgggcataggtgatcgtaaaatattgaataatgcgaatagtgcctgaatttgttctctttttgggtgattaaaaaactgacaggcactataatttctgtaacacactaacaaaagcatgaaaaataggaaccacaccaatgcaacatttgtgcagaaatttgaatgacaagattaggaatattttcttctgcacccacttctaaatttaatgtttttctggaagtagtaattgcaagagttcgaatagaaagttatgtaccaagtaaccatttctcagctgccataataatgcctagtggcttcccctctgtcaaatctagtttcctatggaaaagaagatggcagatacaggagagacgacagagggtcctaggctggaatgttcctttcgaaagcaatgcttctatcaaatactagtattaatttatgtatctggttaatgacatacttggagagcaaattatggaaatgtgtattttatatgatttttgaggtcctgtctaaaccctgtgtccctgagggatctgtctcactggcatcttgttgagggccttgcacataggaaacttttgataagtatctgcggaaaaacaaacatgaatcctgtgatattgggctcttcaggaagcataaagcaattgtgaaatacagtataccgcagtggctctaggtggaggaaaggaggaaaaagtgcttattatgtgcaacattatgattaatctgattatacaccatttttgagcagatcttggaatgaatgacatgacctttccctagagaataaggatgaaataatcactcattctatgaacagtgacactactttctattctttagctgtactgtaatttctttgagttgatagttttacaaattcttaataggttcaaaagcaatctggtctgaataacactggatttgtttctgtgatctctgaggtctattttatgtttttgctgctacttctgtggaagtagctttgaactagttttactttgaactttcacgctgaaacatgctagtgatatctagaaagggctaattaggtctcatcctttaatgccccttaaataagtcttgctgattttcagacagggaagtctctctattacactggagctgttttatagataagtcaatattgtatcaggcaagataaaccaatgtcataacaggcattgccaacctcactgacacagggtcatagtgtataataatatactgtactatataatatatcatctttagaggtatgattttttcatgaaagataagcttttggtaatattcattttaaagtggacttattaaaattggatgctagagaatcaagtttattttatgtatatatttttctgattataagagtaatatatgttcattgtaaaaatttttaaaacacagaaactatatgcaaagaaaaaataaaaattatctataatctcagaacccagaaatagccactattaacatttcctacgtattttattttacatagatcatattgtatatagttagtatctttattaatttttattatgaaactttcctttgtcattattagtcttcaaaagcatgatttttaatagttgttgagtattccaccacaggaatgtatcacaacttaaccgttcccgtttgttagactagtttcttattaatgttgatgaatgttgtttaaaaataattttgttgctacatttactttaatttccttgactgtaaagagaagtaattttgctccttgataaagtattatattaataataaatctgcctgcaactttttgccttctttcataatcata

SEQ ID NO: 149861 - RNA, 1793 nt, Artificial Sequence
  derived and/or modified sequence
gggaaauaagagagaaaagaagaguaagaagaaauauaagagccaccaugcccgcgucggcaccgccgagaaggccccgaccuccuccaccuucacuuagccugcugcuggugcuccucggacugggaggacggaggcugagggccgaacccggagauggggcucaaacgugggccagguucucacggccaccggcucccgaggcugccggcuuguuccaaggaacguuuccggacggguuccuuugggcgguaggaucggcggcauaccagacggagggaggguggcagcagcacgguaaaggggcaucaauuugggacacguucacucaucacccgcucgcuccaccgggugacuccagaaaugcuucgcuuccgcuuggagcacccucaccccuucaaccggccacuggggaugucgcgucagauucguacaauaauguguuucgcgauaccgaagcccuuagagaacuuggcgucacacauuaccgauuuucaauuucaugggcuaggguguugccuaaugggucggcggguguaccgaauagagaaggucugagguauuaucgccgccuucucgaacgccuuagggagcuugggguccaaccggugguaacacuuuaucacugggaccucccacagcggcuccaagaugcguauggagggugggccaaucgggcguuggccgaccacuuuagagacuacgcggaacuuugcuuucgccacuucggaggacaggucaaguauuggauuaccaucgacaauccuuacgugguagccuggcacgguuacgccacggggaggcucgcgccugguauccgcggguccccgcgacucgguuaucuugucgcccacaaccucuuguuggcccacgccaaaguguggcauuuguauaacacaagcuucaggccgacgcagggcggacaggugucaaucgcauugucgucgcacuggaucaaucccaggcggaugaccgaucauucgauuaaggagugccagaagucgcuggacuuuguacuggguugguuugcgaagccaguguuuaucgacggugacuacccugaauccaugaagaacaaucuuagcucgauuuugcccgacuuuacggagucagagaaaaaguuuaucaagggcacggcggacuucuucgcacuuuguuuugggcccacucuuuccuuccagcucuuggacccgcauaugaaauuccgccagcuugagucgcccaaucucagacagcuccugucguggaucgauuuggaguuuaaccacccacaaaucuuuaucguggaaaauggaugguucgugucggguacgacaaagcgggaugaugcgaaguauauguacuacuugaagaaauucaucauggagacacugaaagccaucaaacuugacggcguagaugucaucggauauacagcguggucacucauggauggguuugaauggcauaggggcuacucgauuagacgcgggcuguuuuacgucgacuuuuugagccaggacaaaaugcugcuccccaaaagcuccgccuuguucuaccagaaacuuauugagaaaaacggguucccgccacuuccggaaaaucagcccuuggaagggacauuuccgugcgauuucgcgugggguguaguagacaauuacauucagguaagccagcugacaaaaccgauuuccucauugacaaagcccuaccacugauaagcugccuucugcggggcuugccuucuggccaugcccuucuucucucccuugcaccuguaccucuuggucuuugaauaaagccugaguaggaag

SEQ ID NO: 149862 - protein, 1061 aa, Artificial Sequence
  derived and/or modified sequence
MLGSDDFFYVGGSPSTADLPGSPVSNNFMGCLKEVVYKNNDIRLELSRLARIADTKMKIYGEVVFKCENVATLDPINFETPEAYISLPKWNTKRMGSISFDFRTTEPNGLILFTHGKPQERKDARSQKNTKVDFFAVELLDGNLYLLLDMGSGTIKVKATQKKANDGEWYHVDIQRDGRSGTISVNSRRTPFTASGESEILDLEGDMYLGGLPENRAGLILPTELWTAMLNYGYVGCIRDLFIDGRSKNIRQLAEMQNAAGVKSSCSRMSAKQCDSYPCKNNAVCKDGWNRFICDCTGTGYWGRTCEREASILSYDGSMYMKIIMPMVMHTEAEDVSFRFMSQRAYGLLVATTSRDSADTLRLELDGGRVKLMVNLDCIRINCNSSKGPETLYAGQKLNDNEWHTVRVVRRGKSLKLTVDDDVAEGTMVGDHTRLEFHNIETGIMTEKRYISVVPSSFIGHLQSLMFNGLLYIDLCKNGDIDYCELKARFGLRNIIADPVTFKTKSSYLSLATLQAYTSMHLFFQFKTTSPDGFILFNSGDGNDFIAVELVKGYIHYVFDLGNGPNVIKGNSDRPLNDNQWHNVVITRDNSNTHSLKVDTKVVTQVINGAKNLDLKGDLYMAGLAQGMYSNLPKLVASRDGFQGCLASVDLNGRLPDLINDALHRSGQIERGCEGPSTTCQEDSCANQGVCMQQWEGFTCDCSMTSYSGNQCNDPGATYIFGKSGGLILYTWPANDRPSTRSDRLAVGFSTTVKDGILVRIDSAPGLGDFLQLHIEQGKIGVVFNIGTVDISIKEERTPVNDGKYHVVRFTRNGGNATLQVDNWPVNEHYPTGRQLTIFNTQAQIAIGGKDKGRLFQGQLSGLYYDGLKVLNMAAENNPNIKINGSVRLVGEVPSILGTTQTTSMPPEMSTTVMETTTTMATTTTRKNRSTASIQPTSDDLVSSAECSSDDEDFVECEPSTANPTEPGIRRVPGASEVIRESSSTTGMVVGIVAAAALCILILLYAMYKYRNRDEGSYQVDETRNYISNSAQSNGTLMKEKQQSSKSGHKKQKNKDREYYV

SEQ ID NO: 149863 - DNA, 3186 bp, Artificial Sequence
  derived and/or modified sequence
atgctgggttccgacgacttcttttacgtagggggcagcccctcaacggcagatttgccagggtcacctgtctccaacaatttcatgggatgcctgaaggaggtagtttacaagaataatgatattcgactagagctgtctagattagcgagaattgccgataccaagatgaagatctacggcgaggtagtgttcaagtgtgaaaacgtggcaacattggaccctattaacttcgagactcccgaagcttatatttcactccctaagtggaacaccaagaggatgggctccatatcttttgattttcgcacaactgagcctaatggactgattctctttactcacggcaaacctcaggagcgcaaagatgcacgctctcagaagaataccaaggtggacttcttcgctgttgaactgctggacgggaatctgtatctccttctagatatgggctccggtaccatcaaagtgaaagcaacacaaaagaaggccaatgacggcgaatggtatcatgttgacatacagagggatggccggagcggcacaatcagtgtcaactcaaggagaacccctttcactgcctccggggagtccgagattttggacttagaaggggacatgtatctggggggattgcctgagaatcgggctggcctcattctcccaactgagctttggaccgctatgctgaactacggctatgtcggctgtattcgtgacctcttcatcgacggacgaagtaagaatatccggcagctggctgaaatgcagaatgccgccggcgttaaatcatcctgttctagaatgtccgcgaagcagtgtgattcatacccctgtaagaacaacgctgtttgcaaggatggttggaaccgtttcatttgcgactgcaccggtaccggttactggggtagaacctgcgagagggaggcctccattcttagttacgacggtagcatgtacatgaagattatcatgccgatggtgatgcataccgaggctgaggatgtttctttcaggtttatgtctcaacgggcatacggactactcgtggcaacaacatctagggactctgcagacactcttagactcgagctggatggggggcgtgttaagttgatggtgaatctggactgtattcgcattaactgtaactcatccaaaggacctgaaacactgtacgcgggccagaagcttaatgataacgagtggcatacagtccgagtggtgcgccgcgggaagtctctgaagctcaccgtcgacgacgatgtggcagaaggtacgatggttggggaccacacacgactagagttccacaatatcgaaaccggcatcatgactgaaaaacggtatatttcggtcgtaccttcatcgtttattgggcacttgcagtcccttatgttcaatgggctcctctatatcgacctgtgcaaaaatggtgatatagactactgcgagctaaaagctaggtttgggctcaggaacatcatcgccgaccccgtgaccttcaaaacaaaatcaagttacctgagcttggcaacactacaggcctatacctctatgcacctgttcttccaattcaaaacaacgagtcctgacggatttattctgtttaattccggagacggcaatgattttatcgccgtggaactcgtgaaaggatacatccattatgtcttcgacttaggcaacggccctaacgtcatcaaaggaaatagcgacagaccgctaaacgataatcagtggcataacgtggtgatcactagggataattcgaacactcactctctgaaagttgatacaaaagtagtcacccaggtgattaatggggccaaaaatctggatctgaaaggcgacttgtatatggctggcctcgcccagggtatgtactcaaatctacctaaacttgtggctagtcgagacggcttccaagggtgcctcgcctctgtagacttaaatggtagactgccagacctgatcaatgatgctctgcaccgctctggccagattgagcgcggctgcgaaggaccaagtaccacctgccaggaggattcttgtgccaatcaaggggtgtgtatgcagcaatgggaggggttcacttgcgattgttcgatgactagctatagtgggaaccagtgtaacgatcccggggctacctatattttcggcaagagcggagggcttattctttacacctggccagccaacgatcggccatccactcgcagtgacagactggccgtgggcttctctacaaccgttaaggacggcatcctcgtgcgcattgacagcgctcccggacttggcgattttttgcaactgcatatcgagcagggaaagatcggagtggtttttaatatcggcacggttgatatatccattaaagaggaacggacccccgtaaatgacggcaagtaccacgtggtccgtttcacacgcaatggcgggaatgcaacgctgcaggtggataactggcctgtcaatgaacattatcccacaggcaggcagctgaccattttcaacacccaggctcagattgctatcggggggaaagataagggccggctttttcaaggacaactgagcggcctttattatgatggcctgaaggtcctcaatatggctgctgaaaacaacccgaatatcaaaattaatggtagcgtcagactggtcggggaagtgcccagtatactgggtactacccagacaacaagcatgccccccgagatgtccacaaccgtcatggagaccacgaccacaatggcaacaaccaccacgaggaagaacaggagcacagcgagtatccagccaaccagcgacgatctggtgtcttcagctgagtgtagctccgacgatgaggacttcgttgagtgcgaaccaagtactgccaatccaaccgaaccaggaatacgtagagttccaggtgcgagtgaagttatccgggagagttcctcaactacgggcatggtggtcggaatcgtcgctgccgccgcactttgcatcctgattctgctgtatgctatgtataagtacagaaatcgcgatgaaggatcataccaagttgatgagacccggaactacatctcaaattccgcgcagagcaatggaaccctgatgaaggagaagcagcaaagcagcaaatcaggtcacaagaagcagaaaaacaaagatagagagtactatgtgtag

SEQ ID NO: 149864 - DNA, 3186 bp, Artificial Sequence
  derived and/or modified sequence
atgctgggtagcgatgacttcttctacgtgggaggttcgccatccactgccgacctgcccggctcccccgtgagcaacaatttcatggggtgtctgaaagaagttgtgtataaaaataatgacattcggcttgagctctcccgtctcgcgagaatcgcagacaccaaaatgaaaatttatggagaggtggtctttaagtgcgagaacgtagccaccttagacccgattaatttcgagacaccagaggcatatatctccttgccaaagtggaacacgaaacgaatgggcagtattagtttcgatttccggaccactgagccgaatgggctaatcttatttactcatggcaagcctcaagaacgtaaagacgccagatctcagaaaaacacgaaggtggatttcttcgccgtcgagctgctggacggcaacctgtacttgcttcttgatatgggatcgggtaccatcaaagttaaggctacccagaaaaaagctaacgacggcgagtggtatcacgtggacattcaacgggatgggcggtctggaacaatttcagtgaactccagacgtacaccttttactgcgagcggtgagtctgagattctcgatctggagggtgacatgtatctcggtgggctgccggaaaatagggcaggactcatcttacccaccgagctgtggacagcaatgcttaactatggttatgtcggatgtatcagggacctgttcatagacggacggtctaagaatatcaggcagctggccgagatgcagaatgccgcaggcgtaaagtcctcttgctctcgcatgtccgccaaacaatgcgactcttatccgtgtaagaataacgccgtttgtaaggacgggtggaatcgttttatctgtgattgtacgggcacggggtactggggcagaacctgtgagcgcgaagctagtattctgtcttacgatggtagcatgtacatgaaaattattatgccaatggtgatgcacacagaagcagaggacgtcagcttcaggtttatgagccagagagcatatggactcttggtggcgacaacctcccgcgattccgcagacacactgcgactggaactagatgggggtcgtgtgaagttgatggtgaacctggattgcatcagaatcaattgtaattcatcaaaggggccagagacactctatgctggccagaaactgaatgacaacgagtggcatactgtgcgcgtggttcgccgggggaagtccctgaagctgacagtcgacgacgatgtggcagaaggcacaatggtcggcgatcacacgcgccttgaatttcataacatagagacgggtattatgacggaaaagaggtacatatccgttgtgccatcatcttttattggtcacctgcaatcccttatgtttaatggtctgctttacattgacctctgcaagaacggggatatcgattactgcgagctgaaggcaaggttcgggctgcggaatataattgcagaccccgtgacatttaagaccaagtccagctatctttctctggctaccctgcaggcgtacacaagcatgcatctcttttttcaattcaaaactacctccccagatggatttattctgttcaatagtggtgatggcaacgacttcatcgccgttgagctggtgaagggatacattcactacgtcttcgatctgggcaatggcccaaatgtgataaaaggaaatagtgacagacctttgaacgataaccagtggcataatgtggttatcactcgggacaactcaaatacacacagtctgaaggtcgatacgaaggttgttactcaggttatcaacggggccaagaacctggatttgaaaggcgacctctacatggctgggttggcacagggcatgtattccaatcttccaaagctcgtcgcgtccagagatggcttccagggctgcttggcaagcgtggacttgaatggtcggcttccagacttgatcaacgacgctttgcatcggtcagggcagatcgagcgcggatgtgaaggtcccagcacaacgtgccaggaggatagctgtgcaaaccagggtgtctgtatgcagcagtgggaaggttttacgtgtgattgctctatgacctcttatagtgggaaccaatgtaatgaccccggcgctacctatatcttcggcaagagcggcgggctgatcctgtatacctggccagcaaacgaccgacccagcactcgcagcgaccggctggccgtcggattctcgacgacagtgaaggatggtatcctggtgagaattgacagcgcccctgggctcggcgacttcctgcagctccacatagaacaaggaaagataggggtagtgtttaacatcgggaccgtggacataagtataaaggaagagcgcacaccagttaacgacgggaagtaccacgttgtgcggttcactcggaatggggggaatgccacgctgcaggtggataattggccagtgaacgagcactatccgactggaagacagctaactatctttaacactcaggctcaaatcgcaattggcgggaaagataagggcagattgttccagggtcagctatccggactttactacgatggtttgaaggtgctgaatatggcggccgagaataatccaaatattaagattaacggctctgtgagactggtcggggaagtcccatccattttaggcactacacagaccacctccatgcccccagaaatgtccacgacggtgatggaaacgactactacaatggcaaccactacaacaaggaagaatagaagcaccgcctctatacagccgacttccgatgacctcgtgtctagcgctgaatgctctagcgatgatgaggattttgtggagtgtgagccgagcactgccaatcccactgagcctggaatccggcgtgtgcccggcgccagcgaggtaattcgggagtcgagcagcactacaggaatggttgttggcattgtcgccgccgcagctctgtgcattctcattctcctctatgccatgtataaatatcggaaccgcgacgaaggtagttatcaggttgacgagacaagaaactacatcagcaatagcgcacagtcaaatggtacacttatgaaggagaagcagcagagctcaaaaagcggccataaaaagcaaaagaataaggaccgcgagtattacgtctag

SEQ ID NO: 149865 - DNA, 3186 bp, Artificial Sequence
  derived and/or modified sequence
atgctgggcagtgatgacttcttctacgtgggcggcagccccagcacagctgacctgcccggcagccctgtgagcaacaacttcatgggctgcctgaaggaggtggtgtacaagaacaatgacatccggctggagctgagccggctggccagaattgctgacaccaagatgaagatctacggggaggtggtgttcaagtgtgaaaatgtggccaccctggaccccatcaactttgagaccccagaggcctacatcagcctgcccaagtggaacaccaagaggatgggcagcatcagctttgacttccgcaccacagagcccaacggcctcatcctcttcacccacggcaagccccaggagaggaaggatgcccggagccagaagaacaccaaggtggacttctttgctgtggagctgctggatggcaacctgtacctgctgctggacatgggcagcggcaccatcaaggtgaaggccacccagaagaaggccaatgatggagagtggtaccacgtggacatccagagagatggccgcagcggcaccatctctgtgaacagcaggaggacccccttcaccgccagcggggagagcgagatcctggacctggagggggacatgtacctgggcggcctgcctgagaacagagctggcctcatcctgcccacagagctgtggacagccatgctgaactacggctacgtgggctgcatccgggacctcttcattgatggccgcagcaagaacatccggcagctggccgagatgcagaatgctgctggggtgaagagcagctgcagcaggatgtctgccaagcagtgtgacagctacccctgcaagaacaatgctgtgtgcaaggatggctggaaccgcttcatctgtgactgcacaggaacaggctactggggccgcacctgtgagcgggaggccagcatcctgtcctatgatggctccatgtacatgaagatcatcatgcccatggtgatgcacacagaagcagaagatgtgtccttccgcttcatgagccagagggcctacggcctgctggtggccaccaccagccgggacagcgctgacaccctgcggctggagctggatggcggccgggtgaagctgatggtgaacctggactgcatccgcatcaactgcaacagcagcaaaggacctgagaccctgtatgccggccagaagctgaatgacaatgagtggcacacagtgcgggtggtgcggcggggcaagagcctgaagctgactgtggatgatgatgtggccgagggcaccatggtgggggaccacacccggctggagttccacaacatcgagaccggcatcatgacagagaagcgctacatctctgtggtgcccagcagcttcatcggccacctgcagagcctgatgttcaacggcctgctgtacatcgacctgtgcaagaatggagacatcgactactgtgagctgaaggcccgcttcggcctgaggaacatcatcgctgaccctgtgaccttcaagaccaagagcagctacctgagcctggccaccctgcaggcctacacctccatgcacctgttcttccagttcaagaccaccagcccagatggcttcatcctcttcaacagcggagatggaaatgacttcatcgctgtggagctggtgaagggctacatccactacgtgtttgacctgggcaatggccccaacgtcatcaagggcaacagcgaccggcccctgaatgacaaccagtggcacaacgtggtgatcacccgggacaacagcaacacccacagcctgaaggtggacaccaaggtggtgacccaggtgatcaacggggccaagaacctggacctgaagggggacctgtacatggccggcctggcccagggcatgtacagcaacctgcccaagctggtggccagcagagatggcttccagggctgcctggcctctgtggacctgaatggccgcctgcctgacctgatcaatgatgccctgcacaggagcggccagatcgagcggggctgtgagggccccagcaccacctgccaggaggacagctgtgccaaccagggcgtgtgcatgcagcagtgggagggcttcacctgtgactgcagcatgaccagctacagcggcaaccagtgcaatgaccccggggccacctacatctttgggaagagcggcggcctcatcctgtacacctggccagccaatgaccggcccagcaccaggagtgaccggctggccgtgggcttcagcaccaccgtgaaggatggcatcctggtgagaattgattctgcccctggcctgggggacttcctgcagctgcacatcgagcagggcaagattggagtggtgttcaacatcggcaccgtggacatcagcatcaaggaggagaggacccctgtgaatgatggcaagtaccacgtggtgcgcttcaccagaaatggaggaaatgccaccctgcaggtggacaactggcctgtgaatgagcactaccccaccggccggcagctgaccatcttcaacacccaggcccagatcgccatcggcggcaaggacaagggccgcctcttccagggccagctgagcggcctgtactatgatggcctgaaggtgctgaacatggctgctgagaacaaccccaacatcaagatcaatggatctgtgcggctggtgggggaggtgcccagcatcctgggcaccacccagaccacctccatgcctcctgagatgagcaccaccgtgatggagaccaccaccaccatggccaccaccaccaccaggaagaacagaagcacagccagcatccagcccaccagtgatgacctggtgagcagcgctgagtgcagcagtgatgatgaggactttgtggagtgtgagcccagcacagccaaccccacagagcccggcatccggcgggtgcctggggccagcgaggtgatccgggagagcagcagcaccaccggcatggtggtgggcatcgtggccgccgccgccctgtgcatcctgatcctgctgtatgccatgtacaagtacagaaacagagatgagggcagctaccaggtggatgagaccaggaactacatcagcaacagcgcccagagcaatggcaccctgatgaaggagaagcagcagagcagcaagagcggccacaagaagcagaagaacaaggaccgggagtactacgtgtag

SEQ ID NO: 149866 - DNA, 3186 bp, Artificial Sequence
  derived and/or modified sequence
atgctgggcagcgacgacttcttctacgtgggcggcagccccagcacggctgacctcccaggctctccagtgagtaacaacttcatgggctgcctgaaggaggtagtttacaaaaacaacgacatccgcctggaactctccaggctggcacgaatcgcagacaccaaaatgaaaatctacggggaggttgtgtttaagtgcgaaaacgtcgcgaccctggacccaatcaattttgagacgccagaagcatatatttcgcttcctaagtggaacaccaagcgcatgggcagcatttcatttgatttccggactaccgaacccaatggattaatactattcactcacgggaaaccccaggaaaggaaagacgcccgttcacagaaaaatacgaaggttgattttttcgctgtcgagctgctggatgggaatctatacctgttgctcgatatgggcagcggaactatcaaggtcaaggccactcagaagaaagcgaacgatggcgaatggtaccatgtggatatacagagggacgggcggtcagggacaatctccgtaaactccaggcgcactcccttcacagcctccggtgaatcggagatacttgacttagagggagatatgtacttaggaggtttacctgaaaaccgcgccggacttattcttcctactgagttgtggacagctatgctgaactacgggtatgtgggctgtattagagaccttttcatcgacggcaggagcaagaacattagacagctggccgagatgcagaacgctgccggggtgaagagcagttgttcacgtatgagcgccaaacagtgcgattcttatccatgcaagaacaatgccgtgtgtaaagatgggtggaaccgatttatatgcgattgcaccggtaccggatactggggaagaacttgtgagcgcgaggcaagcatcctgtcttacgatggctccatgtatatgaagatcatcatgcccatggtgatgcatacggaggccgaagatgtgtcgttccgtttcatgagtcaaagagcatatggcttgctcgtcgccacaacctctcgggattccgcagacaccctgcgcctggaactggacggcgggcgggtgaaactgatggtgaacctagactgtatccgaatcaactgtaacagttccaaaggtccggaaactttgtatgcaggccagaagcttaacgataacgaatggcacaccgtgagagttgtgcggcgtggcaagtcccttaaacttacggttgacgatgatgttgcggaaggaaccatggtgggtgaccacaccagacttgagttccataatatagagactggtattatgacagagaagagatatatatcagtggttcctagttccttcatcggtcacttacagtctctcatgtttaatggtctcctgtatattgacctctgtaagaacggcgacattgactactgtgaacttaaagcaaggtttggactgcgaaacatcatcgctgaccctgtgacgttcaagacaaagagcagctatctgagtttggccacattacaggcgtatacctctatgcacctcttcttccagttcaagactacttctcccgatggttttattctttttaattcaggggacgggaatgactttatcgcggtcgagttggttaagggatacatccactatgtgtttgacctcggtaatgggcctaatgtgattaaaggaaatagcgacaggcccctgaatgacaaccaatggcataatgtcgtgattaccagagacaactctaatacccactcgctgaaggttgacacaaaagtggtcacccaggtcataaatggagccaagaatcttgacctgaaaggcgacctatacatggcgggactggcacaaggcatgtactccaatctgccaaaactagttgctagtagggacggcttccaggggtgcctagcctctgtcgatcttaatggacggctgcccgacttaataaacgatgccctccatcgctctgggcagatcgagcgggggtgcgagggcccttccaccacttgccaggaagatagctgtgcaaatcagggcgtgtgtatgcagcagtgggagggcttcacatgtgactgcagcatgacttcatatagtgggaatcaatgtaatgatcccggggctacctacattttcgggaagagtggaggcctgatactctacacttggcccgccaatgatcgaccaagtaccaggtccgacaggctggctgtaggattctccacaacggtgaaagatggtattcttgtcaggatagatagtgcacccggtctgggcgatttcctccagctccacatcgagcagggtaaaattggagtcgtctttaatattggaacggttgacatctctattaaggaagagcggactcctgtgaacgatggaaaatatcacgtggtgagattcacacgcaatggaggcaatgccactcttcaggttgacaactggccagtcaatgagcactaccctaccgggcggcaactgacaatatttaatacacaggcccaaatagctatcggcggaaaagataagggcagactgttccagggccaactgagcgggctatattacgacggcctgaaggtactcaacatggcggctgagaacaatcccaatatcaagatcaacggctccgtacggctggtcggagaagtacccagcattctgggtaccacccagactacgagcatgccacctgagatgtctaccactgtgatggagactactaccacaatggctacaactactaccaggaagaaccggagcacagcctcaatccagcccactagcgacgacctcgtgagtagcgctgagtgttcttccgacgatgaggacttcgtcgagtgtgagccctcgactgcaaaccccaccgagccaggcataaggagggtgcccggggcaagcgaagtgattcgagagtcgtcttcaaccacaggcatggtcgtcggcatcgtcgcagccgctgccctgtgtatcctcatcctgctctatgccatgtacaaatataggaatcgggacgagggctcctatcaggtcgacgaaacccgtaattatatctccaattccgcacaaagcaatggcacactgatgaaagagaaacagcagtcctccaagtcgggccacaagaagcagaaaaataaggacagagaatactacgtctag

SEQ ID NO: 149867 - DNA, 3186 bp, Artificial Sequence
  derived and/or modified sequence
atgctgggcagcgacgacttcttctacgtgggcggcagccccagcaccgctgatctcccggggtcaccagtgtcaaataattttatgggctgtctcaaggaggtcgtgtacaagaataacgacattcgcttagagttatcaagattggcgaggatcgctgataccaaaatgaagatatatggagaagttgtgtttaaatgtgagaatgtggctacccttgatcccattaatttcgaaacaccagaggcgtatattagtttgccaaaatggaacaccaagcgtatgggtagtattagcttcgatttccgcacgactgaacccaacggtctgatcctctttacacacggaaaaccccaggaacgtaaagatgctaggtctcaaaagaatacaaaggtggacttttttgccgtggagctcctggacggaaacctctatctgctgcttgatatgggctctggtaccattaaggtgaaggctacgcagaagaaggccaacgatggtgagtggtaccatgtggacatacagagggatgggcggtctggcactatcagtgttaacagccgacggacccccttcacagcctccggtgaatccgagatcctcgacctggagggggacatgtacctggggggcctgcccgagaacagagcgggtctgatccttcccaccgaactttggacggccatgctgaattacggatatgtgggctgtattagggatctattcatagacggaagatctaagaatatccgccagctggctgaaatgcagaacgctgcgggggtgaagagttcctgtagtcggatgagcgccaaacagtgtgattcttatccttgtaaaaataatgctgtttgtaaggacggctggaatcgattcatatgtgattgtaccggtacaggatactggggaaggacctgtgagcgcgaggcaagcatcctatcatacgatggttccatgtatatgaagatcataatgcccatggtaatgcacactgaagccgaggacgtgagctttagattcatgtcacagagagcatacgggctgctggtcgcgacaacttctagagacagcgcagacacattgcggcttgaacttgatggcggaagagtgaaacttatggtgaatctggactgtatccggataaactgcaatagttccaagggtccggagaccctatacgccggccagaagctcaatgacaatgagtggcacacagtcagggtggtcaggcgcggaaagtctcttaaacttaccgtggatgatgacgtggccgagggcacaatggtcggcgaccatacccggctcgaattccacaatatagagaccgggatcatgaccgaaaaaagatacatatccgtggtcccctcgtcatttatcggccatctccagagcctgatgttcaatgggctgttatacattgacctttgtaagaacggcgatatagactactgtgaacttaaagctagattcggcctgagaaacatcattgctgatcccgttactttcaaaaccaagtcctcatacctttccctggctacccttcaggcttatacttcaatgcacctcttttttcagttcaaaaccacctctcccgacgggtttattctcttcaattccggcgacggaaacgatttcattgccgtagagctggtgaaaggatacattcattacgtctttgatcttgggaacggcccgaacgtgatcaaggggaacagtgatcgtccactgaatgacaaccagtggcacaacgttgtgatcacccgcgacaacagcaacactcattcactgaaggtcgacacgaaggtcgtgacccaggtgataaatggcgcaaagaatctggatctgaaaggcgacctgtatatggctggcctcgcccagggaatgtattcaaatttacctaaactggtcgctagtcgggatggtttccagggatgcctggccagcgtcgatctcaatggacgtcttcctgacctcataaacgacgccttgcaccgatccgggcagatcgaacggggatgtgagggccctagcactacctgccaggaagacagctgtgcgaatcagggagtgtgtatgcagcagtgggagggatttacctgcgattgctccatgacatcatacagcgggaatcagtgtaacgaccctggtgcaacctatatattcggaaagagcggcgggctaattctttacacgtggccggcaaacgaccggcctagcacgcggagtgacagattggccgtcgggtttagtacgaccgttaaagacggaatcttggtgcgcatcgatagcgctcccggtctaggggactttctccagcttcatattgagcaaggaaagatcggagtggtattcaatatcgggaccgtggatatttccataaaagaagagaggacccccgtgaatgatggcaagtatcacgtggtgcggttcactcgaaacggaggcaacgccacactgcaggtggacaattggcccgttaatgaacattatcccacagggcgccagcttactattttcaatacacaggcccagattgctatcggcggcaaggataagggaagactgtttcagggccagctatcaggcctgtactacgatgggctgaaagtgctgaatatggcggctgagaataaccccaacattaaaatcaacggttcagtcaggctagttggcgaggtcccgtcaatcctgggtacaacacagaccacctcgatgccgcccgaaatgtctactaccgtgatggaaaccacgacaaccatggccaccaccaccacacggaagaataggtccactgctagtatccagccaacctccgatgatcttgtgtctagcgcagaatgttcctcggacgacgaagacttcgtggagtgtgaaccaagcacagcaaaccccaccgaacccgggattaggagagtcccaggcgcttctgaagttatcagagagtcatcctccacgactggtatggtggtcggaatcgtggccgcagccgcactctgtatcttgattctgctttatgccatgtataaataccgtaacagggatgagggatcttatcaggtggatgagacacgtaattatataagcaactcagctcagagtaatggcacgttgatgaaggaaaaacagcagtcgtcaaagtccggacataagaaacagaagaacaaagatcgggagtactatgtgtag

SEQ ID NO: 149868 - DNA, 3186 bp, Artificial Sequence
  derived and/or modified sequence
atgctggggtcggatgattttttttatgtgggcggttcaccatccacagctgatttacccggatcccctgtgagcaacaattttatgggatgtctcaaggaagtcgtatacaaaaataacgacattcggttagaattgtctcgtctggccagaatagcagacaccaagatgaaaatctacggtgaagtcgtgttcaagtgtgaaaacgtcgctacgctggatccaattaattttgaaacccccgaagcttatattagccttcccaaatggaatacaaagaggatgggatctatctctttcgattttcgaaccacggagcctaacggcctaatcctgtttacccatggcaagcctcaggagcggaaggatgcaaggtcacaaaagaacaccaaggttgacttctttgctgtcgagctgctagatggcaacctgtatctgctgctagatatgggttccgggaccatcaaagtaaaggcaacccagaagaaggccaatgacggagagtggtaccatgttgacattcagcgggacggcagaagcgggaccattagtgtcaattctcgcaggactccgttcaccgcctccggcgagagtgaaatcctggacctcgagggcgatatgtacttaggcggactgcctgagaatagggccggactgatcctgccaactgagttgtggactgcgatgctaaattatgggtacgttgggtgtataagggatctgttcatagacggccgttccaagaatattcgccagcttgctgagatgcagaatgccgctggggttaaaagtagttgttccagaatgtccgctaagcagtgcgatagttatccctgcaaaaacaacgccgtttgcaaggacggttggaatagattcatctgtgactgtaccggaaccgggtattggggaaggacgtgtgagcgcgaagcgtccatcttgtcttatgacgggagcatgtatatgaaaattataatgcccatggtgatgcacactgaagccgaagacgtttcgtttaggtttatgagtcagagggcctatggtctcctcgtagcaactacaagccgcgattcggctgatacccttcggctggagttggatggtggcagggtgaagctcatggttaaccttgattgtatccgcatcaattgtaactcaagcaaaggcccagagaccttgtacgcaggtcagaagttgaacgataacgagtggcacaccgtacgagtggtgcggaggggcaagtctctgaagctgaccgttgatgatgacgtcgccgaagggactatggtgggggaccatacaagacttgagtttcacaatatcgagaccggaattatgaccgaaaagcgatatatcagcgtagtaccctcatcattcatcgggcacctgcagagcctcatgttcaacggccttctttacatcgatctgtgcaaaaatggggacatcgactactgtgagctgaaggcaagattcggactgcggaatatcatagccgacccagtcaccttcaaaaccaaaagtagctacctttcactagcgactctccaggcatatacttctatgcatctgtttttccagttcaaaaccacatctccggacggctttattttgtttaattccggcgacggcaacgattttatcgctgttgagctggtaaaggggtatattcattacgtattcgacctgggcaatggtccaaacgttatcaaaggcaacagtgatcgacccctaaacgacaatcagtggcataatgtagttatcacccgtgacaactccaacactcacagtctgaaggtcgacactaaggtcgtcacccaggtcatcaacggagccaagaatttggacctgaagggcgatctgtacatggcaggcctcgctcagggaatgtactcaaatttaccaaagttggtggcaagtcgcgacggcttccagggctgtctggctagcgtggatctgaatgggagactccctgacctgattaacgacgctctgcaccgatctgggcagattgagcgcggttgcgagggcccatccaccacctgccaagaagactcttgcgctaatcagggagtctgtatgcagcagtgggagggattcacctgcgactgctctatgacatcctattccgggaaccaatgcaatgaccccggagccacatatatattcggcaaatcaggcggtctgattttgtacacttggcccgctaacgatcgcccaagcactcgctccgatcgcctggcagtcgggttttccactactgtgaaggatggcatcctcgttcgcatcgactcggccccagggctgggcgacttcctccaactgcacatcgagcaaggcaaaattggcgtggtgtttaacataggcacagtcgatatcagcataaaggaagagcgaacccctgttaatgatggtaaataccacgttgttcgattcaccagaaatggaggcaatgccaccttacaagtagataattggccggtaaacgagcattaccctaccgggaggcaactgaccatatttaacactcaggcccagatagctatcgggggaaaagataagggcaggctgttccaaggccagctgagcggactctactacgacggcttaaaagtgttgaatatggctgccgagaataatccaaacattaaaatcaacggctcggtgcgacttgtgggcgaggtgcccagtatcttagggactacacaaactacaagtatgcctcccgagatgtcaaccacagttatggaaactacaaccacaatggcgacaactactaccagaaaaaaccggtcaaccgctagtattcagcccacctcagatgacctagtctccagcgctgaatgctcaagtgacgatgaagacttcgtggagtgcgagccttctaccgcaaacccaactgagcccggaatccgaagggttcccggtgcaagcgaagtcatacgtgagtcgagctcaaccaccggaatggtggttggcatagtggccgctgccgcactgtgtattctgatcctcttatatgcaatgtacaagtatcggaacagggacgaagggagctaccaggtggacgaaaccaggaattacattagcaacagcgctcagagtaacggtacactgatgaaggaaaagcagcagagttcaaagtctggacataagaagcagaagaataaagatagagaatattacgtctag

SEQ ID NO: 149869 - DNA, 3186 bp, Artificial Sequence
  derived and/or modified sequence
atgctcggttccgatgatttcttttatgtcggaggctcaccaagcaccgctgacttgccagggagcccagtcagtaataactttatggggtgcctgaaggaagttgtgtacaagaataacgatattcgcctggagctgagtaggctggcgaggatcgccgacaccaaaatgaagatctacggtgaagtcgtgtttaagtgcgaaaacgtggctactcttgaccccattaacttcgaaacgcccgaggcctacattagcctgccaaagtggaacacaaaaaggatgggctctatttcattcgatttccgtactactgagccaaacggacttatcctcttcacacatggaaaacctcaagagcgcaaagacgccagaagccagaagaatacaaaagtggacttcttcgccgtagagctcctggacgggaacctgtatctgttgcttgacatgggctcagggactatcaaggtaaaggccacacagaaaaaggcaaatgatggagagtggtatcacgtggacatccagcgcgatggaaggtccggcacaatcagcgtgaactcaaggcgtaccccttttacagcgtctggcgaatctgagatcctcgatcttgaaggcgatatgtatctgggaggcctgccagaaaatcgcgcaggtttaattctgccaactgagctctggacagccatgctgaactatggatatgtgggatgtattagggatctgttcattgacgggcgttcaaaaaatatccggcagttagctgagatgcagaacgcggctggtgtgaagtccagttgctctcgaatgtccgctaaacagtgcgattcctacccatgcaagaataacgccgtttgcaaggacggttggaaccgcttcatatgtgactgtaccggcaccggatactggggcaggacttgcgagagggaagctagcatacttagttacgacgggtcaatgtacatgaagataattatgccgatggtgatgcatactgaggccgaagacgtgtccttcagatttatgtcacagagggcctacggactgcttgtggctaccaccagccgtgactccgcagacaccctgcggttggaattagatggagggcgagtcaagcttatggtgaatctcgactgtattcgcatcaactgtaacagctccaaggggcctgagaccttatacgcaggacagaagctgaatgataacgagtggcacacagtgcgcgtggtgagacggggaaagagcctgaagctgaccgttgacgacgacgtcgctgagggaacaatggtgggggatcacactaggctggaattccacaacatagaaacagggataatgactgaaaaaaggtacataagcgtggtgcccagcagcttcattggacatttgcagagtctgatgtttaacggcctcctttatatcgatctttgcaagaacggagacattgactactgtgaactgaaagcacgatttggactgcggaacattattgccgaccccgttacgtttaagacaaagtctagttacctgtccctggctacgctgcaagcatatacatcaatgcatctgttcttccagttcaaaactacatcacctgacggctttatcctgttcaacagcggtgacggaaacgatttcattgctgtggaattggtgaagggctatatacactacgtcttcgacttgggaaacggtcccaacgttattaagggaaacagcgaccggcctctcaacgacaaccagtggcacaatgtggtaattactcgggacaactctaatacccattcactgaaggtggataccaaggttgtaacgcaagtgatcaacggtgccaagaatctggaccttaaaggggacctttacatggccggtctcgcacagggcatgtattctaacctgccgaaactcgtggccagtagggacggctttcagggttgtctcgccagcgtggacctaaatgggcgactccccgacctaatcaatgatgctctgcatcggtccggccagatagaacgtggctgcgagggtccctctactacatgtcaggaggacagctgtgctaatcagggagtgtgtatgcagcaatgggaagggttcacatgtgactgttctatgacgtcctactcggggaaccagtgcaatgacccaggagccacatacatctttggcaaatcaggcggactcatcctatacacctggcccgcaaacgatcgcccatcaacacgaagcgatagactagcagtgggttttagcaccaccgtgaaagatggtatcctggtgaggattgactctgcgcctggacttggcgactttcttcagttgcatattgagcaggggaaaataggggtcgtatttaacattggaacagtagacatatctataaaagaggagagaacacccgtcaatgatggcaagtatcacgtcgttagattcacaaggaatggcggaaatgccactctgcaggtggataactggccagtgaacgagcactatccaactggcaggcaacttactatctttaatacacaggcccagattgccataggcggaaaagacaaggggagactcttccagggccagcttagtggactctactacgatggcctgaaagttctgaatatggccgctgaaaacaatccaaatattaagatcaatggaagcgtgcggctcgtcggcgaagtcccctccatactgggcacaacacagaccacctccatgcccccagaaatgagcacgacagtgatggagaccacaactactatggcaactaccactacacgaaaaaaccggtctaccgccagcattcagccgacttcggacgatcttgtgtcttccgctgaatgttcctctgatgatgaggatttcgtggaatgcgaaccatcaaccgcgaaccctacagaaccagggattcgcagggtgcctggggcttccgaagtgatcagagaaagttcgtctacaaccggtatggtggtaggaatcgtcgccgctgctgccctgtgcatcctgatcctgctctacgccatgtacaagtataggaacagggacgaagggagctaccaagtggatgagacacgaaactatatctccaactctgcacagagcaacggaacactgatgaaggaaaagcaacagagttctaaaagtggacacaaaaaacagaagaataaagaccgcgagtactatgtttag

SEQ ID NO: 149870 - DNA, 3186 bp, Artificial Sequence
  derived and/or modified sequence
atgctgggcagcgacgacttcttctacgtgggcggcagccccagcaccgccgacctgcccggcagccccgtgagcaacaacttcatgggctgcctgaaggaggtggtgtacaagaacaacgacatcagactggagctgagcagactggccagaatcgccgacaccaagatgaagatctacggcgaggtggtgttcaagtgcgagaacgtggccaccctggaccccatcaacttcgagacccccgaggcctacatcagcctgcccaagtggaacaccaagagaatgggcagcatcagcttcgacttcagaaccaccgagcccaacggcctgatcctgttcacccacggcaagccccaggagagaaaggacgccagaagccagaagaacaccaaggtggacttcttcgccgtggagctgctggacggcaacctgtacctgctgctggacatgggcagcggcaccatcaaggtgaaggccacccagaagaaggccaacgacggcgagtggtaccacgtggacatccagagagacggcagaagcggcaccatcagcgtgaacagcagaagaacccccttcaccgccagcggcgagagcgagatcctggacctggagggcgacatgtacctgggcggcctgcccgagaacagagccggcctgatcctgcccaccgagctgtggaccgccatgctgaactacggctacgtgggctgcatcagagacctgttcatcgacggcagaagcaagaacatcagacagctggccgagatgcagaacgccgccggcgtgaagagcagctgcagcagaatgagcgccaagcagtgcgacagctacccctgcaagaacaacgccgtgtgcaaggacggctggaacagattcatctgcgactgcaccggcaccggctactggggcagaacctgcgagagagaggccagcatcctgagctacgacggcagcatgtacatgaagatcatcatgcccatggtgatgcacaccgaggccgaggacgtgagcttcagattcatgagccagagagcctacggcctgctggtggccaccaccagcagagacagcgccgacaccctgagactggagctggacggcggcagagtgaagctgatggtgaacctggactgcatcagaatcaactgcaacagcagcaagggccccgagaccctgtacgccggccagaagctgaacgacaacgagtggcacaccgtgagagtggtgagaagaggcaagagcctgaagctgaccgtggacgacgacgtggccgagggcaccatggtgggcgaccacaccagactggagttccacaacatcgagaccggcatcatgaccgagaagagatacatcagcgtggtgcccagcagcttcatcggccacctgcagagcctgatgttcaacggcctgctgtacatcgacctgtgcaagaacggcgacatcgactactgcgagctgaaggccagattcggcctgagaaacatcatcgccgaccccgtgaccttcaagaccaagagcagctacctgagcctggccaccctgcaggcctacaccagcatgcacctgttcttccagttcaagaccaccagccccgacggcttcatcctgttcaacagcggcgacggcaacgacttcatcgccgtggagctggtgaagggctacatccactacgtgttcgacctgggcaacggccccaacgtgatcaagggcaacagcgacagacccctgaacgacaaccagtggcacaacgtggtgatcaccagagacaacagcaacacccacagcctgaaggtggacaccaaggtggtgacccaggtgatcaacggcgccaagaacctggacctgaagggcgacctgtacatggccggcctggcccagggcatgtacagcaacctgcccaagctggtggccagcagagacggcttccagggctgcctggccagcgtggacctgaacggcagactgcccgacctgatcaacgacgccctgcacagaagcggccagatcgagagaggctgcgagggccccagcaccacctgccaggaggacagctgcgccaaccagggcgtgtgcatgcagcagtgggagggcttcacctgcgactgcagcatgaccagctacagcggcaaccagtgcaacgaccccggcgccacctacatcttcggcaagagcggcggcctgatcctgtacacctggcccgccaacgacagacccagcaccagaagcgacagactggccgtgggcttcagcaccaccgtgaaggacggcatcctggtgagaatcgacagcgcccccggcctgggcgacttcctgcagctgcacatcgagcagggcaagatcggcgtggtgttcaacatcggcaccgtggacatcagcatcaaggaggagagaacccccgtgaacgacggcaagtaccacgtggtgagattcaccagaaacggcggcaacgccaccctgcaggtggacaactggcccgtgaacgagcactaccccaccggcagacagctgaccatcttcaacacccaggcccagatcgccatcggcggcaaggacaagggcagactgttccagggccagctgagcggcctgtactacgacggcctgaaggtgctgaacatggccgccgagaacaaccccaacatcaagatcaacggcagcgtgagactggtgggcgaggtgcccagcatcctgggcaccacccagaccaccagcatgccccccgagatgagcaccaccgtgatggagaccaccaccaccatggccaccaccaccaccagaaagaacagaagcaccgccagcatccagcccaccagcgacgacctggtgagcagcgccgagtgcagcagcgacgacgaggacttcgtggagtgcgagcccagcaccgccaaccccaccgagcccggcatcagaagagtgcccggcgccagcgaggtgatcagagagagcagcagcaccaccggcatggtggtgggcatcgtggccgccgccgccctgtgcatcctgatcctgctgtacgccatgtacaagtacagaaacagagacgagggcagctaccaggtggacgagaccagaaactacatcagcaacagcgcccagagcaacggcaccctgatgaaggagaagcagcagagcagcaagagcggccacaagaagcagaagaacaaggacagagagtactacgtgtag

SEQ ID NO: 149871 - protein, 747 aa, Artificial Sequence
  derived and/or modified sequence
MSKLKSSESVRVVVRCRPMNGKEKAASYDKVVDVDVKLGQVSVKNPKGTAHEMPKTFTFDAVYDWNAKQFELYDETFRPLVDSVLQGFNGTIFAYGQTGTGKTYTMEGIRGDPEKRGVIPNSFDHIFTHISRSQNQQYLVRASYLEIYQEEIRDLLSKDQTKRLELKERPDTGVYVKDLSSFVTKSVKEIEHVMNVGNQNRSVGATNMNEHSSRSHAIFVITIECSEVGLDGENHIRVGKLNLVDLAGSERQAKTGAQGERLKEATKINLSLSALGNVISALVDGKSTHIPYRDSKLTRLLQDSLGGNAKTVMVANVGPASYNVEETLTTLRYANRAKNIKNKPRVNEDPKDALLREFQEEIARLKAQLEKRSIGRRKRREKRREGGGSGGGGEEEEEEGEEGEEEGDDKDDYWREQQEKLEIEKRAIVEDHSLVAEEKMRLLKEKEKKMEDLRREKDAAEMLGAKIKAMESKLLVGGKNIVDHTNEQQKILEQKRQEIAEQKRREREIQQQMESRDEETLELKETYSSLQQEVDIKTKKLKKLFSKLQAVKAEIHDLQEEHIKERQELEQTQNELTRELKLKHLIIENFIPLEEKSKIMNRAFFDEEEDHWKLHPITRLENQQMMKRPVSAVGYKRPLSQHARMSMMIRPEARYRAENIVLLELDMPSRTTRDYEGPAIAPKVQAALDAALQDEDEIQVDASSFESTANKKSKARPKSGRKSGSSSSSSGTPASQLYPQSRGLVPK

SEQ ID NO: 149872 - protein, 373 aa, Artificial Sequence
  derived and/or modified sequence
MVANVGPASYNVEETLTTLRYANRAKNIKNKPRVNEDPKDALLREFQEEIARLKAQLEKRSIEEKMRLLKEKEKKMEDLRREKDAAEMLGAKIKAMESKLLVGGKNIVDHTNEQQKILEQKRQEIAEQKRREREIQQQMESRDEETLELKETYSSLQQEVDIKTKKLKKLFSKLQAVKAEIHDLQEEHIKERQELEQTQNELTRELKLKHLIIENFIPLEEKSKIMNRAFFDEEEDHWKLHPITRLENQQMMKRPVSAVGYKRPLSQHARMSMMIRPEARYRAENIVLLELDMPSRTTRDYEGPAIAPKVQAALDAALQDEDEIQVDASSFESTANKKSKARPKSGRKSGSSSSSSGTPASQLYPQSRGLVPK

SEQ ID NO: 149873 - DNA, 2244 bp, Artificial Sequence
  derived and/or modified sequence
atgtcaaagctaaaaagttctgagagtgtccgtgttgtggttaggtgtagaccgatgaatggcaaagagaaagccgcctcttacgacaaggtcgttgacgtggacgtcaaactcgggcaggtgtccgttaaaaatccaaaaggtacagcccatgagatgccaaaaacattcacctttgacgctgtctacgattggaacgctaagcagttcgagctgtatgatgaaaccttccgacctctcgtcgattcggtgctccaagggtttaacggcacgattttcgcatatgggcagactggaactggaaaaacgtacaccatggaaggaattaggggggacccggaaaagcgtggggtcatccccaatagtttcgatcacatctttacccatatctcgcgctcccagaatcagcagtatctggtacgagcgtcttaccttgaaatctaccaggaggagatccgcgacttactgagcaaggaccagaccaaacgactggaactcaaggagaggcccgacacaggagtgtacgtcaaagatctcagttccttcgttaccaagtctgtgaaggagattgaacatgtcatgaatgttgggaatcaaaatcgctccgttggcgcaaccaacatgaatgagcatagttctcgatcccatgctatcttcgtcatcactatagagtgctccgaggtaggtttagacggggagaaccatatcagggttggcaaactgaatttagttgacctcgcaggcagcgagcgccaagccaagacaggtgcacagggggaacgccttaaagaggctactaaaattaatttatcactgtccgccctgggaaacgtgatttccgcactggtggacggcaaatctactcacatcccttaccgcgatagcaagctgacacgtctgctgcaagactcactgggcggcaacgctaaaacagtcatggtggctaacgttggccctgcaagctataacgtcgaggaaacactgacaaccctcaggtacgccaaccgggccaagaatattaagaataagccccgcgtgaatgaggatcccaaggatgccttgctaagggaattccaggaagaaatcgcacggctcaaggcacagctggaaaagaggagtattggtaggcgtaagcgtagggagaagaggagggaggggggggggtctgggggaggcggcgaagaagaagaagaagagggtgaggagggggaagaagaaggagacgacaaggatgattattggcgtgaacaacaggaaaaattggaaattgagaagcgcgctattgttgaggatcattcactagtagcagaggagaagatgcggctgctgaaagaaaaggaaaaaaagatggaagacctcaggcgagagaaggacgcagcggagatgctcggagccaagatcaaggccatggagagcaagctgttagtagggggcaagaacatcgtagatcacaccaatgagcagcagaagatcttggaacagaagcgccaggaaatcgccgagcaaaaaaggagggaaagggagatccagcaacagatggaatcccgagatgaagagacgttagagctcaaggaaacctacagttccttgcagcaggaggtggacatcaagacaaaaaaactgaagaagcttttcagcaagttgcaggccgttaaggcagagatccacgacctgcaggaagagcatattaaggaaaggcaggagctcgagcaaacgcagaacgagttgacccgagagctaaagctcaagcatctcataattgaaaattttattcccctggaagaaaaatcaaagatcatgaacagagctttcttcgacgaggaggaggaccactggaaattgcacccgataacccgactcgaaaaccagcaaatgatgaagagaccagtgagcgcggtgggttacaagcggcctttgtcccagcatgccagaatgagcatgatgatccgtccagaggcgcggtaccgcgccgagaacattgtgctcctggaacttgacatgccatcacgcactacaagagattatgagggtccagctatagcgccaaaggtgcaagccgcgctggatgccgctttgcaggatgaggatgagatacaggtggacgcctcatcctttgaatcaacagctaataagaagtccaaggccaggcccaaatccggaagaaagagtgggtcttccagcagctcttctggtacgcctgcctctcagctttatccacaaagcagaggactcgtccccaaatag

SEQ ID NO: 149874 - DNA, 1122 bp, Artificial Sequence
  derived and/or modified sequence
atggtagctaacgtgggaccagcctcctataacgtcgaagaaacgttgaccacactccgatatgctaacagggctaagaatatcaagaacaaaccccgggtcaacgaggatccaaaggacgcactgttaagggaatttcaggaggagatcgcacgtctgaaagcacagctggaaaaacgatcgatagaagagaagatgcgtctgctgaaggagaaggagaagaaaatggaagatcttcgacgtgaaaaggatgccgccgagatgctgggtgccaagatcaaggcaatggaaagcaaactcctggttggaggaaagaacatcgtcgaccacactaatgagcaacagaagattctcgaacagaagagacaggagatcgcggaacagaaacgcagggagcgcgaaattcaacagcaaatggagagccgagacgaggaaacactggaactcaaagagacgtattcaagcctccagcaggaagtggacatcaagactaagaaactcaagaaactgttctctaaactccaagccgtgaaggccgagatacatgacctgcaggaagagcatatcaaggaacgacaggaactggagcaaacccagaacgagctaactagagaactgaagctgaaacatctaatcatagagaacttcatcccattagaagagaagtcaaaaattatgaatagggctttttttgatgaggaggaggatcattggaaactccaccccatcacaagactggagaaccaacagatgatgaaaaggcccgtgtccgcagttggttataaacggcccctgtcccagcatgctcggatgtcgatgatgattcgtcctgaggctcgatatcgcgctgagaatatagtcctacttgaactggacatgcccagccggactactcgggattatgagggacctgcaatcgcgccaaaagtgcaggccgcccttgacgctgctctgcaggacgaagacgagatccaagttgacgcttcttcctttgagtccacggctaacaaaaaaagtaaagcccgccccaaatccggtagaaagtctgggtctagcagctcttcttccgggactccagcctctcaactgtatccccagtcaaggggtctcgtgccgaagtag

SEQ ID NO: 149875 - DNA, 6103 bp, Artificial Sequence
  derived and/or modified sequence
atccggggcagcggggaatggctgagccaggggttcgccgcccccgccgccgccgccgccgccgccgccgccgccgccgcccgctttcggctcgggcctcaggaccgtagcatcctgagacattttgaattgacacttctcaagatttgactggatcagagttcatcatgtcaaagttgaaaagctcagagtcagtcagggtggtggttcgctgtcggcccatgaatggcaaggaaaaggctgcttcgtatgacaaagtggtggatgtggatgttaagctggggcaggtgtctgtgaagaaccccaaagggacggcccatgaaatgcccaagaccttcacctttgatgccgtctatgactggaatgccaagcagtttgaactgtacgatgagacgttccgaccacttgttgactctgtcctgcaaggtttcaatggaaccatttttgcctatggacaaactgggacaggaaaaacctacaccatggaaggaatccgtggtgaccctgaaaaaagaggagtcattcctaactcatttgaccatatcttcacccacatctctcgatcccagaatcaacaatacctggtcagggcttcttacttagagatctaccaggaggagatccgagatttgctctcaaaggatcagaccaaaaggcttgagctcaaagagaggcctgacacaggagtgtatgtgaaagacctgtcttcctttgtcaccaagagtgtgaaggagatagagcatgtgatgaatgtggggaaccagaaccgttctgtcggtgctaccaacatgaacgagcacagctcgcgttctcatgcaattttcgttatcactattgagtgcagcgaggtgggcctcgatggtgaaaaccacatccgtgtaggaaaattgaaccttgtagatcttgctggcagcgaacggcaagccaagaccggcgcacaaggggagagattaaaagaagctaccaagatcaacctctccctttccgctttgggtaatgtcatctctgctctagtggacggcaaaagcactcacattccatatcgggactcaaagcttaccaggctcctccaagattcccttggtggcaatgccaagactgtgatggtggccaacgtggggcctgcctcttacaacgtagaagagactctgaccactctgcgatatgccaaccgtgccaaaaacattaagaacaaaccaagggtcaatgaggaccccaaggatgccctccttcgagaattccaggaagagattgctcggctcaaggcccagctggaaaaacggtccattggtaggaggaagaggcgagagaagcggagggaaggtggtggcagtggtgggggtggggaagaggaggaggaggagggagaagagggtgaggaggaaggggatgataaggatgattactggcgggaacagcaagaaaaactggagattgagaagcgggccattgtagaggatcacagcttggttgcagaggagaagatgaggctgctgaaggagaaagagaaaaagatggaggacctgcggcgggagaaggatgctgccgagatgctgggcgccaagatcaaggccatggagagtaagttgcttgttggaggaaaaaatatagtagatcatacgaatgaacagcagaaaatcctggagcagaaacgacaggaaattgcagagcagaaacgtcgagaaagagaaatccagcaacagatggaaagtcgagatgaggagaccttggaacttaaagagacatacagctcattgcagcaagaggtggacatcaagaccaaaaaactcaaaaagctcttctccaagcttcaggcagtgaaggctgagatccatgacctccaagaagaacacatcaaggagcgccaagagctagagcagactcagaatgagctcaccagggagctgaaactcaagcatcttattatagaaaactttatccctctggaagaaaaaagtaaaattatgaatagagccttctttgatgaagaggaagatcattggaaactacatcctataaccagactggagaaccagcagatgatgaagcggccagtctcagccgtgggatataagagaccattgagccagcacgcaagaatgtccatgatgattcgtccagaggcccgatatagggcagaaaacattgtgctgttagagctggacatgcccagccggaccaccagagactatgagggtccagccattgcccccaaggtccaggctgcattggatgcggctctgcaggatgaagatgagatacaggtggatgcatcatcatttgaaagcactgcaaataagaaatccaaggccaggcctaaaagtggaaggaagtcgggatcctcctcctcttcctcaggaacccctgcatctcagctttatccacagtctcgggggctggttccaaagtaaagccagcttctcctctcccagggcggaaacagcatttgccttctgagagaagagactagcaaaaagctgcagagaggattcggcccaaactcagaactgttcccctgaggagaagcggtggcctctttgcagatcaaccaacttaatctggttgaacgtgctgttcctaatctggcactcagcccctctgggaaacatcttttaattagcatctcagaaatgcatgggtaaggtaaagtgcgatagttcaagtggaaagcaagagaatgaccagtgaccttgcttccttcccccttgccttcttctcccccttcccctgtgctccctttctctcctctctccttttctagcctgttctttacatggggctcccttcttgttgaacaatagggcagaatcaggagtcaccttagcaggaccacatctttggagcctcgggataaaatgacagtgaggttgaaaagtgaaaaccctagaacttgaataggtgcctgttcttgtagggagaaatgagaaatcgcatttggatccaggccccaggtgggcaccatcagcagtcttgcttccatgcacctcagtaagaagtggatctgcctttgggacctgctcagtgaggaaatctcttccaatttctgcttctgaatgattcaatgttgggagcaatagaaataacattccctttgccttctctgagtgtttagggaaatagcttctttaaaacctcaaaaccatgaccatcctgtcaaagacctaagtctgtaagctggtgccatgtccatacaccatgtcactttactcttcatttgtcaccatcttttcccatgcacgcatactctgaacatccttgtgtgggcccatcctctgcatccagagcatgctctgcagtgggcctgttttgtggaagaaaggaggctgtctctgccttctctgatgggactggagttgagggaaggagctgtattgtggcacttctgaattccccgttttgttccatattggtatagagagcagaagagtagctaggcagatgcagagatggagacatgagactcagtgcagtgggcagggaagacataacagatggaagcaaaggaatcctgcctgccttcagcagagaattcaccgaatcctagaactgtggctccctccaggcagagcctaagatgctggtgaagaatagctgtgtgattgaataggctcaaaggagagttcagaattcccatttacatattactagtttggtttgtaagttttagttccttgtattattgagattcagagcttcattttatgttggtcattaggtgaatattactcattttccctcaagagaagctcataagtgtgtgtgggtgtgagagcacgatggtgcctgtgttctgtgaatgtgtccatatgtgtctgtaagagagacagagaccaagaacttgcccaattttagaaatacactaatgtgcagttgttgccttttgtctgtattgaaggcccattgaatgactaatccaggctggaagcattcccatgtgggtgtctgagtccatgagccaagcctgaggggacagtgagtctccaggtctgccacactggtgcaccttgctggcacggtgcctcaggaaggtggcgactcaggtgggccttgagttatattttaactcagctgctcagttcccagggcacatttctggatcagaacccatgggaaacaggaggtactaagtgcaatgtcttagcattctgcaaaatggagatctgttgtccagcggcttatctcctttttagtaacccttctttctgaacccagggcccttttcagccttccctcatattttcttgagatcaaactttacttctttcttatttactaagaatttgcctgtttgaataagaacaaaacgctaaggtgggtagcctaagctgattttctgctggttacacgtgtctctcacaccacatttcctcaaagctaatctgaattctgtaggctaaaaatattcatgtagcaaatctgagaattgaaaactgcagataaccggccgggtatggtgactcatgcctgtaatcctagcactttgggaggccgaggtgggtggaccacctgaggttaggacttcaagaccagcctggccaacatggtgaaaccccatctgtactaaaaatacaaaaatttgcctggtgtggtggtgcatgcctctagtcctagctactcgggaggctgaggcacgagaatcacttgaacctgggaggcggaggttgcagtgagtcgagataacactactgcattccagcctgggtgacagagtgagactccccctcaaaaaaaaaaaaaaaaaaaaaaaaaacagaaagaaagaaaaagaaaactgcagataaccctatacattaatactggtatctcgaggtgactcttctgaccaagggtggttaagtgacacatagaacttttctaagagaagacagacaagttgacaggcatgccttgtactcagctgtgttcatgtggtggtctgtggaaagaaaagaagactcatttggaaatgaagctgtccctttccaagcagtctctggtgcttttcttctctcaaaatggatccgataaatatttgaatagagcagattgtagaatgtcgtgctgtcaccagaaagctgctgttttgggttctgcattgagccaaatatgtagaggacctaccaagcccactgagggactaggttttcatgtctctagtcatacctagaatgttctgagccgtctgagggccttcatgccggcagcagctagcaaagccagaaagcaagtctaacaggatctaagatgaccatcaggagaaggagtttgagactgtgtatgcaacccccaatagacccccttttactctgatctggagaatgtatctggcttcatattttcaagtcacatgtctctcagacccctggattcagaacccaaggccacaaatcataggcatgaagcactttcttaagactgacctaacgctggattatttcccgtccaatgcctgcatgctgcttgaattgctccacccacacctccatgaccaagggcgccagagtgctgcaactggggcgtgggccgctctctgcttttcctgtctgactctgacaagtcctccctcactgaatgtagaatcgttgccaagtttctgagaagtgtcgattccctgttaacatggatatcagttctgcctcacatttcccacttgaggttgaggcgtactggagacaacacctcagaccatctgaaccccatcagtggacgaaaatggggctgttaatatactctaaaagccatactaaaaatgctctgagggaactggctaagaatagtgggcctggtgattgtctatcacgcaaggctttgttttgtactgttcagaaatctgtcacctttctgcctgcccttgtttcctgaatgaaatgcttctggggttatttatgaaaggagtgatcctggggcaggcaggaggcagtgggcttcatggctccttgaagttattactgatcttgaccttctctttggctacctttagacaaagaatacgccaatcaatacttggggctctaagttttacaattgatatttatttgtatcatctctttgtctaggaatgtaaaagtgattctaaactaagatgtgtaataaaaatcaatcagatttattgtacctacaaaaa

SEQ ID NO: 149876 - DNA, 1756 bp, Artificial Sequence
  derived and/or modified sequence
taggaaaattgaaccttgtagatcttgctggcagcgaacggcaagccaagaccggcgcacaaggggagagattaaaagaagctaccaagatcaacctctccctttccgctttgggtaatgtcatctctgctctagtggacggcaaaagcactcacattccatatcgggactcaaagcttaccaggctcctccaagattcccttggtggcaatgccaagactgtgatggtggccaacgtggggcctgcctcttacaacgtagaagagactctgaccactctgcgatatgccaaccgtgccaaaaacattaagaacaaaccaagggtcaatgaggaccccaaggatgccctccttcgagaattccaggaagagattgctcggctcaaggcccagctggaaaaacggtccattgaggagaagatgaggctgctgaaggagaaagagaaaaagatggaggacctgcggcgggagaaggatgctgccgagatgctgggcgccaagatcaaggccatggagagtaagttgcttgttggaggaaaaaatatagtagatcatacgaatgaacagcagaaaatcctggagcagaaacgacaggaaattgcagagcagaaacgtcgagaaagagaaatccagcaacagatggaaagtcgagatgaggagaccttggaacttaaagagacatacagctcattgcagcaagaggtggacatcaagaccaaaaaactcaaaaagctcttctccaagcttcaggcagtgaaggctgagatccatgacctccaagaagaacacatcaaggagcgccaagagctagagcagactcagaatgagctcaccagggagctgaaactcaagcatcttattatagaaaactttatccctctggaagaaaaaagtaaaattatgaatagagccttctttgatgaagaggaagatcattggaaactacatcctataaccagactggagaaccagcagatgatgaagcggccagtctcagccgtgggatataagagaccattgagccagcacgcaagaatgtccatgatgattcgtccagaggcccgatatagggcagaaaacattgtgctgttagagctggacatgcccagccggaccaccagagactatgagggtccagccattgcccccaaggtccaggctgcattggatgcggctctgcaggatgaagatgagatacaggtggatgcatcatcatttgaaagcactgcaaataagaaatccaaggccaggcctaaaagtggaaggaagtcgggatcctcctcctcttcctcaggaacccctgcatctcagctttatccacagtctcgggggctggttccaaagtaaagccagcttctcctctcccagggcggaaacagcatttgccttctgagagaagagactagcaaaaagctgcagagaggattcggcccaaactcagaactgttcccctgaggagaagcggtggcctctttgcagatcaaccaacttaatctggttgaacgtgctgttcctaatctggcactcagcccctctgggaaacatcttttaattagcatctcagaaatgcatgggtaaggtaaagtgcgatagttcaagtggaaagcaagagaatgaccagtgaccttgcttccttcccccttgccttcttctcccccttcccctgtgctccctttctctcctctctccttttctagcctgttctttacatggggctcccttcttgttgaacaatagggcagaatcaggagtcacct

SEQ ID NO: 149877 - DNA, 2244 bp, Artificial Sequence
  derived and/or modified sequence
atgagcaagctgaagagcagcgagagcgtgcgggtggtggtgcgctgccggcccatgaatggcaaggagaaggccgccagctatgacaaggtggtggatgtggatgtgaagctgggccaggtgtctgtgaagaaccccaagggcacagcccacgagatgcccaagaccttcacctttgatgctgtgtatgactggaatgccaagcagtttgagctgtatgatgagaccttccggcccctggtggacagcgtgctgcagggcttcaacggcaccatctttgcctacggccagacaggcaccgggaagacctacaccatggagggcatccggggggaccctgagaagaggggcgtcatccccaacagctttgaccacatcttcacccacatcagccgcagccagaaccagcagtacctggtgcgggccagctacctggagatctaccaggaggagatccgggacctgctgagcaaggaccagaccaagaggctggagctgaaggagaggccagacaccggggtgtatgtgaaggacctgagcagctttgtgaccaagtctgtgaaggagattgagcacgtgatgaatgtgggcaaccagaacagatctgtgggcgccaccaacatgaatgagcacagcagccgcagccacgccatctttgtgatcaccatcgagtgcagcgaggtgggcctggatggagagaaccacatccgggtgggcaagctgaacctggtggacctggccggcagcgagcggcaggccaagacaggagcccagggcgagcggctgaaggaggccaccaagatcaacctgagcctgagcgccctgggcaatgtcatcagcgccctggtggatggcaagagcacccacatcccctacagagacagcaagctgacccggctgctgcaggacagcctgggcggcaatgccaagacagtgatggtggccaacgtgggccctgccagctacaacgtggaggagaccctgaccaccctgcgctatgccaacagagccaagaacatcaagaacaagccccgggtgaatgaagaccccaaggatgccctgctgcgggagttccaggaggagatcgcccggctgaaggcccagctggagaagaggagcatcggccgcaggaagagaagagagaagagaagagagggcggcggcagcggcggcggcggggaggaggaggaggaggagggggaggagggggaggaggagggagatgacaaggatgactactggagggagcagcaggagaagctggagattgagaagagggccatcgtggaggaccacagcctggtggccgaggagaagatgaggctgctgaaggagaaggagaagaagatggaggacctgcggcgggagaaggatgctgctgagatgctgggcgccaagatcaaggccatggagagcaagctgctggtgggcggcaagaacatcgtggaccacaccaatgagcagcagaagatcctggagcagaagaggcaggagattgctgagcagaagaggcgggagcgggagatccagcagcagatggagagcagagatgaggagaccctggagctgaaggagacctacagcagcctgcagcaggaggtggacatcaagaccaagaagctgaagaagctgttcagcaagctgcaggccgtgaaggccgagatccatgacctgcaggaggagcacatcaaggagcggcaggagctggagcagacccagaatgagctgacccgggagctgaagctgaagcacctgatcatcgagaacttcatccccctggaggagaagagcaagatcatgaacagagccttctttgatgaggaggaggaccactggaagctgcaccccatcacccggctggagaaccagcagatgatgaagaggcctgtgtctgctgtgggctacaagaggcccctgagccagcacgccaggatgtccatgatgatccggcctgaggcccgctacagagctgagaacatcgtgctgctggagctggacatgcccagcaggaccacccgggactatgagggccctgccatcgcccccaaggtgcaggccgccctggatgctgccctgcaggatgaagatgagatccaggtggatgccagcagctttgagagcacagccaacaagaagagcaaggcccggcccaagagcggcaggaagagcggcagcagcagcagcagcagcggcaccccagccagccagctgtacccccagagccggggcctggtgcccaagtag

SEQ ID NO: 149878 - DNA, 1122 bp, Artificial Sequence
  derived and/or modified sequence
atggtggccaacgtgggccctgccagctacaacgtggaggagaccctgaccaccctgcgctatgccaacagagccaagaacatcaagaacaagccccgggtgaatgaagaccccaaggatgccctgctgcgggagttccaggaggagatcgcccggctgaaggcccagctggagaagaggagcattgaggagaagatgaggctgctgaaggagaaggagaagaagatggaggacctgcggcgggagaaggatgctgctgagatgctgggcgccaagatcaaggccatggagagcaagctgctggtgggcggcaagaacatcgtggaccacaccaatgagcagcagaagatcctggagcagaagaggcaggagattgctgagcagaagaggcgggagcgggagatccagcagcagatggagagcagagatgaggagaccctggagctgaaggagacctacagcagcctgcagcaggaggtggacatcaagaccaagaagctgaagaagctgttcagcaagctgcaggccgtgaaggccgagatccatgacctgcaggaggagcacatcaaggagcggcaggagctggagcagacccagaatgagctgacccgggagctgaagctgaagcacctgatcatcgagaacttcatccccctggaggagaagagcaagatcatgaacagagccttctttgatgaggaggaggaccactggaagctgcaccccatcacccggctggagaaccagcagatgatgaagaggcctgtgtctgctgtgggctacaagaggcccctgagccagcacgccaggatgtccatgatgatccggcctgaggcccgctacagagctgagaacatcgtgctgctggagctggacatgcccagcaggaccacccgggactatgagggccctgccatcgcccccaaggtgcaggccgccctggatgctgccctgcaggatgaagatgagatccaggtggatgccagcagctttgagagcacagccaacaagaagagcaaggcccggcccaagagcggcaggaagagcggcagcagcagcagcagcagcggcaccccagccagccagctgtacccccagagccggggcctggtgcccaagtag

SEQ ID NO: 149879 - DNA, 2244 bp, Artificial Sequence
  derived and/or modified sequence
atgagcaagctgaagagcagcgagagcgtgcgggtggtggtgcggtgcaggccgatgaatggtaaagagaaggccgccagctacgacaaggttgtggatgtggacgtgaagttgggccaggtttccgtgaaaaatccaaagggcacggcccacgagatgccgaaaactttcacttttgacgcggtttatgattggaatgcaaaacagtttgaactctatgacgaaacgtttaggcctcttgtggactctgttctacaagggttcaacgggactatttttgcctatggccagacaggtaccggcaagacctataccatggagggaatccgcggtgaccccgagaaacgaggggtgatccccaactcctttgatcatatctttacacatattagccgatcccagaaccagcagtatctggtgcgggcgtcctatctcgagatttaccaggaggagattagggacctcctatctaaagatcagaccaaaaggcttgagttaaaggaacggcctgacacgggggtctatgttaaggacttgagctctttcgtgaccaagagtgtaaaagagattgaacatgtcatgaacgtgggtaaccagaaccgtagcgtcggtgctaccaatatgaatgagcattcgtctagatctcatgctatattcgtgataacgatagagtgcagcgaggtgggactggatggagaaaaccatattcgagttgggaagctgaacctcgtggatttggctggttcagaacgacaggcaaagacgggcgcccagggagagaggctcaaggaggccactaaaattaacctgtcattatctgctctgggcaacgtgatttccgcccttgtggacgggaaaagcacacacatcccttaccgggattctaagttgactcgcctgctccaagacagcctcggagggaacgccaaaacagtgatggtggctaacgtaggccctgcgtcatacaatgtggaggaaacacttaccacccttcggtacgctaaccgagccaaaaatattaagaacaagcctcgtgtaaacgaggatcctaaagacgcattgctgcgcgagttccaggaagaaattgccaggctgaaggcccagctggaaaaacgctctatcggacgtagaaaacggcgagagaaacgccgggagggtggaggatctggcggcggaggcgaggaagaagaagaagagggtgaggagggggaggaggaaggcgacgacaaagacgactattggagggagcaacaagagaagcttgagatagagaaacgcgccattgtggaagatcatagccttgtggccgaggaaaagatgcgcttgctaaaagagaaggagaagaagatggaggatctacggcgggagaaagacgcagcagaaatgctgggcgccaaaattaaggctatggagtcaaagctcttggtgggaggcaaaaatattgtggaccatactaacgagcagcagaaaatcttggagcagaaacggcaggagatcgccgagcagaaacgacgcgaaagggaaattcagcagcagatggaatctcgggacgaagaaacgttggagctgaaggagacttacagttcgctgcaacaggaggtggacataaagactaaaaaactgaagaaactcttttcaaaactgcaggccgtcaaggccgaaatccatgatctgcaggaggagcacattaaggagaggcaggaactggagcaaacccagaatgagctgacacgggagttaaagcttaagcacctcatcattgagaattttattcctctggaagaaaaatccaaaatcatgaacagggccttttttgacgaggaggaagatcactggaagctgcacccaatcaccaggcttgagaaccagcaaatgatgaaacgccctgtatctgcggtcggatacaagcggccactgtcccagcatgcaaggatgtctatgatgatccgccccgaagccagatatagggcagagaatatcgtcttgttggaactggacatgccgagccgcactacccgggattacgagggccctgccattgcccctaaagtgcaggctgctctggacgctgccctgcaggacgaagatgaaattcaagtggatgcctcctctttcgagagtacagcaaataaaaaaagcaaagctcgcccaaagagcggtcgcaaatccggatcatcgagcagctcatccggcacacctgcatcacaattgtacccacagagtcggggcctggttcctaagtag

SEQ ID NO: 149880 - DNA, 1122 bp, Artificial Sequence
  derived and/or modified sequence
atggtggccaacgtgggccccgccagctacaacgtggaggagaccttgactactctcaggtatgctaatagggccaagaatataaaaaataaacccagagtgaacgaggatccaaaagatgcattgctcagggagttccaggaagagatcgcacggctgaaagcacagctagaaaaacgctccattgaagaaaaaatgcgcctgcttaaagaaaaagagaagaaaatggaggacttgcgcagagagaaggacgccgctgaaatgcttggggcaaaaatcaaggctatggagtctaagttgctggtgggcggaaagaatattgtggaccacaccaatgaacagcaaaagatccttgaacagaagcggcaagagattgccgagcagaagaggagagagcgggaaatccagcagcaaatggaatctcgggacgaggagacgctggaactgaaagaaacatacagttccctccaacaggaagtcgatataaagaccaaaaagttaaagaagttgttttctaaactccaggcagtgaaagcagagattcatgaccttcaggaagagcatattaaggagcggcaggaattagaacagacacagaatgaattgacccgcgagttaaagctgaaacatctcatcatcgagaattttattccactcgaggagaagtccaaaataatgaatagggcctttttcgacgaggaagaagatcactggaagttgcatcccatcacgcgactggagaatcagcaaatgatgaagaggcctgttagcgccgtgggatataaaaggcctctgtcacagcacgcccgtatgagtatgatgatcaggccagaagcaagatatagggccgaaaatatcgtgctgctggagctggatatgccatctcgcaccacacgggactatgagggcccagctatcgctccaaaggtccaggccgctctagacgccgccttgcaggatgaggatgaaatccaggtagacgctagttcgtttgagagcaccgctaacaaaaaaagtaaggcacgcccaaaaagcggacggaagagtggaagctccagcagctcgtccggcacccccgcatcgcagctctacccccaaagtcggggattggtcccaaagtag

SEQ ID NO: 149881 - DNA, 2244 bp, Artificial Sequence
  derived and/or modified sequence
atgagcaagctgaagagtagcgagtccgtgcgagtggtggttcggtgcaggccaatgaacggcaaggaaaaggccgcttcctatgataaagtagtggacgtagatgtaaaactgggccaggttagcgtgaaaaacccaaaaggcactgctcacgaaatgcccaagaccttcaccttcgatgcagtgtatgattggaatgcgaaacagttcgaactgtatgatgagacttttaggcctttggtcgattccgttttgcagggattcaatggcactatcttcgcctacgggcagaccgggacgggcaagacatatacaatggaggggatcagaggagacccagaaaagcgaggagttattcccaacagctttgaccacatcttcactcacatctccaggagtcaaaaccagcaatatctggtaagggcatcttatttggaaatataccaggaggaaatacgcgacctgctctccaaagaccagaccaaacgtttggaactgaaagagagaccggacacgggcgtctatgtgaaggacttatcatccttcgtgaccaagtctgtgaaggagattgaacatgtgatgaatgtcgggaaccaaaacagaagcgtaggggcaactaatatgaacgaacactcatcacgaagtcatgctatttttgtgatcactatcgagtgctcagaggtcggactggatggagagaaccatatccgcgtgggcaagcttaatctagtggacctggccggatccgagagacaggccaaaaccggagcacagggggagcgcttaaaggaggccactaagattaatctcagtttgagcgccctgggtaacgtgatctctgccctggttgacggcaagagcacccatattccttatcgcgattctaaactcaccaggctgctccaagacagcctggggggaaacgcaaagactgtaatggttgctaatgtggggcctgcctcgtataatgtcgaggagacccttactactttaagatatgctaacagggcaaaaaatatcaaaaataagcctagagtgaatgaagacccaaaggacgccttattacgagagttccaagaagagatcgctagactgaaagctcagctagagaagaggagtattggtcgacgaaaacggagagaaaagcgcagggagggcggaggaagtggaggaggcggtgaggaggaggaagaagagggtgaggaaggagaggaggaaggcgacgataaagacgactattggcgagaacagcaggaaaaactagagattgagaagagggccattgtggaggaccatagtttggttgccgaagaaaaaatgcggctgctgaaggaaaaggagaagaagatggaggatctacggagagaaaaggacgcagccgaaatgcttggcgcaaaaatcaaagccatggagagcaagctcctggtgggcggtaagaacatcgtcgaccacacaaatgaacagcagaagattctcgagcagaagcgccaggagatcgcagaacagaagagacgcgagagggagatacagcagcagatggaaagcagagacgaagaaacactggaactgaaggagacatattcctccttacagcaggaggtcgacattaagaccaaaaagctgaagaagctgtttagcaagctacaggctgtcaaggcagagatccatgacctgcaggaagagcatatcaaagaacggcaagagctcgaacagactcagaacgagttgactagggaattgaaattaaagcatctgatcatcgagaattttatcccactggaggaaaaatctaagatcatgaacagagctttttttgacgaagaagaggaccattggaagctccatcccataacacgactagaaaatcagcagatgatgaagcggccagtgtccgctgtgggctacaagaggcccctctcccagcacgccagaatgtcaatgatgattagaccagaggccagatacagggccgagaatatagttttgctcgagttggacatgccatctcggacgaccagggattatgagggtcccgcaatcgcaccaaaggttcaggctgccttagatgctgcattacaggacgaagacgaaatccaggtagacgcttcctccttcgagtccacagctaataagaaatctaaggcaaggcctaagtctgggagaaagtccgggagttcgagctccagctcaggcacaccagcatcccagttatatccccagtctcgcggactggttccaaaatag

SEQ ID NO: 149882 - DNA, 1122 bp, Artificial Sequence
  derived and/or modified sequence
atggtggccaatgtgggcccagcaagttataacgtggaggaaactttgaccacgctacgatacgccaaccgcgcaaaaaatattaagaataagccaagggtgaatgaagaccctaaagatgctttgctgagggaatttcaagaggagatcgccagactgaaggcccagctggagaaacgttcaatagaagagaagatgaggttgctaaaagagaaggagaagaagatggaagatcttcgcagggaaaaggacgccgcagaaatgctcggggctaaaattaaagccatggaatccaagctgctagtcggaggtaagaacatcgtggaccacactaatgaacagcagaaaattttggagcaaaagcgtcaggagattgctgaacagaaacgccgtgaaagagagatacagcagcagatggagtcccgcgatgaggaaacactggagttaaaggagacctattcctccttgcagcaagaagtcgacatcaaaacgaagaaacttaagaagctctttagcaaattgcaggccgtaaaagccgagatccatgatctgcaggaggagcacataaaagagcgacaggaactcgaacagacgcagaacgagctgacccgcgaactaaaactcaagcacctgataatcgagaattttattcccctcgaagagaagtctaaaattatgaaccgcgcttttttcgatgaggaggaagaccactggaagctgcacccgattacacgtctcgagaaccagcagatgatgaagcgtcccgtgtctgcagtgggctacaaacgcccactgagccagcatgcccgaatgtccatgatgatccgacccgaggccagatacagagccgagaacattgtcttgctggagcttgacatgccctcgagaaccacaagggactatgaggggccagctatagctcctaaggtgcaggctgcactggacgccgcattacaagacgaggatgagatccaggtggatgcctcttcttttgagtctaccgccaacaagaaaagcaaggccaggccaaaatccgggaggaaatcagggtcctcaagcagctctagcggaaccccagcctcacagctgtatccacagagccgcggtcttgttcccaaatag

SEQ ID NO: 149883 - DNA, 2244 bp, Artificial Sequence
  derived and/or modified sequence
atgagcaagctgaagagcagcgagagcgtgagagtggtggtgagatgcagacccatgaacggcaaggagaaggccgccagctacgacaaggtggtggacgtggacgtgaagctgggccaggtgagcgtgaagaaccccaagggcaccgcccacgagatgcccaagaccttcaccttcgacgccgtgtacgactggaacgccaagcagttcgagctgtacgacgagaccttcagacccctggtggacagcgtgctgcagggcttcaacggcaccatcttcgcctacggccagaccggcaccggcaagacctacaccatggagggcatcagaggcgaccccgagaagagaggcgtgatccccaacagcttcgaccacatcttcacccacatcagcagaagccagaaccagcagtacctggtgagagccagctacctggagatctaccaggaggagatcagagacctgctgagcaaggaccagaccaagagactggagctgaaggagagacccgacaccggcgtgtacgtgaaggacctgagcagcttcgtgaccaagagcgtgaaggagatcgagcacgtgatgaacgtgggcaaccagaacagaagcgtgggcgccaccaacatgaacgagcacagcagcagaagccacgccatcttcgtgatcaccatcgagtgcagcgaggtgggcctggacggcgagaaccacatcagagtgggcaagctgaacctggtggacctggccggcagcgagagacaggccaagaccggcgcccagggcgagagactgaaggaggccaccaagatcaacctgagcctgagcgccctgggcaacgtgatcagcgccctggtggacggcaagagcacccacatcccctacagagacagcaagctgaccagactgctgcaggacagcctgggcggcaacgccaagaccgtgatggtggccaacgtgggccccgccagctacaacgtggaggagaccctgaccaccctgagatacgccaacagagccaagaacatcaagaacaagcccagagtgaacgaggaccccaaggacgccctgctgagagagttccaggaggagatcgccagactgaaggcccagctggagaagagaagcatcggcagaagaaagagaagagagaagagaagagagggcggcggcagcggcggcggcggcgaggaggaggaggaggagggcgaggagggcgaggaggagggcgacgacaaggacgactactggagagagcagcaggagaagctggagatcgagaagagagccatcgtggaggaccacagcctggtggccgaggagaagatgagactgctgaaggagaaggagaagaagatggaggacctgagaagagagaaggacgccgccgagatgctgggcgccaagatcaaggccatggagagcaagctgctggtgggcggcaagaacatcgtggaccacaccaacgagcagcagaagatcctggagcagaagagacaggagatcgccgagcagaagagaagagagagagagatccagcagcagatggagagcagagacgaggagaccctggagctgaaggagacctacagcagcctgcagcaggaggtggacatcaagaccaagaagctgaagaagctgttcagcaagctgcaggccgtgaaggccgagatccacgacctgcaggaggagcacatcaaggagagacaggagctggagcagacccagaacgagctgaccagagagctgaagctgaagcacctgatcatcgagaacttcatccccctggaggagaagagcaagatcatgaacagagccttcttcgacgaggaggaggaccactggaagctgcaccccatcaccagactggagaaccagcagatgatgaagagacccgtgagcgccgtgggctacaagagacccctgagccagcacgccagaatgagcatgatgatcagacccgaggccagatacagagccgagaacatcgtgctgctggagctggacatgcccagcagaaccaccagagactacgagggccccgccatcgcccccaaggtgcaggccgccctggacgccgccctgcaggacgaggacgagatccaggtggacgccagcagcttcgagagcaccgccaacaagaagagcaaggccagacccaagagcggcagaaagagcggcagcagcagcagcagcagcggcacccccgccagccagctgtacccccagagcagaggcctggtgcccaagtag

SEQ ID NO: 149884 - DNA, 1122 bp, Artificial Sequence
  derived and/or modified sequence
atggtggccaacgtgggccccgccagctacaacgtggaggagaccctgaccaccctgagatacgccaacagagccaagaacatcaagaacaagcccagagtgaacgaggaccccaaggacgccctgctgagagagttccaggaggagatcgccagactgaaggcccagctggagaagagaagcatcgaggagaagatgagactgctgaaggagaaggagaagaagatggaggacctgagaagagagaaggacgccgccgagatgctgggcgccaagatcaaggccatggagagcaagctgctggtgggcggcaagaacatcgtggaccacaccaacgagcagcagaagatcctggagcagaagagacaggagatcgccgagcagaagagaagagagagagagatccagcagcagatggagagcagagacgaggagaccctggagctgaaggagacctacagcagcctgcagcaggaggtggacatcaagaccaagaagctgaagaagctgttcagcaagctgcaggccgtgaaggccgagatccacgacctgcaggaggagcacatcaaggagagacaggagctggagcagacccagaacgagctgaccagagagctgaagctgaagcacctgatcatcgagaacttcatccccctggaggagaagagcaagatcatgaacagagccttcttcgacgaggaggaggaccactggaagctgcaccccatcaccagactggagaaccagcagatgatgaagagacccgtgagcgccgtgggctacaagagacccctgagccagcacgccagaatgagcatgatgatcagacccgaggccagatacagagccgagaacatcgtgctgctggagctggacatgcccagcagaaccaccagagactacgagggccccgccatcgcccccaaggtgcaggccgccctggacgccgccctgcaggacgaggacgagatccaggtggacgccagcagcttcgagagcaccgccaacaagaagagcaaggccagacccaagagcggcagaaagagcggcagcagcagcagcagcagcggcacccccgccagccagctgtacccccagagcagaggcctggtgcccaagtag

SEQ ID NO: 149885 - protein, 663 aa, Artificial Sequence
  derived and/or modified sequence
MSARLPVLSPPRWPRLLLLSLLLLGAVPGPRRSGAFYLPGLAPVNFCDEEKKSDECKAEIELFVNRLDSVESVLPYEYTAFDFCQASEGKRPSENLGQVLFGERIEPSPYKFTFNKKETCKLVCTKTYHTEKAEDKQKLEFLKKSMLLNYQHHWIVDNMPVTWCYDVEDGQRFCNPGFPIGCYITDKGHAKDACVISSDFHERDTFYIFNHVDIKIYYHVVETGSMGARLVAAKLEPKSFKHTHIDKPDCSGPPMDISNKASGEIKIAYTYSVSFEEDDKIRWASRWDYILESMPHTHIQWFSIMNSLVIVLFLSGMVAMIMLRTLHKDIARYNQMDSTEDAQEEFGWKLVHGDIFRPPRKGMLLSVFLGSGTQILIMTFVTLFFACLGFLSPANRGALMTCAVVLWVLLGTPAGYVAARFYKSFGGEKWKTNVLLTSFLCPGIVFADFFIMNLILWGEGSSAAIPFGTLVAILALWFCISVPLTFIGAYFGFKKNAIEHPVRTNQIPRQIPEQSFYTKPLPGIIMGGILPFGCIFIQLFFILNSIWSHQMYYMFGFLFLVFIILVITCSEATILLCYFHLCAEDYHWQWRSFLTSGFTAVYFLIYAVHYFFSKLQITGTASTILYFGYTMIMVLIFFLFTGTIGFFACFWFVTKIYSVVKVD

SEQ ID NO: 149886 - DNA, 1992 bp, Artificial Sequence
  derived and/or modified sequence
atgagcgccagactgcccgtgctgagcccccccagatggcccagactgctgctgctgagcctgctgctgctgggcgccgtgcccggccccagaagaagcggcgccttctacctgcccggcctggcccccgtgaacttctgcgacgaggagaagaagagcgacgagtgcaaggccgagatcgagctgttcgtgaacagactggacagcgtggagagcgtgctgccctacgagtacaccgccttcgacttctgccaggccagcgagggcaagagacccagcgagaacctgggccaggtgctgttcggcgagagaatcgagcccagcccctacaagttcaccttcaacaagaaggagacctgcaagctggtgtgcaccaagacctaccacaccgagaaggccgaggacaagcagaagctggagttcctgaagaagagcatgctgctgaactaccagcaccactggatcgtggacaacatgcccgtgacctggtgctacgacgtggaggacggccagagattctgcaaccccggcttccccatcggctgctacatcaccgacaagggccacgccaaggacgcctgcgtgatcagcagcgacttccacgagagagacaccttctacatcttcaaccacgtggacatcaagatctactaccacgtggtggagaccggcagcatgggcgccagactggtggccgccaagctggagcccaagagcttcaagcacacccacatcgacaagcccgactgcagcggcccccccatggacatcagcaacaaggccagcggcgagatcaagatcgcctacacctacagcgtgagcttcgaggaggacgacaagatcagatgggccagcagatgggactacatcctggagagcatgccccacacccacatccagtggttcagcatcatgaacagcctggtgatcgtgctgttcctgagcggcatggtggccatgatcatgctgagaaccctgcacaaggacatcgccagatacaaccagatggacagcaccgaggacgcccaggaggagttcggctggaagctggtgcacggcgacatcttcagaccccccagaaagggcatgctgctgagcgtgttcctgggcagcggcacccagatcctgatcatgaccttcgtgaccctgttcttcgcctgcctgggcttcctgagccccgccaacagaggcgccctgatgacctgcgccgtggtgctgtgggtgctgctgggcacccccgccggctacgtggccgccagattctacaagagcttcggcggcgagaagtggaagaccaacgtgctgctgaccagcttcctgtgccccggcatcgtgttcgccgacttcttcatcatgaacctgatcctgtggggcgagggcagcagcgccgccatccccttcggcaccctggtggccatcctggccctgtggttctgcatcagcgtgcccctgaccttcatcggcgcctacttcggcttcaagaagaacgccatcgagcaccccgtgagaaccaaccagatccccagacagatccccgagcagagcttctacaccaagcccctgcccggcatcatcatgggcggcatcctgcccttcggctgcatcttcatccagctgttcttcatcctgaacagcatctggagccaccagatgtactacatgttcggcttcctgttcctggtgttcatcatcctggtgatcacctgcagcgaggccaccatcctgctgtgctacttccacctgtgcgccgaggactaccactggcagtggagaagcttcctgaccagcggcttcaccgccgtgtacttcctgatctacgccgtgcactacttcttcagcaagctgcagatcaccggcaccgccagcaccatcctgtacttcggctacaccatgatcatggtgctgatcttcttcctgttcaccggcaccatcggcttcttcgcctgcttctggttcgtgaccaagatctacagcgtggtgaaggtggactag

SEQ ID NO: 149887 - DNA, 1992 bp, Artificial Sequence
  derived and/or modified sequence
atgagtgccagactgccagtgttatccccaccccgctggccgcggctgctgctgttgagcctgctgttgctgggtgctgtccccggaccacggcgttccggagcattttacttaccagggctggctcctgtgaatttttgcgacgaggagaagaagagtgacgagtgtaaggcagaaatcgagttgttcgtcaaccggctagacagcgtggagtcagtccttccatacgagtacactgcctttgacttttgccaggcctcggagggcaagagacctagtgagaatctgggccaagtcctgttcggagaacgaattgaaccttcaccgtataaattcacgttcaataaaaaggaaacatgtaagctagtctgcacaaaaacataccacaccgagaaagctgaggacaagcaaaaactggagtttctgaaaaaaagcatgctgctgaactaccagcaccattggattgtcgataacatgccagttacctggtgttacgacgtagaggatgggcagagattttgtaatcctggttttcctattggctgctacatcactgacaaagggcatgccaaggacgcatgtgtgatctcctcagatttccacgagcgcgatacgttttacatcttcaaccatgtcgacattaagatttactaccacgtggtggagacgggttccatgggcgcaagattagtggcagctaagctggaacctaagagtttcaagcatacccatattgacaagcccgactgttcaggcccccccatggacatctctaacaaggcctcaggggaaatcaaaatcgcgtacacatacagtgtctccttcgaggaggacgataaaatccggtgggcttccaggtgggattacatattggagtccatgccgcatacccacatacagtggttttcaatcatgaacagcttggtgattgtcctctttctcagtggcatggtggcgatgattatgctgcgtacacttcataaggatattgctcggtacaatcagatggactcaactgaggacgcccaggaggaattcggctggaagttggttcatggcgatatttttcggccgccccgcaaaggcatgctgttatccgttttcctgggttccggtacccaaatacttataatgacgttcgtgactctctttttcgcctgtctcggctttctgtcccccgcaaacaggggggcactcatgacatgtgccgtagtgctgtgggttcttttgggaacgcccgccgggtatgtggcggcgcgcttttataagtccttcggcggagaaaagtggaagacgaatgtgcttctcacatctttcttgtgcccagggatcgttttcgctgacttttttatcatgaatcttattttgtggggagaaggcagttctgccgccatcccctttggcacactggtcgctatccttgctctgtggttctgcatttcagtacctctgacttttatcggtgcctatttcgggttcaagaagaatgctatcgagcaccccgtgagaacgaaccaaataccccgccagatcccagagcagtcattttacactaaaccactccccgggattattatgggagggattttgccattcggatgcatatttatccagctgttttttatcttgaactcgatctggagtcatcaaatgtactacatgttcggatttctgttcctggttttcataattctggtgataacgtgcagtgaggctaccatcctactctgctattttcacctttgtgccgaagactaccactggcagtggcggagtttcctgacctccggcttcaccgctgtttattttctgatttatgcagtgcactatttcttctcaaaattacaaataaccggtacagcttctacgatcctgtacttcggctatactatgataatggttttgatcttctttctgttcacgggtactattggtttttttgcatgtttctggttcgtgacaaaaatctatagtgtggttaaggttgattag

SEQ ID NO: 149888 - DNA, 1992 bp, Artificial Sequence
  derived and/or modified sequence
atgtctgcccggctgcctgtgctgagccccccacgctggccccggctgctgctgctgagcctgctgctgctgggcgctgtgcccggccccaggagaagtggggccttctacctgcccggcctggcccctgtgaacttctgtgatgaggagaagaagagtgatgagtgcaaggccgagattgagctgtttgtgaaccggctggacagcgtggagagcgtgctgccctatgagtacacagcctttgacttctgccaggccagcgagggcaagaggccttctgagaacctgggccaggtgctgtttggagagagaattgagcccagcccctacaagttcaccttcaacaagaaggagacctgcaagctggtgtgcaccaagacctaccacacagagaaggccgaggacaagcagaagctggagttcctgaagaagtccatgctgctgaactaccagcaccactggatcgtggacaacatgcctgtgacctggtgctatgatgtggaggatggccagcgcttctgcaaccctggcttccccatcggctgctacatcacagacaagggccacgccaaggatgcctgcgtcatcagcagtgacttccacgagcgggacaccttctacatcttcaaccacgtggacatcaagatctactaccacgtggtggagaccggctccatgggcgcccggctggtggccgccaagctggagcccaagagcttcaagcacacccacatcgacaagccagactgcagcggcccccccatggacatcagcaacaaggccagcggggagatcaagatcgcctacacctacagcgtgtcctttgaagaagatgacaagatccgctgggccagccgctgggactacatcctggagagcatgccccacacccacatccagtggttcagcatcatgaacagcctggtgattgtgctcttcctgagcggcatggtggccatgatcatgctgcggaccctgcacaaggacatcgcccgctacaaccagatggacagcacagaagatgcccaggaggagtttggctggaagctggtgcacggggacatcttccggccccccaggaagggcatgctgctgagcgtcttcctgggcagcggcacccagatcctgatcatgacctttgtgaccctcttctttgcctgcctgggcttcctgagccctgccaacagaggagccctgatgacctgtgctgtggtgctgtgggtgctgctgggcaccccagctggctacgtggccgcccgcttctacaagagctttggaggagagaagtggaagaccaacgtgctgctgaccagcttcctgtgccccggcatcgtgtttgctgacttcttcatcatgaacctgatcctgtggggcgagggcagcagcgctgccatccccttcggcaccctggtggccatcctggccctgtggttctgcatctctgtgcccctgaccttcatcggggcctacttcggcttcaagaagaatgccatcgagcaccctgtgaggaccaaccagatcccccggcagatccctgagcagagcttctacaccaagcccctgcccggcatcatcatgggcggcatcctgcccttcggctgcatcttcatccagctgttcttcatcctgaacagcatctggagccaccagatgtactacatgtttggcttcctgttcctggtgttcatcatcctggtgatcacctgcagcgaggccaccatcctgctgtgctacttccacctgtgtgccgaggactaccactggcagtggaggagcttcctgaccagcggcttcaccgctgtgtacttcctgatctatgctgtgcactacttcttcagcaagctgcagatcaccggcacagccagcaccatcctgtacttcggctacaccatgatcatggtgctgatcttcttcctgttcaccggcaccatcggcttctttgcctgcttctggtttgtgaccaagatctacagcgtggtgaaggtggactag

SEQ ID NO: 149889 - DNA, 1992 bp, Artificial Sequence
  derived and/or modified sequence
atgagcgcccggctgcccgtgctgagccccccccggtggccccggctcctcctcctttcactcttgttgctgggcgctgtgccaggtccacggcggtctggtgctttttatctacctgggctcgctccagttaacttctgtgatgaggagaagaagagtgacgagtgtaaagcggagattgagctatttgttaatcgcctggactctgtcgaatcggtattgccatacgagtataccgcctttgatttttgtcaggcgagcgaggggaaaagaccctctgaaaacctgggacaggtgttgtttggtgaaaggatcgagccttccccttataagtttactttcaataagaaagaaacgtgcaagctggtgtgtactaaaacttaccacacagaaaaagcggaggacaagcaaaagctggagttcttgaaaaaaagcatgttgctcaattaccaacatcactggattgttgataacatgcctgtcacgtggtgttatgacgtggaagatgggcaacgcttttgtaatcctggcttccccattggatgctatattactgacaagggtcacgctaaggatgcttgtgtcatcagctccgactttcatgaaagggatacattttatatttttaatcacgttgatataaaaatttactaccacgtggtggagacgggctccatgggagccaggttggtggccgctaagctggaaccaaagagttttaagcacacacacatcgacaagcctgattgtagtgggccccccatggacatatcaaacaaagcttccggcgagataaagattgcctacacctacagtgtatcattcgaggaggacgacaagatacgttgggcttcgcgatgggattatatcctggagtccatgccacatactcacatccagtggttttccataatgaatagcttagtgatcgtgctctttctcagtggaatggtggctatgattatgctgaggacactccacaaggatatcgcacgctacaatcagatggattcaacagaagatgctcaagaggagttcggctggaagctcgtacatggcgacattttccggccgccaaggaaaggtatgctattatcggtgttccttggttcgggaacccaaatcctgattatgacgttcgtgacattgtttttcgcatgcctgggctttttgagtcctgctaatagaggcgcactgatgacctgcgccgtggtactttgggttcttcttgggactccagctgggtacgtcgctgctaggttttataagagcttcggcggggagaagtggaaaactaacgtgctgctcacctctttcctttgtcccggcattgtttttgccgacttctttatcatgaatcttattctgtggggcgaagggtcatcagctgccatccccttcgggactctggttgccatcctggcactttggttctgcattagcgtcccgctgacttttataggcgcatattttggattcaagaaaaacgcaatagaacatcccgtcaggacgaatcagattcctcgccagattccagagcaaagtttctacaccaagcctctccccgggatcatcatggggggcatcctgcccttcggatgtatttttatccagctctttttcatcttgaacagcatttggtctcaccagatgtactatatgttcgggttcctgtttttggtattcatcatcctggtcattacatgctccgaggccaccattctgctgtgttacttccacctgtgtgctgaagactaccactggcagtggagaagttttctgacaagcggcttcacggccgtctattttttgatctacgctgtgcattacttcttcagcaagctccagataactggtactgccagcactattctgtacttcggttacaccatgatcatggtgctgatcttctttttatttaccgggactatcggattttttgcctgcttctggttcgtcacaaaaatttactccgtcgtgaaggtggattag

SEQ ID NO: 149890 - DNA, 1992 bp, Artificial Sequence
  derived and/or modified sequence
atgtccgctaggcttccggtcctctcacccccacggtggccacggttgctcttgctgtcgctgctgctgttgggggcagtgcccggaccacgacgttccggggctttttacttgcccggtctggcacccgttaatttttgcgacgaagaaaagaagtctgacgagtgtaaagcggagatcgaattattcgttaaccggctggattctgtggagtcagtactcccgtatgagtacaccgccttcgacttctgtcaagcctccgaggggaagcggccatctgagaacctggggcaggtcctgtttggcgaacgcatagaacccagcccttacaaatttaccttcaacaaaaaggagacctgtaagcttgtgtgcaccaagacttaccacaccgagaaagctgaggacaagcagaaactggagttcctgaagaagagtatgctgctgaattatcagcaccactggatagttgacaacatgccggttacctggtgttatgacgttgaggacggccaacggttctgcaaccccggatttccgattggctgttacatcaccgataaggggcatgccaaagacgcttgtgtaatatcctctgactttcacgaacgggacactttttacattttcaatcacgtagacataaaaatctattatcatgtcgtggagacaggatcaatgggggcacgtctcgttgcagccaagttagagcccaagtccttcaagcatacgcatattgacaagcctgactgcagcggcccacccatggacatttccaataaagcctccggggagatcaaaatagcctatacatattcagtaagctttgaggaagatgataagattagatgggcatctcgctgggattacatcctggaatccatgccacatactcatattcagtggttctcaattatgaattctctggtaatagtgctgttcctatccggtatggtcgccatgatcatgctccgaaccctgcataaagacatcgctaggtataaccagatggattccacagaggatgcgcaggaggagtttgggtggaaactggtgcacggcgacattttccgccctccaaggaaaggaatgctactgtcagtatttctggggagcggcacacagattctgatcatgacctttgtgacgctgttttttgcatgcttggggtttctcagcccagcaaaccgcggagctctcatgacctgcgcggtagtgctctgggtactgctaggaaccccggctggatacgtggctgcacgattctataaaagctttggtggggaaaagtggaagacaaacgtactcttgacctcttttttatgtcctggcattgtctttgcagattttttcatcatgaacctgatcctgtggggtgagggctcaagcgctgccatccccttcggcactcttgtagctatcctggcgctctggttctgcatatcagtgcccctgacattcattggggcttatttcgggttcaaaaagaacgcgattgaacatccagtgcggaccaaccagatccccaggcagattcccgaacagagtttctatacaaaacctctgcctgggataattatgggcggtatcttgcccttcggctgtatttttatccaattattcttcatcctaaacagtatctggtcccatcagatgtactatatgttcggtttcttgttcctggtcttcattatcttggttataacttgttccgaagccaccattttactctgctattttcacctctgcgccgaggactatcactggcagtggagatccttcctgacatcaggatttaccgccgtgtattttctcatctacgctgtgcactactttttttccaagctgcagattacagggacggcctccacaatcctgtatttcggctacacaatgattatggtgctgatcttttttctcttcactggtaccatcggcttctttgcctgcttctggttcgttaccaaaatctacagtgtggtaaaagttgactag

SEQ ID NO: 149891 - DNA, 2815 bp, Artificial Sequence
  derived and/or modified sequence
gcatgctctgttgcggtccgcttcggtttctgttgcgggacccggggtgtctcctagcgcaaccggaactagccttctgggggccggcttcctttatctctggcggccttgtagtcgtctccgagactccccacccctccttccctcttgaccccctaggtttgattgccctttccccgaaacaactatcatgagcgcgaggctgccggtgttgtctccacctcggtggccgcggctgttgctgctgtcgctgctcctgctgggggcggttcctggcccgcgccggagcggcgctttctacctgcccggcctggcgcccgtcaacttctgcgacgaagaaaaaaagagcgacgagtgcaaggccgaaatagaactatttgtgaacagacttgattcagtggaatcagttcttccttatgaatacacagcgtttgatttttgccaagcatcagaaggaaagcgcccatctgaaaatcttggtcaggtactattcggggaaagaattgaaccttcaccatataagtttacgtttaataagaaggagacctgtaagcttgtttgtacaaaaacataccatacagagaaagctgaagacaaacaaaagttagaattcttgaaaaaaagcatgttattgaattatcaacatcactggattgtggataatatgcctgtaacgtggtgttacgatgttgaagatggtcagaggttctgtaatcctggatttcctattggctgttacattacagataaaggccatgcaaaagatgcctgtgttattagttcagatttccatgaaagagatacattttacatcttcaaccatgttgacatcaaaatatactatcatgttgttgaaactgggtccatgggagcaagattagtggctgctaaacttgaaccgaaaagcttcaaacatacccatatagataaaccagactgctcagggccccccatggacataagtaacaaggcttctggggagataaaaattgcctatacttactctgttagcttcgaggaagatgataagatcagatgggcgtctagatgggactatattctggagtctatgcctcatacccacattcagtggtttagcattatgaattccctggtcattgttctcttcttatctggaatggtagctatgattatgttacggacactgcacaaagatattgctagatataatcagatggactctacggaagatgcccaggaagaatttggctggaaacttgttcatggtgatatattccgtcctccaagaaaagggatgctgctatcagtctttctaggatccgggacacagattttaattatgacctttgtgactctatttttcgcttgcctgggatttttgtcacctgccaaccgaggagcgctgatgacgtgtgctgtggtcctgtgggtgctgctgggcacccctgcaggctatgttgctgccagattctataagtcctttggaggtgagaagtggaaaacaaatgttttattaacatcatttctttgtcctgggattgtatttgctgacttctttataatgaatctgatcctctggggagaaggatcttcagcagctattccttttgggacactggttgccatattggccctttggttctgcatatctgtgcctctgacgtttattggtgcatactttggttttaagaagaatgccattgaacacccagttcgaaccaatcagattccacgtcagattcctgaacagtcgttctacacgaagcccttgcctggtattatcatgggagggattttgccctttggctgcatctttatacaacttttcttcattctgaatagtatttggtcacaccagatgtattacatgtttggcttcctatttctggtgtttatcattttggttattacctgttctgaagcaactatacttctttgctatttccacctatgtgcagaggattatcattggcaatggcgttcattccttacgagtggctttactgcagtttatttcttaatctatgcagtacactacttcttttcaaaactgcagatcacgggaacagcaagcacaattctgtactttggttataccatgataatggttttgatcttctttctttttacaggaacaattggcttctttgcatgcttttggtttgttaccaaaatatacagtgtggtgaaggttgactgaagaagtccagtgtgtccagttaaaacagaaataaattaaactcttcatcaacaaagacctgtttttgtgactgccttgagttttatcagaattattggcctagtaatccttcagaaacaccgtaattctaaataaacctcttcccatacacctttcccccataagatgtgtcttcaacactataaagcatttgtattgtgatttgattaagtatatatttggttgttctcaatgaagagcaaatttaaatattatgtgcatttgtaaatacagtagctataaaattttccatacttctaatggcagaatagaggaggccatattaaataatactgatgaaaggcaggacactgcattgtaaataggattttctaggctcggtaggcagaaagaattatttttctttgaaggaaataactttttatcatggtaattttgaaggatgattcctatgatgtgttcaccaggggaatgtggcttttaaagaaaatcttctattggttgtaactgttcatatcttcttacttttctgtgttgacttcattattcccatggtattggccttttaaactatgtgcctctgagtctttcaatttataaatttgttatcttaataaatattataaaaatgtc

SEQ ID NO: 149892 - protein, 1477 aa, Artificial Sequence
  derived and/or modified sequence
MGTALLQRGGCFLLCLSLLLLGCWAELGSGLEFPGAEGQWTRFPKWNACCESEMSFQLKTRSARGLVLYFDDEGFCDFLELILTRGGRLQLSFSIFCAEPATLLADTPVNDGAWHSVRIRRQFRNTTLFIDQVEAKWVEVKSKRRDMTVFSGLFVGGLPPELRAAALKLTLASVREREPFKGWIRDVRVNSSQVLPVDSGEVKLDDEPPNSGGGSPCEAGEEGEGGVCLNGGVCSVVDDQAVCDCSRTGFRGKDCSQEDNNVEGLAHLMMGDQGKSKGKEEYIATFKGSEYFCYDLSQNPIQSSSDEITLSFKTLQRNGLMLHTGKSADYVNLALKNGAVSLVINLGSGAFEALVEPVNGKFNDNAWHDVKVTRNLRQHSGIGHAMVTISVDGILTTTGYTQEDYTMLGSDDFFYVGGSPSTADLPGSPVSNNFMGCLKEVVYKNNDVRLELSRLAKQGDPKMKIHGVVAFKCENVATLDPITFETPESFISLPKWNAKKTGSISFDFRTTEPNGLILFSHGKPRHQKDAKHPQMIKVDFFAIEMLDGHLYLLLDMGSGTIKIKALLKKVNDGEWYHVDFQRDGRSGTISVNTLRTPYTAPGESEILDLDDELYLGGLPENKAGLVFPTEVWTALLNYGYVGCIRDLFIDGQSKDIRQMAEVQSTAGVKPSCSKETAKPCLSNPCKNNGMCRDGWNRYVCDCSGTGYLGRSCEREATVLSYDGSMFMKIQLPVVMHTEAEDVSLRFRSQRAYGILMATTSRDSADTLRLELDAGRVKLTVNLDCIRINCNSSKGPETLFAGYNLNDNEWHTVRVVRRGKSLKLTVDDQQAMTGQMAGDHTRLEFHNIETGIITERRYLSSVPSNFIGHLQSLTFNGMAYIDLCKNGDIDYCELNARFGFRNIIADPVTFKTKSSYVALATLQAYTSMHLFFQFKTTSLDGLILYNSGDGNDFIVVELVKGYLHYVFDLGNGANLIKGSSNKPLNDNQWHNVMISRDTSNLHTVKIDTKITTQITAGARNLDLKSDLYIGGVAKETYKSLPKLVHAKEGFQGCLASVDLNGRLPDLISDALFCNGQIERGCEGPSTTCQEDSCSNQGVCLQQWDGFSCDCSMTSFSGPLCNDPGTTYIFSKGGGQITYKWPPNDRPSTRADRLAIGFSTVQKEAVLVRVDSSSGLGDYLELHIHQGKIGVKFNVGTDDIAIEESNAIINDGKYHVVRFTRSGGNATLQVDSWPVIERYPAGRQLTIFNSQATIIIGGKEQGQPFQGQLSGLYYNGLKVLNMAAENDANIAIVGNVRLVGEVPSSMTTESTATAMQSEMSTSIMETTTTLATSTARRGKPPTKEPISQTTDDILVASAECPSDDEDIDPCEPSSGGLANPTRAGGREPYPGSAEVIRESSSTTGMVVGIVAAAALCILILLYAMYKYRNRDEGSYHVDESRNYISNSAQSNGAVVKEKQPSSAKSSNKNKKNKDKEYYV

SEQ ID NO: 149893 - protein, 1477 aa, Artificial Sequence
  derived and/or modified sequence
MGTALLQRGGCFLLCLSLLLLGCWAELGSGLEFPGAEGQWTRFPKWNACCESEMSFQLKTRSARGLVLYFDDEGFCDFLELILTRGGRLQLSFSIFCAEPATLLADTPVNDGAWHSVRIRRQFRNTTLFIDQVEAKWVEVKSKRRDMTVFSGLFVGGLPPELRAAALKLTLASVREREPFKGWIRDVRVNSSQVLPVDSGEVKLDDEPPNSGGGSPCEAGEEGEGGVCLNGGVCSVVDDQAVCDCSRTGFRGKDCSQADTNLEGLAHLMMGDQAKSKRKEEYIATFKGSEYFCYDLSQNPIQSSSDEITLSFKTLQRNGLMLHTGKSADYVNLALKNGAVSLVINLGSGAFEALVEPVNGKFNDNAWHDVKVTRNLRQHSGIGHAMVTISVDGILTTTGYTQEDYTMLGSDDFFYVGGSPSTADLPGSPVSNNFMGCLKEVVYKNNDVRLELSRLAKQGDPKMKIHGVVAFKCENVATLDPITFETPESFISLPKWNAKKTGSISFDFRTTEPNGLILFSHGKPRHQKDAKHPQMIKVDFFAIEMLDGHLYLLLDMGSGTIKIKALLKKVNDGEWYHVDFQRDGRSGTISVNTLRTPYTAPGESEILDLDDELYLGGLPENKAGLVFPTEVWTALLNYGYVGCIRDLFIDGQSKDIRQMAEVQSTAGVKPSCSKETAKPCLSNPCKNNGMCRDGWNRYVCDCSGTGYLGRSCEREATVLSYDGSMFMKIQLPVVMHTEAEDVSLRFRSQRAYGILMATTSRDSADTLRLELDAGRVKLTVNLDCIRINCNSSKGPETLFAGYNLNDNEWHTVRVVRRGKSLKLTVDDQQAMTGQMAGDHTRLEFHNIETGIITERRYLSSVPSNFIGHLQSLTFNGMAYIDLCKNGDIDYCELNARFGFRNIIADPVTFKTKSSYVALATLQAYTSMHLFFQFKTTSLDGLILYNSGDGNDFIVVELVKGYLHYVFDLGNGANLIKGSSNKPLNDNQWHNVMISRDTSNLHTVKIDTKITTQITAGARNLDLKSDLYIGGVAKETYKSLPKLVHAKEGFQGCLASVDLNGRLPDLISDALFCNGQIERGCEGPSTTCQEDSCSNQGVCLQQWDGFSCDCSMTSFSGPLCNDPGTTYIFSKGGGQITYKWPPNDRPSTRADRLAIGFSTVQKEAVLVRVDSSSGLGDYLELHIHQGKIGVKFNVGTDDIAIEESNAIINDGKYHVVRFTRSGGNATLQVDSWPVIERYPAGRQLTIFNSQATIIIGGKEQGQPFQGQLSGLYYNGLKVLNMAAENDANIAIVGNVRLVGEVPSSMTTESTATAMQSEMSTSIMETTTTLATSTARRGKPPTKEPISQTTDDILVASAECPSDDEDIDPCEPSSGGLANPTRAGGREPYPGSAEVIRESSSTTGMVVGIVAAAALCILILLYAMYKYRNRDEGSYHVDESRNYISNSAQSNGAVVKEKQPSSAKSSNKNKKNKDKEYYV

SEQ ID NO: 149894 - DNA, 4434 bp, Artificial Sequence
  derived and/or modified sequence
atgggtaccgccctcctgcagagagggggctgtttcctgctgtgtctatcattactactcctcggttgttgggctgagcttgggagcgggttagaattccccggagcagaaggccagtggactcgctttcctaagtggaatgcatgctgcgaatctgaaatgtcgttccaactgaagactagatcagcacgggggctggtgctgtatttcgacgatgaaggcttctgcgactttctggaattgatattaaccagaggagggcgtcttcagctgagtttcagcattttttgtgccgagccagcaaccctcttagcggatactcccgttaacgacggagcatggcactctgtgaggattcgacgccagttcaggaacactaccctgtttattgaccaggtggaggctaaatgggttgaagtcaaatccaagagacgcgatatgactgtgttctcgggactgtttgtaggtggcctgccgcctgaactccgcgcagccgcactcaagcttactctcgcatctgtcagagaaagagagccatttaagggctggattagagacgtgcgtgtgaattcctcccaagtactgccggtcgactccggagaggtgaaactggatgatgaaccacctaactcgggcgggggaagcccctgtgaagctggggaggagggcgagggaggcgtgtgtctaaatggcggcgtctgcagcgtcgttgacgaccaggcggtatgcgattgctcgcgcaccgggtttcgaggcaaagactgctcccaggaggacaataacgtggagggtcttgcccatctgatgatgggtgaccaaggcaaatcaaaaggaaaagaagagtacatcgctacctttaagggctccgagtatttctgctatgacctttcgcagaatcctatacagagctccagcgatgagattactctgtccttcaagactctgcagaggaacggtctaatgctgcacacaggaaaatcagccgactacgtgaatctggccctgaaaaatggggcagtgagtttagtaataaacctggggtctggcgcattcgaagcactcgtggagccggtgaacgggaagtttaatgacaatgcatggcacgatgtgaaagtcacccgcaatcttcggcagcactcgggcattgggcacgccatggtgacaatttccgtggacgggattctgaccaccaccgggtacacacaagaggattatactatgctggggagcgacgactttttctatgttggtggaagcccgagtaccgctgacttacccggttcaccagtgtcaaacaatttcatgggatgcctcaaggaagtggtctataagaacaacgatgtaaggctggaattaagtcgcctggcaaagcagggcgatccgaagatgaagattcatggagtggtggcatttaaatgtgagaatgtagccaccctcgaccctataacatttgagacaccagagtcttttatcagtctgccgaagtggaatgccaagaaaaccggttctatctcatttgatttccgcacaactgagcctaatggcctcattctttttagccatggtaaaccccggcatcagaaggacgcgaaacacccgcagatgatcaaggtagactttttcgccatcgagatgctggatggacacctgtatctgctcctggatatgggctcggggacaattaagatcaaggccttattaaagaaagtgaatgatggggagtggtaccacgtggattttcagagagacggccgctccggcactatttctgttaatactcttagaaccccttatacagcacctggggaaagtgagatcttggacctggacgatgaattgtatctggggggtctccccgaaaacaaagcaggccttgtgtttccaacagaagtgtggacggctctacttaattatggatacgtcggatgcatcagagatctgtttattgacggtcaatctaaagacatccggcagatggccgaggtgcagtctactgctggcgttaaaccaagttgttctaaagagacagctaagccttgtcttagtaacccctgtaaaaacaacggcatgtgccgggacggctggaacagatacgtttgtgattgttcgggaacagggtatctgggaagatcttgtgaaagggaggctactgtgctgtcttatgatggctcgatgtttatgaaaattcagttgccagtggtgatgcatactgaagccgaagatgtttccctgaggtttcgcagtcagcgggcgtatgggatactcatggccactacttcccgggattccgccgacactttgcgtctggagctggacgctgggagagtgaagttaacagtgaatttggattgtattagaattaattgtaatagctccaagggccctgagactctcttcgctgggtacaacttgaacgacaatgagtggcataccgtacgcgtggtgcgacgcggaaagagcctcaaactgactgtagacgatcagcaggccatgaccggtcagatggccggcgaccacaccaggttggaattccacaatatagaaaccggaatcattacagaaaggcgctacctgagcagcgtgccatctaattttatcggtcacttgcagagcctgaccttcaatggaatggcctatattgatctgtgtaaaaacggcgacatagactactgcgagttgaatgcacgcttcggcttccgcaatatcatcgctgaccctgtcacatttaagacaaagtcctcgtatgtcgcgctggccaccttacaagcctatacctcaatgcacctgttttttcagttcaagaccacctcattggacggcctgattttatacaactctggcgacggcaacgattttatcgtggtggagcttgttaaaggctatctccactacgtcttcgacttagggaacggggctaaccttattaagggaagttccaataagcctttgaatgacaaccagtggcataacgtgatgatatcgagagacactagcaacctccataccgtaaagatcgatactaagatcaccacacagataacggccggggcccggaatctcgacctgaaatccgacctttacattggaggcgtcgctaaagagacctataagtctcttcccaagctcgtccacgccaaggagggtttccagggctgcttagcatctgtggatctcaacggccgtctgccagacttaattagcgatgcccttttctgcaacggccagattgagcgaggatgtgagggcccctctaccacctgccaggaagattcttgcagcaatcaaggggtgtgcttgcagcagtgggatgggttttcttgcgactgctccatgacatccttttcgggtcccttgtgtaacgatcccggcactacctacatcttctctaaaggtggaggccaaatcacatacaagtggccgcccaatgacagacccagcacccgcgctgacagacttgctatcgggttctccaccgtgcagaaggaggccgtactcgtgcgggttgattcgtcatctgggctaggtgactatttggaactgcacatccatcagggtaagataggcgtgaagtttaatgtgggcactgatgatatcgcgatcgaggagtccaatgccatcatcaatgacgggaagtaccatgtcgtgaggtttacacgcagcggcggtaacgcaactctgcaagtggatagctggccggtaatcgagcggtacccagcaggcagacagctaactatctttaactcacaggcgacaatcatcatcggggggaaggagcagggccagcccttccaggggcagctgtccgggctttactataatggcctgaaggtgttgaatatggccgccgagaatgacgctaacattgccatagtcgggaacgtgaggcttgttggcgaagtaccctcgagcatgactaccgaatctacggctactgccatgcagtctgaaatgagtaccagtatcatggagacaactacaacgttagccaccagtacagccagaagggggaagccaccaacaaaggagccgattagccagacaaccgacgatatcttagtcgcatccgccgaatgtccgtctgacgacgaggatatcgacccttgcgagccatcctccggagggcttgcgaaccccactcgggcgggaggcagagagccttatcctgggagcgccgaagtaatacgggagagctcaagtaccactggaatggttgtggggatcgttgccgcagccgcattatgcattcttattctgctgtatgccatgtacaagtatcggaacagagacgagggatcttaccacgtggatgagagccggaactacatctcaaacagcgcacagtcaaatggtgcagttgttaaggaaaagcagcccagcagcgccaaatcttctaataagaataagaagaacaaggataaagaatactacgtctag

SEQ ID NO: 149895 - DNA, 4434 bp, Artificial Sequence
  derived and/or modified sequence
atgggtactgctctgctccagaggggcggatgtttccttttatgtttaagtctactgctgctggggtgctgggctgaactcggttccgggcttgaattccctggtgcggagggacagtggacacgcttcccaaaatggaacgcttgttgtgaaagcgaaatgtctttccagctcaagactcggtctgccaggggcctggtgctctatttcgacgatgagggattctgtgatttcctggagctgatattgaccaggggcggacgcctccagctatcttttagtatcttttgcgcagaacccgccactctgcttgcggacacaccagtcaatgatggagcttggcatagtgtacgcattcgcaggcagtttcgcaatactacactgttcatcgaccaggttgaagcaaagtgggtagaggtcaagtctaagcggcgcgatatgacggtgtttagtggactctttgttggcggactgccaccagagttgcgcgccgcagcccttaaactgactctcgcctcagtgagagagagagaacccttcaaagggtggatcagggatgtgagagtaaatagttctcaggtcctcccagtagacagcggggaggttaagttagatgacgaacccccaaacagtggcggcggatctccctgtgaggcgggtgaggaaggggaaggcggagtgtgtctgaatggcggggtctgcagcgtggtcgatgatcaggccgtgtgcgattgctcaaggaccggattcagaggaaaggattgctcccaggccgacaccaacctcgaggggctcgcccacctaatgatgggcgaccaggcaaagagcaagaggaaagaagagtacatcgccactttcaaaggctcggaatatttctgctacgatctctcccaaaacccaattcaatcttcatctgatgagatcaccctgagctttaaaaccctacagcgcaacggcctcatgttacatactgggaaatccgctgattatgtaaacttggcactgaagaatggcgccgtatctctcgtgatcaacttggggtccggagcctttgaggctcttgtcgaaccagtaaatggaaagttcaatgataatgcctggcatgacgtgaaggtgacacgcaatctgcgccagcatagcggtatcggacatgcaatggtcaccatcagtgtggacggaattcttacgactacaggatacacacaggaagactataccatgttgggcagtgacgactttttttacgtgggcggttctccatcaacagccgacttaccggggtcgcccgtgtccaacaatttcatgggttgtctgaaggaggtggtgtacaagaacaacgatgtgcgcttagagttgtctcggttggccaaacagggtgaccccaagatgaagattcacggggtggtagcatttaaatgcgaaaatgtggctaccctcgaccccattacattcgagacaccagaatccttcatcagcctgcctaagtggaatgccaaaaaaaccggtagcatctccttcgattttcgtaccaccgagcctaatgggctcatactgttcagccatggcaaacccaggcaccagaaggacgccaaacacccgcagatgattaaggtagacttctttgcgatagaaatgcttgacgggcatctttatctgcttttggacatgggttctgggaccattaaaatcaaggccctccttaagaaagtcaacgatggcgaatggtatcacgtggacttccaaagggatggccggagtggcacaatctctgtgaatacactgcgcacaccatacacagctccaggcgaaagtgagatcctagacctcgatgacgaactatacttaggcgggctacccgaaaataaggctggccttgtcttcccgactgaagtgtggaccgccctgctgaattatggctacgtcgggtgcattagggacctctttatagatggtcaaagtaaagacataaggcagatggcagaagtgcaatccactgccggcgtcaaacccagctgcagcaaggaaaccgctaagccctgtctaagcaatccatgtaaaaataacgggatgtgccgggacggctggaatcggtacgtgtgtgactgctctgggactggttatttgggacggagctgcgagcgagaggccaccgtcctgagttacgatggctctatgtttatgaagatccagttacctgtcgtcatgcataccgaagctgaagacgtatctctccgctttcgctcccagcgggcctacggtattctcatggcgactaccagtagagactctgcggatacattaaggcttgagttggatgcaggccgcgtgaagctgacggtcaatcttgactgtatacgaatcaattgtaacagctccaagggacccgaaactctgtttgccggctacaatctcaacgataatgaatggcataccgtccgagtggtcagacgtgggaagagcttaaagctgactgtggacgatcagcaggctatgaccggtcagatggcgggcgaccacactcggctcgagttccataacattgaaaccggaattattacagagcggcgctatctctccagtgttccttccaacttcattggccacctccagtccctcacttttaacggcatggcatatatagacctctgtaaaaatggagacatcgattattgtgagttaaacgcccgatttgggtttcgcaatataattgcagaccctgtgacgtttaaaacgaagtcttcttacgtggctttagctaccctgcaggcctacacgtcgatgcacctgttttttcagttcaaaaccactagcctggatggcctaatactctataattccggcgatggcaacgatttcattgtggtcgaactggtgaaggggtacctgcattacgtgtttgacctggggaacggagctaaccttattaagggttcctctaataagccccttaacgataatcagtggcacaacgtgatgattagtagggacaccagtaacttgcacacggtgaagattgacactaaaattactactcaaattactgctggtgctcggaatttagacttaaagagcgatctgtatatcggtggagtcgctaaggaaacatataaatctctccctaagctggtccatgctaaagagggcttccagggctgtctggcgtccgtggacctaaacggccggctgcccgatctgattagtgatgcactcttttgtaatggtcagatcgaacgtggctgcgaaggcccttctacgacttgccaagaggatagctgtagtaaccaaggagtgtgcttgcaacagtgggatggcttctcttgcgactgcagtatgacgtcttttagcggcccactttgcaacgaccccggaaccacctatatattctctaagggaggaggacagatcacttacaagtggcccccaaatgacaggcctagcacaagagccgacagactggccatcggtttcagcactgtccagaaggaagccgttcttgtgagagtggacagttcatctggactaggagattatcttgagcttcatatccaccaggggaaaatcggcgtgaaattcaacgtgggcacagacgatatagcgatcgaagagagtaatgccataatcaatgatgggaagtatcacgtggtgcggttcacaaggagcggtggcaacgcgaccttgcaagtagattcttggcccgtgatcgaaagatacccggccggtaggcaactgactatcttcaactcccaggccaccatcatcatcggtggcaaagagcagggtcagcctttccaaggccagctgtccggcctctactataacggcttgaaggttctcaacatggccgctgagaacgatgctaatattgccatagtgggcaacgttcgcctggtcggcgaggtgcccagttcaatgaccaccgagtctacggccactgccatgcagtctgaaatgtctacatctataatggagacaacgacaaccctggctacatccacggctagaagaggaaagcccccaactaaggagcctatttcgcagacgactgacgacatattggtggcaagcgcggagtgcccatctgatgatgaagacattgacccttgcgaaccaagtagcggcggattggctaatcctactcgggccggaggtcgtgagccataccccgggtccgccgaggtgatcagagaatcctccagcaccactgggatggtcgtcggtatcgtggccgccgcagctctctgcatacttattcttctatatgccatgtataagtaccgcaacagggacgaagggtcttatcacgtggacgagagccgcaactacatatccaattccgcccagagcaatggtgcggtagtgaaggaaaaacagccttctagtgccaagtctagcaacaagaacaaaaagaacaaggataaggagtattacgtgtag

SEQ ID NO: 149896 - DNA, 4434 bp, Artificial Sequence
  derived and/or modified sequence
atgggcacagccctgctgcagagaggaggctgcttcctgctgtgcctgagcctgctgctgctgggctgctgggccgagctgggcagcggcctggagttccctggagctgagggccagtggacccgcttccccaagtggaatgcctgctgtgagagcgagatgtccttccagctgaagaccaggtctgcccggggcctggtgctgtactttgatgatgagggcttctgtgacttcctggagctgatcctgacccggggcggccgcctgcagctgtccttcagcatcttctgtgccgagcccgccaccctgctggccgacacccctgtgaatgatggagcctggcacagcgtgcgcatccggcggcagttcaggaacaccaccctcttcatcgaccaggtggaggccaagtgggtggaggtgaagagcaagaggcgggacatgaccgtcttcagcggcctgtttgtgggcggcctgcccccagagctgcgggctgctgccctgaagctgaccctggcctctgtgcgggagcgggagcccttcaagggctggatcagagatgtgcgggtgaacagcagccaggtgctgcctgtggacagcggggaggtgaagctggatgatgagccccccaacagcggcggcggcagcccctgtgaggccggggaggagggggagggcggcgtgtgcctgaatggaggagtgtgcagcgtggtggatgaccaggccgtgtgtgactgcagcaggacaggcttccggggcaaggactgcagccaggaggacaacaacgtggagggcctggcccacctgatgatgggagaccagggcaagagcaagggcaaggaggagtacatcgccaccttcaagggcagcgagtacttctgctatgacctgagccagaaccccatccagagcagcagtgatgagatcaccctgtccttcaagaccctgcagagaaatggcctgatgctgcacacaggcaagtctgctgactatgtgaacctggccctgaagaatggagctgtgtccctggtgatcaacctgggcagcggggcctttgaggccctggtggagcctgtgaatggcaagttcaatgacaatgcctggcatgatgtgaaggtgaccaggaacctgcggcagcacagcggcatcggccacgccatggtgaccatctctgtggatggcatcctgaccaccaccggctacacccaggaggactacaccatgctgggcagtgatgacttcttctacgtgggcggcagccccagcacagctgacctgcccggcagccctgtgagcaacaacttcatgggctgcctgaaggaggtggtgtacaagaacaatgatgtgcggctggagctgagccggctggccaagcagggcgaccccaagatgaagatccacggcgtggtggccttcaagtgtgaaaatgtggccaccctggaccccatcacctttgagaccccagagagcttcatcagcctgcccaagtggaatgccaagaagacaggcagcatcagctttgacttccgcaccacagagcccaacggcctcatcctcttcagccacggcaagcccaggcaccagaaggatgccaagcacccccagatgatcaaggtggacttctttgccatcgagatgctggatggccacctgtacctgctgctggacatgggcagcggcaccatcaagatcaaggccctgctgaagaaggtgaatgatggagagtggtaccacgtggacttccagagagatggccgcagcggcaccatctctgtgaacaccctgcggaccccctacacagcccctggagagagcgagatcctggacctggatgatgagctgtacctgggcggcctgcctgagaacaaggccggcctggtgttccccacagaggtgtggacagccctgctgaactacggctacgtgggctgcatccgggacctcttcattgatggccagagcaaggacatccggcagatggccgaggtgcagagcacagctggggtgaagcccagctgcagcaaggagacagccaagccctgcctgagcaacccctgcaagaacaacggcatgtgcagagatggctggaaccgctacgtgtgtgactgcagcggcaccggctacctgggccgcagctgtgagcgggaggccaccgtgctgtcctatgatggctccatgttcatgaagatccagctgcctgtggtgatgcacacagaagcagaagatgtgtccctgcgcttccgcagccagagggcctacggcatcctgatggccaccaccagccgggacagcgctgacaccctgcggctggagctggatgctggccgggtgaagctgactgtgaacctggactgcatccgcatcaactgcaacagcagcaaaggacctgagaccctgtttgctggctacaacctgaatgacaatgagtggcacacagtgcgggtggtgcggcggggcaagagcctgaagctgactgtggatgaccagcaggccatgacaggccagatggccggggaccacacccggctggagttccacaacattgaaacaggcatcatcacagaaagacgctacctgagctctgtgcccagcaacttcatcggccacctgcagagcctgaccttcaacggcatggcctacatcgacctgtgcaagaatggagacatcgactactgtgagctgaatgccaggtttggcttcaggaacatcatcgctgaccctgtgaccttcaagaccaagagcagctatgtggccctggccaccctgcaggcctacacctccatgcacctgttcttccagttcaagaccaccagcctggatggcctcatcctgtacaacagcggagatggaaatgacttcatcgtggtggagctggtgaagggctacctgcactacgtgtttgacctgggcaatggagccaacctgatcaagggcagcagcaacaagcccctgaatgacaaccagtggcacaacgtgatgatcagccgggacaccagcaacctgcacacagtgaagattgacaccaagatcaccacccagatcacagctggggccaggaacctggacctgaagagtgacctgtacatcggcggcgtggccaaggagacctacaagagcctgcccaagctggtgcacgccaaggagggcttccagggctgcctggcctctgtggacctgaatggccgcctgcctgacctgatcagtgatgccctcttctgcaatggccagatcgagcggggctgtgagggccccagcaccacctgccaggaggacagctgcagcaaccagggcgtgtgcctgcagcagtgggatggcttcagctgtgactgcagcatgaccagcttcagcggccccctgtgcaatgaccccggcaccacctacatcttcagcaagggcggcggccagatcacctacaagtggcccccaaatgaccggcccagcaccagggctgaccggctggccatcggcttcagcacagtgcagaaggaggccgtgctggtgcgggtggacagcagcagcggcctgggggactacctggagctgcacatccaccagggcaagattggagtgaagttcaacgtgggcacagatgacatcgccatcgaggagagcaatgccatcatcaatgatggcaagtaccacgtggtgcgcttcaccaggtctggaggaaatgccaccctgcaggtggacagctggcctgtgattgaaagatacccagctggccggcagctgaccatcttcaacagccaggccaccatcatcatcggcggcaaggagcagggccagcccttccagggccagctgagcggcctgtactacaacggcctgaaggtgctgaacatggccgcagaaaatgatgccaacatcgccatcgtgggcaatgtgcggctggtgggggaggtgcccagctccatgaccacagagagcacagccacagccatgcagagcgagatgagcaccagcatcatggagaccaccaccaccctggccaccagcacagcccggcggggcaagccacccaccaaggagcccatcagccagaccacagatgacatcctggtggccagcgcagaatgtcccagtgatgatgaagatattgacccctgtgagcccagcagcggcggcctggccaaccccaccagggctgggggccgggagccctacccaggcagcgctgaggtgatccgggagagcagcagcaccaccggcatggtggtgggcatcgtggccgctgctgccctgtgcatcctgatcctgctgtatgccatgtacaagtacagaaacagagatgagggcagctaccacgtggatgagagcaggaactacatcagcaacagcgcccagagcaatggagctgtggtgaaggagaagcagcccagcagcgccaagagcagcaacaagaacaagaagaacaaggacaaggagtactacgtgtag

SEQ ID NO: 149897 - DNA, 4434 bp, Artificial Sequence
  derived and/or modified sequence
atgggcacagccctgctgcagagaggaggctgcttcctgctgtgcctgagcctgctgctgctgggctgctgggccgagctgggcagcggcctggagttccctggagctgagggccagtggacccgcttccccaagtggaatgcctgctgtgagagcgagatgtccttccagctgaagaccaggtctgcccggggcctggtgctgtactttgatgatgagggcttctgtgacttcctggagctgatcctgacccggggcggccgcctgcagctgtccttcagcatcttctgtgccgagcccgccaccctgctggccgacacccctgtgaatgatggagcctggcacagcgtgcgcatccggcggcagttcaggaacaccaccctcttcatcgaccaggtggaggccaagtgggtggaggtgaagagcaagaggcgggacatgaccgtcttcagcggcctgtttgtgggcggcctgcccccagagctgcgggctgctgccctgaagctgaccctggcctctgtgcgggagcgggagcccttcaagggctggatcagagatgtgcgggtgaacagcagccaggtgctgcctgtggacagcggggaggtgaagctggatgatgagccccccaacagcggcggcggcagcccctgtgaggccggggaggagggggagggcggcgtgtgcctgaatggaggagtgtgcagcgtggtggatgaccaggccgtgtgtgactgcagcaggacaggcttccggggcaaggactgcagccaggccgacaccaacctggagggcctggcccacctgatgatgggagaccaggccaagagcaagaggaaggaggagtacatcgccaccttcaagggcagcgagtacttctgctatgacctgagccagaaccccatccagagcagcagtgatgagatcaccctgtccttcaagaccctgcagagaaatggcctgatgctgcacacaggcaagtctgctgactatgtgaacctggccctgaagaatggagctgtgtccctggtgatcaacctgggcagcggggcctttgaggccctggtggagcctgtgaatggcaagttcaatgacaatgcctggcatgatgtgaaggtgaccaggaacctgcggcagcacagcggcatcggccacgccatggtgaccatctctgtggatggcatcctgaccaccaccggctacacccaggaggactacaccatgctgggcagtgatgacttcttctacgtgggcggcagccccagcacagctgacctgcccggcagccctgtgagcaacaacttcatgggctgcctgaaggaggtggtgtacaagaacaatgatgtgcggctggagctgagccggctggccaagcagggcgaccccaagatgaagatccacggcgtggtggccttcaagtgtgaaaatgtggccaccctggaccccatcacctttgagaccccagagagcttcatcagcctgcccaagtggaatgccaagaagacaggcagcatcagctttgacttccgcaccacagagcccaacggcctcatcctcttcagccacggcaagcccaggcaccagaaggatgccaagcacccccagatgatcaaggtggacttctttgccatcgagatgctggatggccacctgtacctgctgctggacatgggcagcggcaccatcaagatcaaggccctgctgaagaaggtgaatgatggagagtggtaccacgtggacttccagagagatggccgcagcggcaccatctctgtgaacaccctgcggaccccctacacagcccctggagagagcgagatcctggacctggatgatgagctgtacctgggcggcctgcctgagaacaaggccggcctggtgttccccacagaggtgtggacagccctgctgaactacggctacgtgggctgcatccgggacctcttcattgatggccagagcaaggacatccggcagatggccgaggtgcagagcacagctggggtgaagcccagctgcagcaaggagacagccaagccctgcctgagcaacccctgcaagaacaacggcatgtgcagagatggctggaaccgctacgtgtgtgactgcagcggcaccggctacctgggccgcagctgtgagcgggaggccaccgtgctgtcctatgatggctccatgttcatgaagatccagctgcctgtggtgatgcacacagaagcagaagatgtgtccctgcgcttccgcagccagagggcctacggcatcctgatggccaccaccagccgggacagcgctgacaccctgcggctggagctggatgctggccgggtgaagctgactgtgaacctggactgcatccgcatcaactgcaacagcagcaaaggacctgagaccctgtttgctggctacaacctgaatgacaatgagtggcacacagtgcgggtggtgcggcggggcaagagcctgaagctgactgtggatgaccagcaggccatgacaggccagatggccggggaccacacccggctggagttccacaacattgaaacaggcatcatcacagaaagacgctacctgagctctgtgcccagcaacttcatcggccacctgcagagcctgaccttcaacggcatggcctacatcgacctgtgcaagaatggagacatcgactactgtgagctgaatgccaggtttggcttcaggaacatcatcgctgaccctgtgaccttcaagaccaagagcagctatgtggccctggccaccctgcaggcctacacctccatgcacctgttcttccagttcaagaccaccagcctggatggcctcatcctgtacaacagcggagatggaaatgacttcatcgtggtggagctggtgaagggctacctgcactacgtgtttgacctgggcaatggagccaacctgatcaagggcagcagcaacaagcccctgaatgacaaccagtggcacaacgtgatgatcagccgggacaccagcaacctgcacacagtgaagattgacaccaagatcaccacccagatcacagctggggccaggaacctggacctgaagagtgacctgtacatcggcggcgtggccaaggagacctacaagagcctgcccaagctggtgcacgccaaggagggcttccagggctgcctggcctctgtggacctgaatggccgcctgcctgacctgatcagtgatgccctcttctgcaatggccagatcgagcggggctgtgagggccccagcaccacctgccaggaggacagctgcagcaaccagggcgtgtgcctgcagcagtgggatggcttcagctgtgactgcagcatgaccagcttcagcggccccctgtgcaatgaccccggcaccacctacatcttcagcaagggcggcggccagatcacctacaagtggcccccaaatgaccggcccagcaccagggctgaccggctggccatcggcttcagcacagtgcagaaggaggccgtgctggtgcgggtggacagcagcagcggcctgggggactacctggagctgcacatccaccagggcaagattggagtgaagttcaacgtgggcacagatgacatcgccatcgaggagagcaatgccatcatcaatgatggcaagtaccacgtggtgcgcttcaccaggtctggaggaaatgccaccctgcaggtggacagctggcctgtgattgaaagatacccagctggccggcagctgaccatcttcaacagccaggccaccatcatcatcggcggcaaggagcagggccagcccttccagggccagctgagcggcctgtactacaacggcctgaaggtgctgaacatggccgcagaaaatgatgccaacatcgccatcgtgggcaatgtgcggctggtgggggaggtgcccagctccatgaccacagagagcacagccacagccatgcagagcgagatgagcaccagcatcatggagaccaccaccaccctggccaccagcacagcccggcggggcaagccacccaccaaggagcccatcagccagaccacagatgacatcctggtggccagcgcagaatgtcccagtgatgatgaagatattgacccctgtgagcccagcagcggcggcctggccaaccccaccagggctgggggccgggagccctacccaggcagcgctgaggtgatccgggagagcagcagcaccaccggcatggtggtgggcatcgtggccgctgctgccctgtgcatcctgatcctgctgtatgccatgtacaagtacagaaacagagatgagggcagctaccacgtggatgagagcaggaactacatcagcaacagcgcccagagcaatggagctgtggtgaaggagaagcagcccagcagcgccaagagcagcaacaagaacaagaagaacaaggacaaggagtactacgtgtag

SEQ ID NO: 149898 - DNA, 4434 bp, Artificial Sequence
  derived and/or modified sequence
atgggcaccgccctgctgcagcggggcggctgcttcctgctgtgcttgagccttctgctcctcggctgctgggcggaactgggtagcggtctggagtttcccggagccgagggacagtggaccaggttccctaagtggaacgcctgctgtgagagcgaaatgagcttccaattgaagactcgctctgcgaggggccttgtgctgtacttcgacgacgaaggcttctgtgacttcctggagctgatcttgacgcgcggcggcaggctccagttgtccttcagtatcttttgtgccgagcccgccacgctgctggccgatacccccgttaacgacggtgcttggcacagcgtgcggatcagacgccagtttcgtaacactactctgttcatagaccaagtggaggcgaagtgggtggaagtgaagagcaagagacgcgatatgactgttttcagcggactgtttgtcgggggactgccccctgagctgagagcagcggctctgaaactcaccctggcttccgtgcgggaacgagagccattcaagggctggatacgagacgtgcgcgtgaactcttctcaggttctccctgtggattccggtgaagttaagctggacgacgagcctcctaattccggaggtggctccccctgcgaggccggagaggagggcgaaggaggggtttgcctcaacggtggcgtctgttctgtagtggacgaccaggctgtctgtgattgttcaaggactggctttcgtggaaaggactgctctcaggaagacaataatgtcgaagggctcgcccacctgatgatgggggatcaaggcaaatctaagggtaaggaagagtacattgcaaccttcaagggtagtgaatacttttgctatgacttgagccagaacccaatccaatcatcaagcgatgagattacgttatccttcaagacactccaaaggaacggactaatgctgcacactggcaaatccgccgattacgtgaatctggcgttaaagaatggagcagtgagcttggtcatcaatctgggctcaggggccttcgaggcactcgtagagccagtgaacgggaaattcaacgacaatgcctggcacgatgttaaggtcacgagaaacttaaggcaacacagtgggatcggtcacgctatggtgaccatttcagtggatggaatactgacaaccaccgggtatacacaggaggactacaccatgctgggatccgacgatttcttctacgtgggcggatcaccatcaacagccgatctgccgggatcacccgtatccaacaatttcatggggtgtctgaaggaggtggtttacaagaataacgacgtccgcctcgaactcagtcggctcgctaagcagggggacccgaaaatgaagattcacggggtggtagcattcaaatgtgaaaacgtggcaaccctggaccctattacctttgagacacccgagagcttcatttcgctacccaagtggaacgcaaagaagaccgggtcaatcagcttcgactttaggactacagaacccaacggactcatcctatttagccacggcaaaccaagacatcagaaggacgcgaaacacccacagatgatcaaggtggacttcttcgcaattgagatgctggatggccacttgtacttactgctcgacatgggttccggtaccatcaagatcaaggcgctgcttaagaaagtcaacgatggggaatggtaccatgttgattttcaacgggatgggagatccggcaccatctccgtaaacaccctccgtactccatataccgctcctggggaatctgagatcctggacctcgatgacgaactgtatctggggggtcttccggaaaataaagcgggactggtgtttcccactgaagtttggaccgctctcctgaactacggttatgtgggatgcatcagggatctctttatcgacggacagtccaaggacatacgacagatggccgaagtgcagagcaccgctggcgtcaaacccagctgtagtaaggagacagcaaaaccctgtctgtcaaatccatgcaaaaataacggaatgtgccgagatggatggaatcgctatgtatgcgattgcagcgggacaggctatctggggcggagctgtgaacgtgaggccactgtgctcagctacgacgggtcaatgttcatgaagattcaattaccagtcgtgatgcacacagaagcagaggatgtgagtttacgatttaggtctcagcgggcctacggcatactcatggccacaacctcgcgggattctgcagacacgctgaggctggaattggatgcaggtagagtcaagctcacggttaacttggactgcattagaattaattgtaactcaagcaaaggccccgaaacactcttcgctggttataacttgaatgacaacgagtggcataccgtgagggttgtgcgccgtggtaaaagtctgaagctgacagtggacgaccagcaggcgatgacaggccagatggccggtgatcatacgcgtttggagttccataacatcgagacagggatcattaccgagcgcaggtacctatcgagtgtgccatctaacttcattgggcacttgcagtcgttgacatttaatggaatggcatacattgatctgtgcaaaaatggagacatagattactgtgagttgaacgcgcgattcggttttcgtaacataatagccgatccagttacatttaagaccaagtctagctacgtggccctagccaccctacaggcctatacatcgatgcacttgttcttccagtttaagaccacgagcctggatggtctcatcctgtacaacagtggagatggaaacgactttattgtagtcgaactagtgaaaggatatctacactacgtgttcgatctgggtaatggcgcaaatcttattaaagggagctcgaacaagcctctgaacgacaatcagtggcacaatgtgatgatctcaagagatacgtcgaacctgcacactgtcaaaattgatacaaaaataactacacagatcaccgccggagcccgcaaccttgacttaaaatcagacctatacattggtggagtcgctaaagagacttacaaatcactaccgaagttggtccatgccaaagaggggtttcaaggatgtcttgctagtgtggacctgaatggccgccttccagacctgatttctgatgcgcttttctgtaacggacagatagagcgggggtgtgaggggcctagcactacatgtcaggaagattcctgctccaatcagggggtctgcttacaacagtgggatgggtttagctgcgactgctctatgacctctttctcaggaccactttgcaacgacccagggacaacctacatcttctcaaaaggcgggggccaaatcacctataaatggccaccaaatgacagaccctccacaagagcagataggctggccatcggattctccacagtccagaaggaggcagtattggtacgcgttgactcatcttcgggtctcggagattacctggagctccacatccaccagggcaagatcggtgtcaagtttaacgttggcacagacgacatcgccatcgaagagtccaatgctatcattaacgacgggaaatatcatgtcgtgagatttactcgcagtggcggcaacgcgacactgcaagttgatagctggccagtgattgagaggtacccagccgggcgccagctgacgattttcaacagccaggcaaccatcataattggcgggaaggagcagggccaaccattccagggccaactaagcgggctttactacaacgggctcaaagtgctcaacatggccgccgaaaacgatgccaacatcgccatagtgggtaatgtgagattagttggagaggtcccttcctcaatgactacagagtccaccgctacggccatgcagtccgagatgagcacatccattatggagactactactacgctggcgacttccaccgcccgcagaggaaaaccacccactaaggaacccatttcacaaaccaccgatgacattctggtggcgagcgctgagtgtcctagtgatgacgaagatatcgacccttgcgaaccttctagcgggggcttggccaaccccaccagggccgggggcagggaaccatatcctggctccgcagaagtcatcagagagtcctcatccaccactggaatggtggtcgggatcgtggcagccgcagccttatgtatcctgatcttgctgtatgccatgtacaagtacagaaatagagacgagggtagttatcatgtcgatgagagtcgcaattacatcagcaatagcgcacagagcaacggtgccgtggtgaaggaaaagcaaccaagcagcgcgaaaagttcgaacaaaaataagaagaacaaggacaaggagtattacgtatag

SEQ ID NO: 149899 - DNA, 4434 bp, Artificial Sequence
  derived and/or modified sequence
atgggcaccgccctgctgcagcggggcggctgcttcctgctgtgcctgtccctcctccttctgggctgttgggctgagctgggttccggcctggaatttcccggtgcagagggccagtggactcgctttcccaagtggaacgcttgctgcgaatctgaaatgtcgttccagttgaagacacggagcgcccgcggcttagtcctatactttgacgacgaggggttttgcgattttttagagcttattctgactaggggaggcagactgcaactatcattctcaatcttttgtgccgagccagccacactgctggcagacacacccgtcaatgatggtgcgtggcacagcgtgcgaatccgtcgtcaatttaggaataccacgctcttcatagaccaagtagaagctaaatgggtggaagtgaagtcaaagaggcgtgatatgacggtgttctctggattgttcgttggtggtctgccccctgagttgcgggccgccgcacttaagttaactctggcttcggtacgcgagagagagcccttcaaagggtggatacgcgatgtccgggtaaactcaagccaagtcctcccagtggacagtggggaggtcaaattggacgatgagccccccaattccggcggcggatcaccttgtgaggccggggaggaaggggaaggaggagtatgtcttaatggcggcgtgtgttccgtagttgacgatcaggcggtgtgcgactgcagtcggacgggatttcgtggaaaagattgtagtcaggctgacactaacctagaagggctggcgcatttaatgatgggggatcaggcaaagtcaaagcgaaaagaagagtacattgctacgtttaaagggtctgagtacttctgttacgacctctcccagaatcccattcaaagctctagcgatgagatcaccttgtcgttcaagaccttacaaagaaatggactcatgcttcacactgggaaatccgccgattacgtgaacctagcactaaagaatggcgccgtatccttggtgataaacctcggctctggtgcgttcgaggcactggttgaacctgttaatggaaaattcaacgacaatgcgtggcacgacgtgaaagtgaccaggaatttaagacaacattctggaataggacacgcaatggtgacgatttccgtggatggaatcctgactacgacagggtacacccaagaagattatacaatgctcggcagtgatgattttttctatgtgggcggctcccctagcaccgctgatcttcctggtagccctgtgagtaataacttcatgggatgtttgaaagaggtggtctataaaaataacgacgtaagactcgaactttctcggttagccaagcagggcgaccccaagatgaaaatccacggagtggtagctttcaaatgtgagaacgtggctacccttgacccgatcacttttgagactcctgagagttttatatctctgcccaagtggaacgccaagaaaacgggctcaatttcctttgattttcggaccaccgagcctaatggcttaatcctgttctcccatggaaaaccaagacaccagaaggacgccaaacacccccagatgatcaaggtcgacttctttgctatcgagatgctggatgggcatctttacctcttgttggatatgggctcaggaactattaaaatcaaagcactgttaaaaaaggtcaatgacggcgagtggtaccatgtagactttcaacgcgacgggcgttcggggacaattagcgtgaacacactcaggacaccctatactgcccccggtgagagtgaaatcctggacttggatgatgagctctacctaggaggcctgcccgagaacaaagcagggctcgtcttccccacagaggtgtggactgcgctgctgaactacgggtatgtgggctgcatccgcgatctgtttattgatggccagtccaaggatatacggcagatggccgaggttcagtctactgccggcgtgaagccaagctgcagcaaggagacagccaagccatgcctctcaaatccgtgcaagaataatggcatgtgtcgggatgggtggaaccgctatgtctgtgattgctccgggaccgggtatcttggccggagctgcgaacgcgaggccaccgtgctgagctatgatgggagcatgtttatgaaaatccaactgcccgtagtgatgcatactgaggccgaggacgtgagcctccggtttagatctcagagggcttacggtatcttgatggccaccacaagccgtgattccgccgatacacttcgtctggagttggatgccgggcgtgtaaaattaaccgtgaatctggactgcatcaggatcaattgtaactcttcaaaaggccctgaaactcttttcgcggggtacaatctcaatgacaacgagtggcatacggtcagggtggtccgccgcggaaagtctctgaaactgacggtcgacgaccagcaagccatgacaggccaaatggccggcgatcacactcgcctggaatttcacaatattgaaaccggcattatcaccgagcgcaggtacctgagctcggttcccagcaacttcataggccacctccagtctctcacgttcaacgggatggcatacatcgacctctgcaaaaacggtgatattgactactgcgagcttaacgcaagattcggcttcaggaatatcattgcagatcctgtcacgtttaaaaccaagagctcgtatgtcgccctggccactctccaggcttacacttctatgcacctgtttttccagttcaaaaccacttccctggacgggctcatcttgtacaatagcggggacgggaatgatttcattgttgtggagctggtcaagggataccttcactacgtattcgatctgggaaacggcgcgaatctaattaaaggctcgtctaataaacccctgaacgacaatcagtggcataatgtcatgatctcacgcgatacttcgaacctgcatacagtgaagatagatactaagatcaccactcagatcacagccggcgcaagaaacctagacctcaaatccgacctttacataggcggcgtggcaaaggaaacatataaaagtcttcctaaattagtgcacgctaaggagggattccaaggctgtctcgccagcgttgatctcaacggccgcctacctgatttgattagcgacgcgctgttttgtaacggtcagatagagcggggatgtgaagggccatccactacctgtcaggaagatagttgctcaaatcagggagtgtgcctgcaacaatgggacggtttctcctgcgactgtagcatgacaagtttctctggacccctctgcaatgaccccggaacgacatacatattcagcaagggaggcggtcaaatcacctacaaatggcctcccaacgacagaccatcaacccgggccgaccggctggcgatcggattttctaccgtgcagaaagaagcagtacttgtgagagtagatagctcttcaggactgggcgattacctggagttgcatatccaccaagggaagattggagtaaagtttaatgtgggtaccgatgatatagcaatcgaggagagcaacgccatcataaacgatggtaagtatcacgtggtccgctttacgaggtcaggcgggaacgcgactctgcaagtcgactcttggcccgtgatcgagaggtatccagcagggagacagctgaccatcttcaactcccaagccacaattatcattggaggaaaggaacagggtcagcctttccaaggacagctcagtggactctattacaatggcctaaaagtgctcaatatggcagcagaaaacgacgccaatattgccatcgtggggaacgttaggctggttggagaagtgccatctagcatgacaacggagtcaacggccacagccatgcagagcgaaatgagtacttctattatggagacaactaccactctggcaacctcaactgcacgccgaggaaaaccccccacaaaggaaccaataagtcagacaaccgacgatattctggtggcctctgccgaatgtccatcagacgacgaggacattgacccttgcgagccaagttcgggcggccttgccaacccgacccgggccggcggacgcgaaccttacccaggctctgcggaagtcatccgggagagctcatccacaacgggcatggtggtcgggattgtggctgccgctgccctatgtattctgattcttctgtacgccatgtataaatatcgaaacagagatgagggctcttaccatgtcgacgagagccgaaattacatatctaattctgctcagtctaatggggccgtcgtcaaggagaaacaaccaagctccgccaaatcaagtaataagaacaaaaagaacaaggacaaggagtactacgtgtag

SEQ ID NO: 149900 - DNA, 7505 bp, Artificial Sequence
  derived and/or modified sequence
ctctctctctctctctctctctctctttctttctttccgatggggaagagagggtggtgacaagttagaagcgcttgcggaaggtccccgcccccaggatcaggctccccctgcaaggggacgatgcaaaggtaaaagcacctcgctccgcagcatccagacctggaggggctgcgaccacgggccgagcccacccattccccagccaaaggacgggcccgccgctctccatggtactgcggagagctcagctccgcccttctctttcagaaggacagcacccggcgtcacgtaacccagccttctcaggctccaccaccgccttttccttcccagctctttccctctcctccccctcctcctccttctcctcctcctcctcctcctgctcccctccgttgcctgttctcccctcccgcactcctggagatagacgctcaagcctgacgcctctgaaaaggcagcagcagtcgccttatccatagacctcaggaaattcgctttgaccgatgcatgcttcaggctctggctcgagctgaggggaataaccgggcagatgtctgagtccttaaaaaagacaagataaaaccaaaatgcatcaccaacacacaaccaattgatgtgctggcatcttagcttggccctgcagaggcagagagaaaagaagaggagctgttgcgatttccacatctaacagcttctggctatttcgcaactgctgggtttgagtcctactgttgccgtggctgaaaagagaagtaaaatccaacttgtgagaccacgcacaaggaattaggctttggctgcagcggtgctgaagcccatgctatgacagaagaagcaggcctttgaagctatcctcgggttaagaaatggtgccctaaagaggcaagcatccctttctccgttctgctgtaagacaccacatctgaaggagacagacttgaggcattcacaagcatccaaggatactggctcactgctggcttcctgtactttcttgagaaaagtgttttctttttactgactctcactgcttccttttggcctggtaccactggtggaacctggcagataatgggatttgaggagttaagtatctgttgacactgcagatactcttaaattagttaatcagactcaaatgggtcagtgctttcccttgatcttttgttgaagccttttccagaacgttgtctccaaagtgcatcctccctttggtctggaagttctgtggctaccctgtaccactggggtcaacgttttccagttggaagaggactacagggagagagggcggggttattggaagaagaagaagaaaaaaagaactagataaaggagggcacatccctctcactcccgcctttccccttacctttctgtctctcgggacccttatttcttcgtcacggtgtccaggaccattttgaccctgtcggccccggcacccccccgccgcaccccagccccgagcatggggacggcgctgctccagcgcgggggctgttttcttctgtgcctctcgctgctgctcctgggctgctgggcggagctgggcagcgggctggagtttccgggcgccgagggccaatggacgcgcttccccaagtggaacgcctgctgcgagagcgagatgagcttccagctcaagactcgcagcgcccgcggcctcgtgctctacttcgacgacgagggcttctgcgacttcctggagctgattctgacgcgcggcggccgcctgcagctcagcttctccatcttctgcgctgagcctgcgacgctcctggccgacacgccggttaacgacggcgcctggcacagcgtgcgcatccgccgccagttccgcaacaccacgctcttcatcgaccaggtggaggccaagtgggtggaggtcaagtccaagcgcagggacatgacggtgttcagcggccttttcgtcggggggctgcccccggaactgcgcgccgcggcgctcaagctcaccctggcctcggtgagggagcgggagcccttcaaggggtggattcgtgacgtgagggtcaactcctcgcaggtcctgcccgtggacagcggcgaggtgaagctggacgatgagccgcccaacagcggcgggggaagcccgtgcgaggcgggcgaggagggcgagggcggggtgtgcctcaacggaggtgtgtgctccgtggtggacgaccaggccgtgtgcgactgctcgcgaaccggcttccgcggcaaggactgcagccaagaagacaacaatgtggaaggtctggcgcacctgatgatgggcgaccaaggtaaaagtaaaggaaaagaagaatatattgccacgttcaaaggatctgaatacttctgctacgacttgtctcaaaaccccattcaaagcagcagtgatgaaataactctgtcatttaaaacccttcagaggaatggactgatgcttcacactgggaaatcggctgattatgtcaatcttgccctgaaaaatggagctgtctctctggtcattaatttgggatcaggggcctttgaagcactagtggagcctgtgaatggaaagtttaatgataatgcctggcatgatgtgaaagtcaccaggaatctgcgtcagcactcaggcattggacacgctatggtgacaatatcagtggatgggattcttaccacaacgggctacacgcaagaagattataccatgctggggtctgatgactttttctatgttggaggcagtcccagcacagccgaccttccagggtcaccagtcagtaacaactttatgggctgtctcaaagaggttgtatataaaaataatgatgtgaggctggaattatctcgacttgccaagcaaggagatcctaagatgaagatccatggagtggtggcatttaaatgtgagaatgttgcaactttagacccaatcacctttgaaaccccagagtctttcatctctttgcctaaatggaatgcaaagaaaactggctccatatcatttgatttccgtacaacagagccaaatggcctcatcttatttagccatggcaagccaagacatcagaaagatgccaagcacccacagatgataaaggtggacttctttgctattgagatgctagatggccacctctacctcctcctggacatggggtcaggtactataaaaataaaagccctgttgaagaaagtgaatgatggagaatggtatcatgtggacttccagagagacggacggtcaggtaccatttctgtcaacacgttgcgtactccctacactgctcctggtgagagtgagattctggacctggatgatgagttgtacctgggggggctgccagaaaataaagctggccttgtcttccccaccgaggtgtggactgctctgctcaactatggctacgtgggctgcatcagggatttgttcatcgatggccaaagcaaagatatccggcaaatggctgaagttcaaagtactgctggagtgaagccttcctgctcaaaggaaacagcaaaaccgtgccttagcaacccttgcaaaaacaatggcatgtgcagggatgggtggaacagatatgtctgtgattgttccggaacaggctatcttggcaggtcctgtgagagagaggcaacggttttgagctatgatgggagcatgtttatgaaaattcagctccccgtagtcatgcatacggaggctgaggatgtttccttacggttccgatcccagcgtgcatatggcattctgatggcaaccacttctagagactctgctgacaccctccgcctggagctagacgcaggacgtgtgaaactgacggtcaatctagattgtatcaggattaactgtaattccagcaaaggtcccgagactctttttgctggctataacctcaatgataacgagtggcacacagtgcgtgtagttcggcgtggaaaaagtttaaagttaacagtggatgaccaacaggccatgacaggtcaaatggcaggtgatcatactaggctggagttccataacatagagactggcatcatcacagaacgacggtatctttcttctgtcccctccaacttcattggacacctgcagagcttgacatttaatggaatggcatacattgacctgtgtaaaaatggcgacatagattactgtgagcttaatgccagatttggcttcaggaacatcatagcagatcctgtcaccttcaagaccaaatcgagctatgttgccttagctaccttgcaagcctacacttctatgcatctttttttccagttcaagacaacatccctagatggattaattctatataacagtggggatggaaatgactttattgtggttgaattagttaaagggtacttacattacgtgtttgatttgggaaatggtgctaacctcatcaaaggaagctcaaataaacctctcaatgacaatcagtggcacaacgtgatgatatcaagggacaccagcaacctccacactgtaaagattgacacaaaaatcacaacgcaaatcaccgccggagccaggaacttagacctcaagagtgacttatatataggaggagtagctaaagaaacatacaaatccttaccaaaacttgtacatgccaaagaaggctttcaaggctgcctggcatcagttgatttaaatggacggcttccggacctcatctccgatgctcttttctgcaacggacagatcgagagaggatgtgaagggcccagcacaacctgccaagaggactcatgttccaatcaaggtgtgtgcttgcaacaatgggatggcttcagctgtgactgtagtatgacttccttcagtggaccactctgcaatgaccctgggacgacatatatctttagcaaaggtggtggacaaatcacgtataagtggcctcctaatgaccgacccagtacacgagcagacagactggccataggttttagcactgttcagaaagaagccgtattggtgcgagtggacagttcttcaggcttgggtgactacctagaactgcatatacaccagggaaaaattggagttaagtttaatgttgggacagatgacatcgccattgaagaatccaatgcaatcattaatgatgggaaataccatgtagttcgtttcacgaggagtggtggcaatgccacgttgcaggtggacagctggccagtgatcgagcgctaccctgcagggcgtcagctcacaatcttcaatagccaagcaaccataataattggcgggaaagagcagggccagcccttccagggccagctctctgggctgtactacaatggcttgaaagttctgaatatggcagccgaaaacgatgccaacatcgccatagtgggaaatgtgagactggttggtgaagtgccttcctctatgacaactgagtcaacagccactgccatgcaatcagagatgtccacatcaattatggagactaccacgaccctggctactagcacagccagaagaggaaagcccccgacaaaagaacccattagccagaccacagatgacatccttgtggcctcagcagagtgtcccagcgatgatgaggacattgacccctgtgagccgagctcaggtgggttagccaacccaacccgagcaggcggcagagagccgtatccaggctcagcagaagtgatccgggagtccagcagcaccacgggtatggtcgttgggatagtagccgctgccgccctgtgcatccttatcctcctctatgccatgtacaagtacagaaaccgggatgaaggctcataccatgtggacgagagtcgaaactacatcagtaactcagcacagtccaatggggctgttgtaaaggagaaacaacccagcagtgcgaaaagctccaacaaaaataagaaaaacaaggataaagagtattatgtctgatcccaagatcttaaatggacacttgtatagaaatagtcttcattttatctgagacataatataaacttatttactttcctttttatgaagcacatacaaaagaagacagggaatgcaatcaggaaggaaagactttttaaaaaataaaaacaagtatctcatgctcttgtttctcaaaaaagaaaaacaaaaaacaaaaaacaggggccaataaattccctaacatccacagtgttttcatttactctgcttgtctttatgttgctggaacatttctaaaagacagtgatgaccgcacgcattcataaagcaaaggagtactacagcatcaaggcacaacacaaaaaccaacacaaaacataacacaaaaaagaagctacctatgatcctggatttagccaaagtgctagcgctttcctgagaagtcagtccaattgccagagaagactgtccttttgagtgactcaacctgcaaacctttaagagtttgccgcctggtgcaactggagcagtggttggaacttgcatttgaaacaaagtgctggcttttttgaagacttgtgtaggaacacattcaaaaagcccctttctggttgtgagagaggaaaaaaaagtatggaggccttattttcaaaaatgtgaaatataaggcacgttttcacacaaaatttcaaaacaaaaacaagagggcatagatgcaatcattgggaaattttcatgcacgcttattatgttattacatatgtttatataaaatccatctctgtgtgctttctggactgtgataagtgacgttttatagcctgttgtatagaaaatgcaaaatatatctctgctcttcagccatttttggtaaattcaatgttataagtgttgctaagtatagggagttttatgacatcagagcaacaattatttcagttgggtttttctttttttttgccaccattataaattgccacaattacttttattttttaaagaaattacagtgtagtgtttattctaaggaagatatgtatgaatgtatatacaaagactcagctacttcttttcttatatgtacagccttcattctgttgcaattaagttttagtacttgtatgaaaggtgtgaattagaaagtcacatatatacatatgtatcttataatcttttctccctgaaatactcacattcccacatacattcactattttcacacacacacacacacacacacacacacacacacacacacacacacgaatccacagcaatccatcagatatgctggaagatccaaacgtgcatacagtagcaaatatttattgacaaattgaaaagcaggaaggaagagggttgtgccaaggtattgatgacaaatggggtgatttgcttcattgagatcttgctcccaggtaaccttaagaagattttagtccctaaagaaatgaacctttccttatcaaatagaatatcactgatatactgctgcatgaataagaaccattatgtgggcaggttatggaagcaaaattggttaatctacaccttaactctggctgctgcaattgaaaactttctttctaataaaataatatatatatctctg

SEQ ID NO: 149901 - DNA, 4434 bp, Artificial Sequence
  derived and/or modified sequence
atggggacggcgctgctccagcgcgggggctgttttcttctgtgcctctcgctgctgctcctgggctgctgggcggagctgggcagcgggctggagtttccgggcgccgagggccaatggacgcgcttccccaagtggaacgcctgctgcgagagcgagatgagcttccagctcaagactcgcagcgcccgcggcctcgtgctctacttcgacgacgagggcttctgcgacttcctggagctgattctgacgcgcggcggccgcctgcagctcagcttctccatcttctgcgctgagcctgcgacgctcctggccgacacgccggttaacgacggcgcctggcacagcgtgcgcatccgccgccagttccgcaacaccacgctcttcatcgaccaggtggaggccaagtgggtggaggtcaagtccaagcgcagggacatgacggtgttcagcggccttttcgtcggggggctgcccccggaactgcgcgccgcggcgctcaagctcaccctggcctcggtgagggagcgggagcccttcaaggggtggattcgtgacgtgagggtcaactcctcgcaggtcctgcccgtggacagcggcgaggtgaagctggacgatgagccgcccaacagcggcgggggaagcccgtgcgaggcgggcgaggagggcgagggcggggtgtgcctcaacggaggtgtgtgctccgtggtggacgaccaggccgtgtgcgactgctcgcgaaccggcttccgcggcaaggactgcagccaagctgatactaacttagagggtctggcgcacctgatgatgggcgaccaagcaaagtcaaaaagaaaagaagaatatattgccacgttcaaaggatctgaatacttctgctacgacttgtctcaaaaccccattcaaagcagcagtgatgaaataactctgtcatttaaaacccttcagaggaatggactgatgcttcacactgggaaatcggctgattatgtcaatcttgccctgaaaaatggagctgtctctctggtcattaatttgggatcaggggcctttgaagcactagtggagcctgtgaatggaaagtttaatgataatgcctggcatgatgtgaaagtcaccaggaatctgcgtcagcactcaggcattggacacgctatggtgacaatatcagtggatgggattcttaccacaacgggctacacgcaagaagattataccatgctggggtctgatgactttttctatgttggaggcagtcccagcacagccgaccttccagggtcaccagtcagtaacaactttatgggctgtctcaaagaggttgtatataaaaataatgatgtgaggctggaattatctcgacttgccaagcaaggagatcctaagatgaagatccatggagtggtggcatttaaatgtgagaatgttgcaactttagacccaatcacctttgaaaccccagagtctttcatctctttgcctaaatggaatgcaaagaaaactggctccatatcatttgatttccgtacaacagagccaaatggcctcatcttatttagccatggcaagccaagacatcagaaagatgccaagcacccacagatgataaaggtggacttctttgctattgagatgctagatggccacctctacctcctcctggacatggggtcaggtactataaaaataaaagccctgttgaagaaagtgaatgatggagaatggtatcatgtggacttccagagagacggacggtcaggtaccatttctgtcaacacgttgcgtactccctacactgctcctggtgagagtgagattctggacctggatgatgagttgtacctgggggggctgccagaaaataaagctggccttgtcttccccaccgaggtgtggactgctctgctcaactatggctacgtgggctgcatcagggatttgttcatcgatggccaaagcaaagatatccggcaaatggctgaagttcaaagtactgctggagtgaagccttcctgctcaaaggaaacagcaaaaccgtgccttagcaacccttgcaaaaacaatggcatgtgcagggatgggtggaacagatatgtctgtgattgttccggaacaggctatcttggcaggtcctgtgagagagaggcaacggttttgagctatgatgggagcatgtttatgaaaattcagctccccgtagtcatgcatacggaggctgaggatgtttccttacggttccgatcccagcgtgcatatggcattctgatggcaaccacttctagagactctgctgacaccctccgcctggagctagacgcaggacgtgtgaaactgacggtcaatctagattgtatcaggattaactgtaattccagcaaaggtcccgagactctttttgctggctataacctcaatgataacgagtggcacacagtgcgtgtagttcggcgtggaaaaagtttaaagttaacagtggatgaccaacaggccatgacaggtcaaatggcaggtgatcatactaggctggagttccataacatagagactggcatcatcacagaacgacggtatctttcttctgtcccctccaacttcattggacacctgcagagcttgacatttaatggaatggcatacattgacctgtgtaaaaatggcgacatagattactgtgagcttaatgccagatttggcttcaggaacatcatagcagatcctgtcaccttcaagaccaaatcgagctatgttgccttagctaccttgcaagcctacacttctatgcatctttttttccagttcaagacaacatccctagatggattaattctatataacagtggggatggaaatgactttattgtggttgaattagttaaagggtacttacattacgtgtttgatttgggaaatggtgctaacctcatcaaaggaagctcaaataaacctctcaatgacaatcagtggcacaacgtgatgatatcaagggacaccagcaacctccacactgtaaagattgacacaaaaatcacaacgcaaatcaccgccggagccaggaacttagacctcaagagtgacttatatataggaggagtagctaaagaaacatacaaatccttaccaaaacttgtacatgccaaagaaggctttcaaggctgcctggcatcagttgatttaaatggacggcttccggacctcatctccgatgctcttttctgcaacggacagatcgagagaggatgtgaagggcccagcacaacctgccaagaggactcatgttccaatcaaggtgtgtgcttgcaacaatgggatggcttcagctgtgactgtagtatgacttccttcagtggaccactctgcaatgaccctgggacgacatatatctttagcaaaggtggtggacaaatcacgtataagtggcctcctaatgaccgacccagtacacgagcagacagactggccataggttttagcactgttcagaaagaagccgtattggtgcgagtggacagttcttcaggcttgggtgactacctagaactgcatatacaccagggaaaaattggagttaagtttaatgttgggacagatgacatcgccattgaagaatccaatgcaatcattaatgatgggaaataccatgtagttcgtttcacgaggagtggtggcaatgccacgttgcaggtggacagctggccagtgatcgagcgctaccctgcagggcgtcagctcacaatcttcaatagccaagcaaccataataattggcgggaaagagcagggccagcccttccagggccagctctctgggctgtactacaatggcttgaaagttctgaatatggcagccgaaaacgatgccaacatcgccatagtgggaaatgtgagactggttggtgaagtgccttcctctatgacaactgagtcaacagccactgccatgcaatcagagatgtccacatcaattatggagactaccacgaccctggctactagcacagccagaagaggaaagcccccgacaaaagaacccattagccagaccacagatgacatccttgtggcctcagcagagtgtcccagcgatgatgaggacattgacccctgtgagccgagctcaggtgggttagccaacccaacccgagcaggcggcagagagccgtatccaggctcagcagaagtgatccgggagtccagcagcaccacgggtatggtcgttgggatagtagccgctgccgccctgtgcatccttatcctcctctatgccatgtacaagtacagaaaccgggatgaaggctcataccatgtggacgagagtcgaaactacatcagtaactcagcacagtccaatggggctgttgtaaaggagaaacaacccagcagtgcgaaaagctccaacaaaaataagaaaaacaaggataaagagtattatgtctga

SEQ ID NO: 149902 - DNA, 4434 bp, Artificial Sequence
  derived and/or modified sequence
atgggcactgcacttctgcagcgaggtggatgttttctcctgtgtctgtcactgcttctgctgggctgttgggccgagttgggatctgggttggagtttccaggggctgagggccagtggactcgctttcctaagtggaacgcatgttgtgaatcagaaatgagcttccagctgaagacgcggagtgctaggggactggtgctctacttcgacgatgagggtttctgcgattttctggaacttatcctaaccaggggaggtcgcctgcagctcagcttcagcattttctgtgcagaacccgcaaccttactggcagacacacccgttaacgacggcgcttggcactcagtgcggatcagaagacagttccgcaacacaaccttgttcatcgatcaggtagaggcaaaatgggtagaagtgaaatccaaaaggagagacatgactgtgttcagtggactatttgtcgggggtctccccccagagctgagagccgctgcactgaagttgacccttgcttctgttcgagagcgtgagcctttcaaaggctggatccgggatgtccgggtcaattctagccaagtgctcccagtagatagcggcgaagtgaagttggacgacgagcccccaaatagcggcggaggatcgccttgcgaggctggtgaggaaggagaagggggtgtgtgccttaatggtggcgtgtgctctgtggttgacgatcaggccgtgtgtgattgttctcggaccggatttcgcggaaaggactgttcacaagaggataacaatgtggagggactggcccacttgatgatgggggaccaaggcaagagcaagggaaaggaagagtacatagccactttcaaggggagtgaatatttctgttacgacctcagtcaaaaccctatccagtcgtcatcagacgagattactttatccttcaaaacacttcagcggaatggcctcatgctccacactgggaaaagcgccgactatgtgaacttggcactgaagaacggtgctgtctccctggtgatcaaccttggtagtggcgcattcgaagccctggtggaacccgtgaacggaaagttcaatgacaatgcctggcacgatgtcaaggtgaccagaaatttgcggcaacattccggcattggccacgctatggtcaccataagcgtcgacggcatcctgactacaacgggctacactcaggaggactacacaatgctgggatccgacgattttttctatgttgggggaagtccatcaacagcagatctgccaggctcccccgtttctaataactttatgggttgcctgaaggaggtcgtttataagaataatgacgtgcggcttgagctgagccgcttagccaagcaaggtgaccccaaaatgaaaatacacggtgtggtggccttcaaatgtgaaaacgtggcgacgttggatcccataaccttcgaaaccccagagtcttttattagtttacctaaatggaatgctaagaaaacgggtagcatctcctttgatttccgaacgactgagcccaatggcctgatcctattcagtcacgggaaacctcgacatcagaaggatgcgaagcacccacaaatgattaaagtggatttcttcgcgattgaaatgctagacggtcatctctacttgctgctagatatgggatcagggacaatcaagatcaaggcacttttgaagaaggtgaacgacggcgagtggtaccacgtggatttccagcgggatggacgaagtggtacgatcagtgtgaacacactgcgtacaccatacaccgctcctggagaatctgaaattttggatctggatgacgagctgtacctgggagggttaccggaaaacaaagcagggctcgtttttcccaccgaggtgtggacggcactgttaaattacggctatgtaggctgtattagagatctttttatagacggtcaatcgaaggacattcgtcagatggcagaggtgcaatccacggctggcgttaagccaagttgctctaaggaaaccgcaaaaccctgcctgtcgaacccgtgcaagaataacggcatgtgtagagacggctggaatcggtacgtatgcgactgcagtggcacaggatatctgggacgatcctgcgaacgcgaggccacagtcctctcttatgacggctccatgttcatgaaaatccagctgcctgtggtgatgcacacagaagcagaagatgtctccctaaggttcaggtcccagcgagcctatggaattttgatggcgaccacaagtcgggattccgcagacaccctgcgcctagagctcgacgccggacgcgtgaaactgactgtgaatctggactgcattcggattaactgcaactcaagcaaaggccctgaaacgctctttgccggttataacctcaatgataatgaatggcatactgtgcgcgtggtgcggcgtggcaagtccctcaaactcactgtggacgaccaacaggctatgacagggcaaatggcgggagaccacactcggctagaatttcacaatattgagacgggaattatcaccgagcgtcgttatctgagcagcgtgccgtctaatttcatcggccatctgcagagcctgaccttcaatgggatggcctacatcgatctctgtaaaaacggcgacatcgattactgcgaacttaacgccaggttcggctttcgaaacatcattgcagacccagtgactttcaagacaaagtcctcgtacgttgccctggctaccctgcaggcatatacctctatgcacctattcttccagtttaagacaactagtctggatggtctgattttgtataacagcggcgacggaaatgactttatcgtggtcgagctggtcaaaggttatctgcactatgtgttcgaccttggcaacggcgctaatctgataaagggaagcagcaacaagccgctgaatgacaaccagtggcacaatgttatgatatctagggacacatccaatctccataccgtcaaaatcgatacaaaaattaccactcaaatcaccgctggcgctaggaacctggatctcaaaagcgatctgtacatagggggagtcgcgaaggagacatacaaaagcttgcctaagttagtgcacgctaaggaggggttccaaggctgcctggcctctgttgacctgaacggacgcttgccagaccttatttcagacgctctgttctgcaatggccagattgaaagggggtgcgaagggccatcaacgacgtgtcaggaggacagctgttccaaccaaggcgtttgtctccagcagtgggatggattctcgtgtgactgtagcatgacttcattcagtggacccctctgtaacgatcccggtacaacgtatatctttagcaaaggcggtggccagattacctataagtggccgccaaatgaccgccctagcaccagggctgatagactggcaatcggcttcagtaccgtccaaaaagaggccgtcctggtccgtgtcgattcttctagtggacttggcgactatctggaacttcatatacaccagggaaaaattggcgttaagtttaacgtcgggacagatgatatagctattgaggaatcaaacgccataattaatgacgggaagtatcacgtggtgcggttcacccgcagcggagggaatgctacacttcaggttgattcttggcctgttatcgagcgataccccgctgggcgacagcttaccatcttcaactcccaggccacgattatcatcgggggaaaggagcaagggcagcccttccaggggcagttgtcaggcttatactacaacgggctgaaagtactgaatatggcagctgaaaacgatgcaaatatcgcaatcgtggggaacgtcagactagtcggggaggtgccctcaagtatgacaacggagagtaccgccaccgcgatgcagtccgaaatgtccacatccatcatggagactacgactaccctcgctacgtcaacagctcgcaggggcaagcctcccaccaaagaaccaatctcacagacaacagacgatatacttgttgcgtctgcagagtgcccatcagacgacgaggatatagacccctgtgagccctcaagtggagggctggccaacccgacaagagcgggaggcagggagccgtatcctggctccgcagaagtgatccgggagtccagcagtactacaggcatggttgttgggatagtggcagccgcagccctgtgtattctgatccttctgtacgctatgtacaaatatcgcaatagagacgaaggaagttatcatgtcgacgagtcaagaaattacatctcaaatagcgcccagtccaacggcgcagtggttaaggagaaacaacctagcagcgcgaagagctcgaataaaaataagaagaataaggataaagagtattatgtctag

SEQ ID NO: 149903 - DNA, 4434 bp, Artificial Sequence
  derived and/or modified sequence
atgggcactgccctgctgcagaggggcggttgtttcctcctgtgtctgagtttgctccttttaggttgctgggcagagctggggtccgggctcgagttcccaggggcagagggccagtggacccgttttccgaagtggaatgcatgttgtgaatctgaaatgagcttccagctgaaaacccgatctgcccgtgggctcgtcctgtacttcgacgacgaggggttttgtgatttcttggaactcatactcacaaggggagggagactgcagttatcgttttcaatattctgcgctgagccggctactctgttggccgacacgccagttaatgacggagcttggcactctgttcggattcgccgtcaattccgcaatacgaccctttttatagaccaggtcgaagcgaaatgggttgaagtgaaaagcaagagacgagatatgacagtcttttccggactgtttgtgggaggcctgcctcccgagcttcgtgccgctgcattgaagctgaccctagccagcgtgcgagaaagggaaccctttaaagggtggatccgcgacgtaagggtgaactcgtcccaggtccttcctgtggactcaggagaagtgaaacttgatgatgagccccctaactcagggggaggaagtccctgcgaagctggcgaggaaggcgaagggggtgtgtgcctgaacgggggagtatgtagcgtcgtcgacgaccaagccgtgtgcgactgctcccgcaccggattccggggtaaggattgtagtcaggcagatacgaatctcgaggggctggcacatctcatgatgggagaccaggccaaaagtaagagaaaagaagagtatatcgctacctttaaaggctcagagtatttctgctatgacctgagccagaatcctatacaatcttcttccgacgaaattacactgtccttcaagacactccaacggaacgggctgatgctacacacgggcaagagcgcagactatgttaacctggccctgaaaaacggcgctgtcagcctggtgatcaaccttggatccggcgctttcgaagcacttgtagagcctgtgaacgggaaattcaacgacaacgcctggcacgacgtaaaggttaccagaaacctaaggcaacattccggcatcggtcacgccatggttactatctcggttgatggcatcctgaccactacagggtacacgcaggaggactacacaatgcttggctctgacgactttttctatgttggcggtagccctagcactgcagacctgccagggagccccgtgtcaaataacttcatggggtgcctgaaagaagtggtttacaaaaataacgacgtgcgcctggaactgtcacggctggccaagcagggcgaccccaaaatgaagatacatggcgtcgtggctttcaagtgtgaaaatgtagccacacttgatcctattacattcgagacgccagaaagctttattagcctcccgaaatggaatgcaaagaagacgggctccatctccttcgacttcagaactacagagccaaatggcctgattcttttctcccacgggaaaccgaggcatcagaaggatgccaaacacccgcagatgatcaaggtcgactttttcgcgatagagatgcttgacggccacttgtatcttcttctggatatggggtctggaacaataaagattaaagccctgttgaagaaagtgaatgatggtgagtggtaccacgtggattttcagcgggatgggaggtccggaacgatcagtgtgaacaccctgcgaactccctacaccgcccctggcgagtctgaaattctggatctcgacgacgaactttaccttggcggactgcctgaaaataaggcgggactggtcttcccgacagaagtgtggacagcattattgaactacggctacgtcggatgcattcgtgatctgttcattgacggccagagtaaagatatcaggcagatggctgaggttcagagcaccgccggagttaagccttcatgttcgaaagaaaccgctaaaccctgcctgagtaatccgtgcaagaacaacggcatgtgtcgggacggatggaaccggtatgtgtgtgattgcagcgggaccggctaccttggcagatcttgcgagcgagaagcaactgttttgagctacgacggaagtatgtttatgaaaatccagctcccggttgtgatgcataccgaagcggaggacgtgagtctgcgtttcaggtcacagcgagcttatggcattctgatggctaccacgagtcgggacagcgctgatactttgagactagagctcgatgcaggtagggtgaagctcaccgtcaatctcgattgcatccgaatcaattgtaactccagtaaaggaccagagactctttttgccggatataacttgaacgacaatgagtggcatacggtgcgggtggtacgcagggggaagtctctgaaactaacagttgatgaccagcaggcaatgactggtcagatggccggagatcacactcgcctcgagttccacaatattgaaaccggcataatcacagagaggcgatatcttagtagcgtgccctcaaacttcattggtcacctgcaatccttgaccttcaacggtatggcttatatcgatctgtgcaaaaacggtgatatcgactactgcgagttgaatgctaggttcggcttcagaaacatcatcgcagaccccgttactttcaaaactaaatcctcatacgtggctctcgccactctgcaggcctacactagcatgcacctgtttttccaatttaagacgacatcactggacggcttaattctgtacaacagtggagacggcaacgattttatcgttgtcgagctcgtgaaaggatatttgcactatgtgttcgatctggggaacggagctaatctgattaagggaagttccaataaacctcttaacgataatcagtggcacaatgtaatgatctcccgtgacacaagcaatttacacacagtcaagattgatactaagattacaacacagatcaccgcaggcgcacggaacttggatcttaagagcgatttatatattggaggcgtggccaaggaaacctacaagagcctacccaagctggtgcacgctaaggaggggtttcagggttgccttgcttccgtggatctgaatggcaggttaccagatctgatttccgacgccctcttctgtaacggccagatcgagcggggttgtgagggtccttcaacaacctgtcaggaggattcctgctccaaccagggggtgtgccttcagcagtgggacggtttctcgtgtgactgctcaatgaccagtttctcgggcccactgtgcaacgacccaggtacaacatacatattctccaagggtgggggacagattacttataaatggcccccaaacgaccgacctagtactcgggcagatcggctagccatcgggttttcaacagtacaaaaggaggctgttctcgtgcgtgttgacagttcatcaggcctcggcgactacctcgaactgcacattcatcagggaaaaataggagtgaaattcaacgtcgggactgacgacatcgctatcgaggagagtaatgcgataatcaacgatggcaaataccatgtggtccggttcactcggtccggcggtaacgcaacgctccaggtggactcttggccagtaatcgaacgctatcccgcagggagacaactgactatcttcaattctcaggcaaccattatcattggcggaaaggagcaagggcagccgttccaagggcagctcagtggtctttactacaatggcctgaaagtcctgaatatggccgctgaaaatgacgcaaacatcgcaatagtcggaaatgtgagactggtgggggaggtaccttcttccatgaccaccgagtcaactgcaaccgcaatgcaaagcgagatgtccacgtcaattatggaaaccacgacaacactggcgactagcaccgccagaagaggcaaacccccaactaaggagcccatttctcagacgaccgacgatatcctggtcgcctccgctgagtgcccatctgacgatgaggacatcgatccatgtgaacctagctcaggaggtcttgcaaatccaaccagggccggtggcagagagccatacccgggaagcgccgaagtcattcgggagagtagctccactaccggcatggtagtgggaatagttgctgctgccgctctgtgtattctcatccttctctatgctatgtataaatatagaaatagagacgagggctcctaccacgtggatgaatctcgaaactatatttcaaattccgctcagagcaacggggctgtggttaaagaaaagcaaccctcctccgctaagtcctccaacaaaaacaagaagaacaaagacaaagagtattatgtctag

SEQ ID NO: 149904 - DNA, 4434 bp, Artificial Sequence
  derived and/or modified sequence
atgggcaccgccctgctgcagagaggcggctgcttcctgctgtgcctgagcctgctgctgctgggctgctgggccgagctgggcagcggcctggagttccccggcgccgagggccagtggaccagattccccaagtggaacgcctgctgcgagagcgagatgagcttccagctgaagaccagaagcgccagaggcctggtgctgtacttcgacgacgagggcttctgcgacttcctggagctgatcctgaccagaggcggcagactgcagctgagcttcagcatcttctgcgccgagcccgccaccctgctggccgacacccccgtgaacgacggcgcctggcacagcgtgagaatcagaagacagttcagaaacaccaccctgttcatcgaccaggtggaggccaagtgggtggaggtgaagagcaagagaagagacatgaccgtgttcagcggcctgttcgtgggcggcctgccccccgagctgagagccgccgccctgaagctgaccctggccagcgtgagagagagagagcccttcaagggctggatcagagacgtgagagtgaacagcagccaggtgctgcccgtggacagcggcgaggtgaagctggacgacgagccccccaacagcggcggcggcagcccctgcgaggccggcgaggagggcgagggcggcgtgtgcctgaacggcggcgtgtgcagcgtggtggacgaccaggccgtgtgcgactgcagcagaaccggcttcagaggcaaggactgcagccaggaggacaacaacgtggagggcctggcccacctgatgatgggcgaccagggcaagagcaagggcaaggaggagtacatcgccaccttcaagggcagcgagtacttctgctacgacctgagccagaaccccatccagagcagcagcgacgagatcaccctgagcttcaagaccctgcagagaaacggcctgatgctgcacaccggcaagagcgccgactacgtgaacctggccctgaagaacggcgccgtgagcctggtgatcaacctgggcagcggcgccttcgaggccctggtggagcccgtgaacggcaagttcaacgacaacgcctggcacgacgtgaaggtgaccagaaacctgagacagcacagcggcatcggccacgccatggtgaccatcagcgtggacggcatcctgaccaccaccggctacacccaggaggactacaccatgctgggcagcgacgacttcttctacgtgggcggcagccccagcaccgccgacctgcccggcagccccgtgagcaacaacttcatgggctgcctgaaggaggtggtgtacaagaacaacgacgtgagactggagctgagcagactggccaagcagggcgaccccaagatgaagatccacggcgtggtggccttcaagtgcgagaacgtggccaccctggaccccatcaccttcgagacccccgagagcttcatcagcctgcccaagtggaacgccaagaagaccggcagcatcagcttcgacttcagaaccaccgagcccaacggcctgatcctgttcagccacggcaagcccagacaccagaaggacgccaagcacccccagatgatcaaggtggacttcttcgccatcgagatgctggacggccacctgtacctgctgctggacatgggcagcggcaccatcaagatcaaggccctgctgaagaaggtgaacgacggcgagtggtaccacgtggacttccagagagacggcagaagcggcaccatcagcgtgaacaccctgagaaccccctacaccgcccccggcgagagcgagatcctggacctggacgacgagctgtacctgggcggcctgcccgagaacaaggccggcctggtgttccccaccgaggtgtggaccgccctgctgaactacggctacgtgggctgcatcagagacctgttcatcgacggccagagcaaggacatcagacagatggccgaggtgcagagcaccgccggcgtgaagcccagctgcagcaaggagaccgccaagccctgcctgagcaacccctgcaagaacaacggcatgtgcagagacggctggaacagatacgtgtgcgactgcagcggcaccggctacctgggcagaagctgcgagagagaggccaccgtgctgagctacgacggcagcatgttcatgaagatccagctgcccgtggtgatgcacaccgaggccgaggacgtgagcctgagattcagaagccagagagcctacggcatcctgatggccaccaccagcagagacagcgccgacaccctgagactggagctggacgccggcagagtgaagctgaccgtgaacctggactgcatcagaatcaactgcaacagcagcaagggccccgagaccctgttcgccggctacaacctgaacgacaacgagtggcacaccgtgagagtggtgagaagaggcaagagcctgaagctgaccgtggacgaccagcaggccatgaccggccagatggccggcgaccacaccagactggagttccacaacatcgagaccggcatcatcaccgagagaagatacctgagcagcgtgcccagcaacttcatcggccacctgcagagcctgaccttcaacggcatggcctacatcgacctgtgcaagaacggcgacatcgactactgcgagctgaacgccagattcggcttcagaaacatcatcgccgaccccgtgaccttcaagaccaagagcagctacgtggccctggccaccctgcaggcctacaccagcatgcacctgttcttccagttcaagaccaccagcctggacggcctgatcctgtacaacagcggcgacggcaacgacttcatcgtggtggagctggtgaagggctacctgcactacgtgttcgacctgggcaacggcgccaacctgatcaagggcagcagcaacaagcccctgaacgacaaccagtggcacaacgtgatgatcagcagagacaccagcaacctgcacaccgtgaagatcgacaccaagatcaccacccagatcaccgccggcgccagaaacctggacctgaagagcgacctgtacatcggcggcgtggccaaggagacctacaagagcctgcccaagctggtgcacgccaaggagggcttccagggctgcctggccagcgtggacctgaacggcagactgcccgacctgatcagcgacgccctgttctgcaacggccagatcgagagaggctgcgagggccccagcaccacctgccaggaggacagctgcagcaaccagggcgtgtgcctgcagcagtgggacggcttcagctgcgactgcagcatgaccagcttcagcggccccctgtgcaacgaccccggcaccacctacatcttcagcaagggcggcggccagatcacctacaagtggccccccaacgacagacccagcaccagagccgacagactggccatcggcttcagcaccgtgcagaaggaggccgtgctggtgagagtggacagcagcagcggcctgggcgactacctggagctgcacatccaccagggcaagatcggcgtgaagttcaacgtgggcaccgacgacatcgccatcgaggagagcaacgccatcatcaacgacggcaagtaccacgtggtgagattcaccagaagcggcggcaacgccaccctgcaggtggacagctggcccgtgatcgagagataccccgccggcagacagctgaccatcttcaacagccaggccaccatcatcatcggcggcaaggagcagggccagcccttccagggccagctgagcggcctgtactacaacggcctgaaggtgctgaacatggccgccgagaacgacgccaacatcgccatcgtgggcaacgtgagactggtgggcgaggtgcccagcagcatgaccaccgagagcaccgccaccgccatgcagagcgagatgagcaccagcatcatggagaccaccaccaccctggccaccagcaccgccagaagaggcaagccccccaccaaggagcccatcagccagaccaccgacgacatcctggtggccagcgccgagtgccccagcgacgacgaggacatcgacccctgcgagcccagcagcggcggcctggccaaccccaccagagccggcggcagagagccctaccccggcagcgccgaggtgatcagagagagcagcagcaccaccggcatggtggtgggcatcgtggccgccgccgccctgtgcatcctgatcctgctgtacgccatgtacaagtacagaaacagagacgagggcagctaccacgtggacgagagcagaaactacatcagcaacagcgcccagagcaacggcgccgtggtgaaggagaagcagcccagcagcgccaagagcagcaacaagaacaagaagaacaaggacaaggagtactacgtgtag

SEQ ID NO: 149905 - DNA, 4434 bp, Artificial Sequence
  derived and/or modified sequence
atgggcaccgccctgctgcagagaggcggctgcttcctgctgtgcctgagcctgctgctgctgggctgctgggccgagctgggcagcggcctggagttccccggcgccgagggccagtggaccagattccccaagtggaacgcctgctgcgagagcgagatgagcttccagctgaagaccagaagcgccagaggcctggtgctgtacttcgacgacgagggcttctgcgacttcctggagctgatcctgaccagaggcggcagactgcagctgagcttcagcatcttctgcgccgagcccgccaccctgctggccgacacccccgtgaacgacggcgcctggcacagcgtgagaatcagaagacagttcagaaacaccaccctgttcatcgaccaggtggaggccaagtgggtggaggtgaagagcaagagaagagacatgaccgtgttcagcggcctgttcgtgggcggcctgccccccgagctgagagccgccgccctgaagctgaccctggccagcgtgagagagagagagcccttcaagggctggatcagagacgtgagagtgaacagcagccaggtgctgcccgtggacagcggcgaggtgaagctggacgacgagccccccaacagcggcggcggcagcccctgcgaggccggcgaggagggcgagggcggcgtgtgcctgaacggcggcgtgtgcagcgtggtggacgaccaggccgtgtgcgactgcagcagaaccggcttcagaggcaaggactgcagccaggccgacaccaacctggagggcctggcccacctgatgatgggcgaccaggccaagagcaagagaaaggaggagtacatcgccaccttcaagggcagcgagtacttctgctacgacctgagccagaaccccatccagagcagcagcgacgagatcaccctgagcttcaagaccctgcagagaaacggcctgatgctgcacaccggcaagagcgccgactacgtgaacctggccctgaagaacggcgccgtgagcctggtgatcaacctgggcagcggcgccttcgaggccctggtggagcccgtgaacggcaagttcaacgacaacgcctggcacgacgtgaaggtgaccagaaacctgagacagcacagcggcatcggccacgccatggtgaccatcagcgtggacggcatcctgaccaccaccggctacacccaggaggactacaccatgctgggcagcgacgacttcttctacgtgggcggcagccccagcaccgccgacctgcccggcagccccgtgagcaacaacttcatgggctgcctgaaggaggtggtgtacaagaacaacgacgtgagactggagctgagcagactggccaagcagggcgaccccaagatgaagatccacggcgtggtggccttcaagtgcgagaacgtggccaccctggaccccatcaccttcgagacccccgagagcttcatcagcctgcccaagtggaacgccaagaagaccggcagcatcagcttcgacttcagaaccaccgagcccaacggcctgatcctgttcagccacggcaagcccagacaccagaaggacgccaagcacccccagatgatcaaggtggacttcttcgccatcgagatgctggacggccacctgtacctgctgctggacatgggcagcggcaccatcaagatcaaggccctgctgaagaaggtgaacgacggcgagtggtaccacgtggacttccagagagacggcagaagcggcaccatcagcgtgaacaccctgagaaccccctacaccgcccccggcgagagcgagatcctggacctggacgacgagctgtacctgggcggcctgcccgagaacaaggccggcctggtgttccccaccgaggtgtggaccgccctgctgaactacggctacgtgggctgcatcagagacctgttcatcgacggccagagcaaggacatcagacagatggccgaggtgcagagcaccgccggcgtgaagcccagctgcagcaaggagaccgccaagccctgcctgagcaacccctgcaagaacaacggcatgtgcagagacggctggaacagatacgtgtgcgactgcagcggcaccggctacctgggcagaagctgcgagagagaggccaccgtgctgagctacgacggcagcatgttcatgaagatccagctgcccgtggtgatgcacaccgaggccgaggacgtgagcctgagattcagaagccagagagcctacggcatcctgatggccaccaccagcagagacagcgccgacaccctgagactggagctggacgccggcagagtgaagctgaccgtgaacctggactgcatcagaatcaactgcaacagcagcaagggccccgagaccctgttcgccggctacaacctgaacgacaacgagtggcacaccgtgagagtggtgagaagaggcaagagcctgaagctgaccgtggacgaccagcaggccatgaccggccagatggccggcgaccacaccagactggagttccacaacatcgagaccggcatcatcaccgagagaagatacctgagcagcgtgcccagcaacttcatcggccacctgcagagcctgaccttcaacggcatggcctacatcgacctgtgcaagaacggcgacatcgactactgcgagctgaacgccagattcggcttcagaaacatcatcgccgaccccgtgaccttcaagaccaagagcagctacgtggccctggccaccctgcaggcctacaccagcatgcacctgttcttccagttcaagaccaccagcctggacggcctgatcctgtacaacagcggcgacggcaacgacttcatcgtggtggagctggtgaagggctacctgcactacgtgttcgacctgggcaacggcgccaacctgatcaagggcagcagcaacaagcccctgaacgacaaccagtggcacaacgtgatgatcagcagagacaccagcaacctgcacaccgtgaagatcgacaccaagatcaccacccagatcaccgccggcgccagaaacctggacctgaagagcgacctgtacatcggcggcgtggccaaggagacctacaagagcctgcccaagctggtgcacgccaaggagggcttccagggctgcctggccagcgtggacctgaacggcagactgcccgacctgatcagcgacgccctgttctgcaacggccagatcgagagaggctgcgagggccccagcaccacctgccaggaggacagctgcagcaaccagggcgtgtgcctgcagcagtgggacggcttcagctgcgactgcagcatgaccagcttcagcggccccctgtgcaacgaccccggcaccacctacatcttcagcaagggcggcggccagatcacctacaagtggccccccaacgacagacccagcaccagagccgacagactggccatcggcttcagcaccgtgcagaaggaggccgtgctggtgagagtggacagcagcagcggcctgggcgactacctggagctgcacatccaccagggcaagatcggcgtgaagttcaacgtgggcaccgacgacatcgccatcgaggagagcaacgccatcatcaacgacggcaagtaccacgtggtgagattcaccagaagcggcggcaacgccaccctgcaggtggacagctggcccgtgatcgagagataccccgccggcagacagctgaccatcttcaacagccaggccaccatcatcatcggcggcaaggagcagggccagcccttccagggccagctgagcggcctgtactacaacggcctgaaggtgctgaacatggccgccgagaacgacgccaacatcgccatcgtgggcaacgtgagactggtgggcgaggtgcccagcagcatgaccaccgagagcaccgccaccgccatgcagagcgagatgagcaccagcatcatggagaccaccaccaccctggccaccagcaccgccagaagaggcaagccccccaccaaggagcccatcagccagaccaccgacgacatcctggtggccagcgccgagtgccccagcgacgacgaggacatcgacccctgcgagcccagcagcggcggcctggccaaccccaccagagccggcggcagagagccctaccccggcagcgccgaggtgatcagagagagcagcagcaccaccggcatggtggtgggcatcgtggccgccgccgccctgtgcatcctgatcctgctgtacgccatgtacaagtacagaaacagagacgagggcagctaccacgtggacgagagcagaaactacatcagcaacagcgcccagagcaacggcgccgtggtgaaggagaagcagcccagcagcgccaagagcagcaacaagaacaagaagaacaaggacaaggagtactacgtgtag

SEQ ID NO: 149906 - protein, 1230 aa, Artificial Sequence
  derived and/or modified sequence
MIKTEKSYPERRLRGVLEELSCGCCRFLSLADKDQGHSSRTRLDRERLKSCMRELENMGQQARMLRAQVKRHTVRDKLRLCQNFLQKLRFLADEPQHSIPDIFIWMMSNNKRVAYARVPSKDLLFSIVEEETGKDCAKVKTLFLKLPGKRGFGSAGWTVQAKVELYLWLGLSKQRKEFLCGLPCGFQEVKAAQGLGLHAFPPVSLVYTKKQAFQLRAHMYQARSLFAADSSGLSDPFARVFFINQSQCTEVLNETLCPTWDQMLVFDNLELYGEAHELRDDPPIIVIEIYDQDSMGKADFMGRTFAKPLVKMADEAYCPPRFPPQLEYYQIYRGNATAGDLLAAFELLQIGPAGKADLPPINGPVDVDRGPIMPVPMGIRPVLSKYRVEVLFWGLRDLKRVNLAQVDRPRVDIECAGKGVQSSLIHNYKKNPNFNTLVKWFEVDLPENELLHPPLNIRVVDCRAFGRYTLVGSHAVSSLRRFIYRPPDRSAPSWNTTGEVVVTMEPEVPIKKLETMVKLDATSEAVVKVDVAEEEKEKKKKKKGTAEEPEEEEPDESMLDWWSKYFASIDTMKEQLRQQEPSGIDLEEKEEVDNTEGLKGSMKGKEKARAAKEEKKKKTQSSGSGQGSEAPEKKKPKIDELKVYPKELESEFDNFEDWLHTFNLLRGKTGDDEDGSTEEERIVGRFKGSLCVYKVPLPEDVSREAGYDSTYGMFQGIPSNDPINVLVRVYVVRATDLHPADINGKADPYIAIRLGKTDIRDKENYISKQLNPVFGKSFDIEASFPMESMLTVAVYDWDLVGTDDLIGETKIDLENRFYSKHRATCGIAQTYSTHGYNIWRDPMKPSQILTRLCKDGKVDGPHFGPPGRVKVANRVFTGPSEIEDENGQRKPTDEHVALLALRHWEDIPRAGCRLVPEHVETRPLLNPDKPGIEQGRLELWVDMFPMDMPAPGTPLDISPRKPKKYELRVIIWNTDEVVLEDDDFFTGEKSSDIFVRGWLKGQQEDKQDTDVHYHSLTGEGNFNWRYLFPFDYLAAEEKIVISKKESMFSWDETEYKIPARLTLQIWDADHFSADDFLGAIELDLNRFPRGAKTAKQCTMEMATGEVDVPLVSIFKQKRVKGWWPLLARNENDEFELTGKVEAELHLLTAEEAEKNPVGLARNEPDPLEKPNRPDTSFIWFLNPLKSARYFLWHTYRWLLLKLLLLLLLLLLLALFLYSVPGYLVKKILGA

SEQ ID NO: 149907 - DNA, 3693 bp, Artificial Sequence
  derived and/or modified sequence
atgatcaaaaccgagaagtcctatcccgaaagacgactgcgtggcgtcctcgaagaactatcttgcggctgctgcaggtttctaagtctggccgataaagaccaaggacacagcagtcgcactcggctggacagagaaagacttaaaagctgtatgcgcgagctggaaaatatggggcagcaggcccggatgctgagggcccaggtgaaaagacacaccgtcagggacaagctgcggctgtgtcagaacttcctgcagaagctgagatttcttgctgatgagccacaacattcaatcccggacatcttcatctggatgatgagcaacaataaacgagtggcatatgctagggtgccatcgaaagacctgttattttcgatcgtggaggaagagacggggaaggactgtgccaaggtgaaaactctgttcctcaagctgccagggaaacgtggattcggcagcgctggttggacagtccaggcaaaggtggaactgtatctctggctcggactgtccaagcagcggaaggaatttctgtgcggactcccgtgtggatttcaggaggtcaaggctgcgcaggggctaggccttcacgcttttcctccagtcagcctggtgtacacaaagaagcaggcgtttcagctgagagcccatatgtaccaggcaaggagccttttcgcggcggactcatctggcctgtctgaccccttcgctcgagtgttctttattaatcagagtcagtgtaccgaagtattgaacgagactctctgtcccacttgggatcagatgttggtgttcgataatttggaactatatggggaggcccacgaattgcgcgatgacccgcctattatagtgatcgaaatttatgatcaagatagcatgggaaaagctgatttcatgggccgaacctttgctaagcctcttgttaaaatggcggacgaagcttattgcccgcccagatttccaccccagctagagtactaccagatctataggggaaatgcaacagcgggagaccttctcgctgctttcgaattgctgcagatagggcccgccggcaaggctgatctgccaccaattaatgggccagtggacgtggaccggggccctataatgcctgtaccgatgggaatcagaccggttctgtcaaagtatcgggtggaagtgttgttctggggacttcgggacctcaaacgagttaatttggctcaagttgatcggccccgggttgatattgagtgcgcagggaagggagttcagagctcattaatacataattataagaaaaaccccaacttcaacacccttgtgaaatggttcgaggtagacctacctgaaaatgagctgttacatcctccccttaatataagagtggtggattgccgggcttttggccgctatacacttgtggggagtcatgcagtctccagcctcagaaggttcatttacaggcccccagacaggtctgcccccagttggaatacaactggtgaagtggtggttacaatggagcctgaagtgccgatcaagaaactcgaaacaatggtcaagctggacgccacctcagaggccgtcgtcaaggttgatgtggccgaggaggagaaagagaagaagaagaagaaaaaaggcacggcagaagagcctgaagaggaagaaccagacgaaagtatgctcgattggtggtccaaatatttcgcaagtattgacactatgaaggagcagctgaggcagcaggagccaagcggtattgatctggaagagaaggaagaagtcgacaataccgagggtctcaaaggatctatgaagggcaaagaaaaagctagggcagctaaggaggaaaaaaaaaagaaaacccagtcatcgggcagcgggcagggatctgaggcccctgagaagaaaaaacctaagatagacgagctgaaggtatatcctaaagagctagaatctgagttcgacaacttcgaggattggctgcatactttcaatttactgcggggcaagacaggtgatgatgaagatggtagcacagaagaggaaaggatcgtgggaagatttaagggctcactgtgcgtttataaggtccccttacccgaggatgtctctagagaggctggttatgacagcacttacgggatgttccagggcatccccagcaacgatccgatcaatgtgctggtgcgtgtttacgtggtgagagccaccgacttgcaccctgccgacatcaatggaaaagccgatccttacatcgccatcagattggggaagaccgacataagagataaggaaaactacatttcaaaacagctgaatcctgtgttcggtaagagcttcgacattgaggcatccttcccgatggagagtatgctgacagtcgcggtttacgattgggacttggtggggacagacgaccttatcggcgagacgaaaattgacctggaaaacaggttctattccaaacaccgggccacctgtggaattgcccaaacctattccacacatggatacaacatttggagggacccaatgaagccatcccagatcctgacacgtttgtgcaaggacgggaaagtcgatgggccccactttgggccccccggccgggttaaagtggcaaacagggtttttactggccctagcgaaatcgaagacgaaaacggccaacggaagccaactgatgaacacgtggcactcctagccttaaggcactgggaggacatccctagagcgggatgccgtctcgtacctgaacacgtggaaacaagaccgctcctgaaccctgacaagcccggtattgagcagggccggttggaactgtgggttgatatgtttcctatggatatgccggcccccggaacacctctcgatattagtcccaggaaaccaaagaagtatgagctgagggtcataatttggaacaccgatgaagttgtcttagaagatgatgacttctttactggtgagaagtctagtgacatctttgttagaggttggctgaaaggccagcaggaggacaagcaggacacggatgtgcattatcatagtctgacaggggaaggtaactttaattggcggtatctgttcccgtttgattacctggccgcggaggagaagatagttatctccaagaaagaaagtatgttttcatgggacgaaaccgaatacaagatccccgcaaggctgacactgcaaatctgggacgctgaccatttcagcgccgacgacttcctgggggccatcgagctagatctaaatagatttcctagaggtgctaaaacagccaaacagtgtacaatggagatggctaccggagaggtcgatgtgccgctggtgtcgatctttaagcagaagagagtgaagggctggtggccattacttgcgcgaaatgagaatgacgaattcgaactgacaggcaaagtagaagccgaactgcatctgttgaccgccgaagaagcagagaagaaccccgtaggcttggcacgaaatgaacctgacccactggagaagcccaatcgacccgatacaagctttatttggtttctcaaccctctaaagagcgccaggtatttcctttggcatacctaccggtggttgctcctgaagctgctcctacttctgttgctgctgctgttgctggcactatttctctacagcgtacctgggtatctggtgaaaaagatactgggagcctag

SEQ ID NO: 149908 - DNA, 3693 bp, Artificial Sequence
  derived and/or modified sequence
atgatcaagacagagaagagctacccagagcggcggctgcggggcgtgctggaggagctgagctgtggctgctgccgcttcctgagcctggccgacaaggaccagggccacagcagcaggacccggctggaccgggagcggctgaagagctgcatgagggagctggagaacatgggccagcaggccaggatgctgcgggcccaggtgaagaggcacacagtgcgggacaagctgcggctgtgccagaacttcctgcagaagctgcgcttcctggctgatgagccccagcacagcatcccagacatcttcatctggatgatgagcaacaacaagagggtggcctatgcccgggtgcccagcaaggacctgctcttcagcatcgtggaggaggagaccgggaaggactgtgccaaggtgaagaccctcttcctgaagctgcccgggaagaggggcttcggcagcgctggctggacagtgcaggccaaggtggagctgtacctgtggctgggcctgagcaagcagaggaaggagttcctgtgtggcctgccctgtggcttccaggaggtgaaggccgcccagggcctgggcctgcacgccttcccccctgtgtccctggtgtacaccaagaagcaggccttccagctgcgggcccacatgtaccaggcccggagcctgtttgctgctgacagcagcggcctgagtgacccctttgcccgggtcttcttcatcaaccagagccagtgcacagaggtgctgaatgagaccctgtgccccacctgggaccagatgctggtgtttgacaacctggagctgtatggagaggcccacgagctgagagatgacccccccatcatcgtgattgagatctatgaccaggacagcatgggcaaggctgacttcatgggccgcacctttgccaagcccctggtgaagatggctgatgaggcctactgccccccacgcttccccccccagctggagtactaccagatctacagaggaaatgccacagctggggacctgctggccgcctttgagctgctgcagatcggccctgctgggaaggctgacctgccccccatcaatggacctgtggatgtggaccggggccccatcatgcctgtgcccatgggcatccggcctgtgctgagcaagtacagagtggaggtgctcttctggggcctgcgggacctgaagagggtgaacctggcccaggtggaccggccccgggtggacattgaatgtgccggcaagggcgtgcagagcagcctcatccacaactacaagaagaaccccaacttcaacaccctggtgaagtggtttgaggtggacctgcctgaaaatgagctgctgcacccccccctgaacatccgggtggtggactgccgggccttcggccgctacaccctggtgggcagccatgctgtgagcagcctgcggcgcttcatctaccggcccccagacagaagtgcccccagctggaacaccactggagaggtggtggtgaccatggagcctgaggtgcccatcaagaagctggagaccatggtgaagctggatgccaccagcgaggccgtggtgaaggtggatgtggccgaggaggagaaggagaagaagaagaagaagaagggcacagctgaggagcctgaggaggaggagccagatgagagcatgctggactggtggagcaagtactttgccagcattgacaccatgaaggagcagctgcggcagcaggagcccagcggcatcgacctggaggagaaggaggaggtggacaacacagagggcctgaagggctccatgaagggcaaggagaaggcccgggccgccaaggaggagaagaagaagaagacccagagcagcggcagcggccagggcagcgaggcccctgagaagaagaagcccaagattgatgagctgaaggtgtaccccaaggagctggagagcgagtttgacaactttgaggactggctgcacaccttcaacctgctgcggggcaagacaggagatgatgaagatggcagcacagaggaggagcgcatcgtgggccgcttcaagggcagcctgtgtgtgtacaaggtgcccctgcctgaagatgtgtcccgggaggccggctatgacagcacctacggcatgttccagggcatccccagcaatgaccccatcaacgtgctggtgcgggtgtatgtggtgcgggccacagacctgcaccctgctgacatcaatggcaaggctgacccctacatcgccatccggctgggcaagacagacatccgggacaaggagaactacatcagcaagcagctgaaccctgtgtttgggaagagctttgacatcgaggccagcttccccatggagagcatgctgactgtggccgtgtatgactgggacctggtgggcacagatgacctgattggagagaccaagattgacctggagaaccgcttctacagcaagcaccgggccacctgtggcatcgcccagacctacagcacccacggctacaacatctggagggaccccatgaagcccagccagatcctgacccggctgtgcaaggatggcaaggtggatggcccccactttggacctcctggccgggtgaaggtggccaacagagtcttcaccggccccagcgagattgaagatgaaaatggccagaggaagcccacagatgaacatgtggccctgctggccctgcggcactgggaggacatcccccgggccggctgccgcctggtgcctgagcacgtggagacccggcccctgctgaacccagacaagccaggcatcgagcagggccgcctggagctgtgggtggacatgttccccatggacatgcctgcccctggcacccccctggacatcagccccaggaagcccaagaagtatgagctgcgggtcatcatctggaacacagatgaggtggtgctggaggatgatgacttcttcaccggggagaagagcagtgacatctttgtgcggggctggctgaagggccagcaggaggacaagcaggacacagatgtgcactaccacagcctgactggagagggcaacttcaactggagatacctgttcccctttgactacctggccgctgaggagaagatcgtcatcagcaagaaggagagcatgttctcctgggatgaaacagagtacaagatcccagcccggctgaccctgcagatctgggatgctgaccacttcagcgcagatgacttcctgggcgccatcgagctggacctgaaccgcttccccaggggggccaagacagccaagcagtgcaccatggagatggccactggagaggtggatgtgcccctggtgtccatcttcaagcagaagagggtgaagggctggtggcccctgctggccagaaatgaaaatgatgaatttgagctgaccgggaaggtggaggccgagctgcacctgctgacagctgaggaggccgagaagaaccctgtgggcctggccagaaatgaaccagaccccctggagaagcccaacagaccagacaccagcttcatctggttcctgaaccccctgaagagcgcccgctacttcctgtggcacacctaccgctggctgctgctgaagctgctgctgctgctgctgctgctgctgctgctggccctcttcctgtacagcgtgcccggctacctggtgaagaagatcctgggcgcctag

SEQ ID NO: 149909 - DNA, 3693 bp, Artificial Sequence
  derived and/or modified sequence
atgatcaagaccgagaagagctaccccgagcggcggctgcggggcgtgctcgaggaattaagttgtgggtgctgccgtttcctgagcctggccgacaaagaccaggggcactcttcaaggacgcgtctggatcgtgaacggctgaaaagttgtatgcgcgagctagagaatatgggccaacaggctcggatgctgagggcacaagtcaagcgccatactgtgcgagacaagctgcgactctgccagaacttcttacagaagctgcggttccttgctgacgaaccacagcattcaatacctgacatatttatctggatgatgagcaacaataagcgcgtggcatatgcaagggtcccaagcaaagatctgctattcagtatcgtcgaggaggaaaccggtaaagactgtgccaaggtcaagacgttatttttgaagttgcccgggaagcgaggcttcgggtcggctggctggaccgtgcaggctaaagtggagctctatttatggcttggactgagtaagcagagaaaagaatttctttgcggccttccttgcggattccaagaagttaaggctgcccagggcctgggcttacacgcgttcccgcccgtctccttggtgtacacaaagaagcaggctttccagttaagggcccacatgtatcaagcccggagtctgtttgcggccgattcatccggactgagtgacccctttgctagagtcttcttcattaatcagtcacagtgcacggaggttctgaacgagaccctgtgcccaacctgggatcagatgttagtgttcgataatctggaattatatggggaggcccatgagctgcgagatgacccacctattatcgtgatcgagatctatgatcaggattcaatgggtaaggcggatttcatgggcagaacatttgctaaacccctggtgaaaatggctgatgaggcatattgccccccccgttttcctcctcagctcgagtactaccagatctaccgaggtaatgcaactgccggggatctactagcagcctttgaactgttgcaaatcggtccagctgggaaggccgacctccctcctatcaatgggcccgttgacgtggatcgagggccgatcatgcctgtgccaatgggtatccgtccagtcctctcaaagtatcgcgtcgaagtgcttttttggggcctacgggatctcaagagagtaaacctcgcacaggtggataggccacgggtggatatcgagtgcgctggtaaaggcgttcagagctctcttatccacaattataagaagaaccccaacttcaatacccttgtgaaatggttcgaggtggacctgcctgagaatgaactactccaccccccactgaacatacgagtggtcgactgtagggcattcgggaggtacactctagtcggctctcacgccgtcagcagcctccggcgatttatctacagaccaccagaccgtagcgcacctagttggaataccaccggagaggtggtggtgactatggaaccagaagtgcccatcaagaagcttgaaacaatggtcaagctagacgcaactagtgaggcagtcgttaaggtggacgtggccgaggaagaaaaggagaaaaagaagaaaaaaaaaggaaccgcagaggaacccgaggaagaagagcctgacgagagcatgctcgactggtggtcaaagtactttgcgagcattgacactatgaaagagcagctgagacagcaggaaccttccgggatcgacctggaggagaaggaagaagttgacaataccgaggggttgaaagggtcaatgaagggaaaagagaaagcacgcgctgctaaggaggagaagaagaagaagactcaatccagtggctctgggcagggtagcgaggctcccgaaaagaaaaagcccaagattgatgagttgaaggtgtatccaaaagaactcgagagcgagtttgataattttgaagattggttgcacacgttcaatttattacggggaaaaaccggcgacgacgaggatggcagtactgaagaagaaagaatcgttggccgatttaagggatcgttatgcgtgtacaaggtaccactcccagaggacgtatccagagaggccggatacgacagtacctacggcatgttccaagggattccttcaaacgatcccatcaacgtgctggtgcgcgtctatgtcgtgcgcgctacagacctacacccagctgatatcaacgggaaggctgacccatacatagcaatacggcttggcaaaaccgacattagggacaaggaaaactacatttccaagcagctgaacccagtttttgggaagtcatttgatatcgaagcctcctttcccatggagtctatgctaaccgtcgcagtgtacgactgggatcttgtaggcaccgatgaccttataggagagacaaaaattgatctcgagaaccgcttttacagtaagcacagggccacgtgtggtatcgctcagacttactcaactcacggatacaacatatggcgtgaccctatgaagcccagccaaattctgacgcgattgtgcaaagatggcaaagtagatggtccgcattttggcccacccggtcgggtgaaggtggccaatcgggtgtttactggacccagcgagatcgaagatgaaaatgggcagagaaaacctaccgacgaacatgtcgcactcctggcgctccgccattgggaggacatccctagagctggatgcagactcgtgcccgaacacgtcgaaactaggcccctactcaatcccgacaagcctggtatcgagcaaggaaggctggagctttgggtggatatgtttcctatggacatgcctgcgccaggtacacctcttgatatctctcccaggaagcccaaaaagtatgaactgcgagtaattatctggaacaccgacgaagttgtgctggaagacgatgatttctttaccggggaaaagtcgagtgacatcttcgtccgcggatggctcaagggccagcaggaggacaagcaggacaccgatgtgcactaccactcactaaccggcgagggcaactttaactggcggtatctgtttcctttcgactacctagccgctgaggaaaaaatagtcatctcaaaaaaggaatctatgttttcttgggacgagactgaatataaaataccagcccgcttaacactccagatttgggacgctgaccatttctctgccgatgactttctgggcgctattgagctagatctcaacaggttccctcggggggctaagactgctaaacagtgcacaatggaaatggccacgggagaagtcgatgtgcccttggtgtcgatctttaaacagaaacgcgtgaaaggctggtggccactgctggccaggaatgaaaacgacgagttcgagcttaccggaaaagtggaggctgagctgcaccttttaaccgccgaggaagccgagaagaaccccgtcggcctggcccggaacgaaccggatcccctcgaaaaacctaatcgtcctgatacgtcattcatttggtttctcaacccattgaaaagtgcaagatacttcctctggcacacctatcgctggctcctgctcaagcttttactcctgctcctgctgctgcttttacttgccctgttcctctattccgtgcctgggtacctggtcaaaaagatcctcggggcttag

SEQ ID NO: 149910 - DNA, 3693 bp, Artificial Sequence
  derived and/or modified sequence
atgattaagacagagaagagttaccccgaaaggagactcaggggcgttttggaggagctcagttgtggatgctgcaggtttctcagcctcgccgacaaggatcagggccacagtagtcggacccggctggatagggaacgcctcaaatcctgtatgagagaactggaaaacatgggccagcaggcacgcatgcttagagcccaggtaaaaagacacaccgtgcgggataagctgagactctgtcagaactttctccaaaagctgaggtttctagcagacgagccgcaacatagcattccagatatctttatttggatgatgtcaaataataaaagagtggcatatgcacgagtacccagtaaagatctgctgttcagtatcgttgaagaggaaacagggaaggattgtgcaaaggttaagaccctcttcctaaagctgccaggtaagcgaggcttcggctcagccggatggaccgtgcaagcaaaagtggagctgtatctgtggctgggcctatctaagcagaggaaggaattcctgtgcgggttgccctgtggattccaggaggtcaaggcagctcaagggcttgggttacacgcctttcctcctgttagcctcgtgtacaccaaaaagcaggcttttcagctgcgggcacacatgtatcaggctaggtccttgttcgctgcggatagttccggcctctctgacccctttgctcgcgtgttttttattaatcagagtcagtgtactgaagtactgaatgagaccttgtgtcctacatgggatcaaatgctcgtatttgacaacttggaactttacggcgaagctcacgaacttagagacgacccacccatcattgtgatcgagatatacgatcaagactccatggggaaggctgattttatgggccgtaccttcgccaaacccctagtgaagatggccgacgaagcttactgcccgcctcggtttcccccacagctggagtattatcaaatttaccggggtaatgctacagctggagacctgctagccgcatttgagctgcttcagatagggccagccggtaaggcagatctgccccctatcaatggtcccgtcgatgtcgacaggggccctattatgccagtccccatgggcatccgacctgtcttatccaagtaccgggtggaggtcctgttttggggcctgagagacctaaaacgggtaaatctcgcacaggtggaccgtcccagggtggacatcgaatgtgcagggaagggggtacagagctccctgatacacaattacaagaagaaccctaactttaacactttggttaaatggtttgaggttgacttgcccgagaatgagctgcttcatcccccacttaatatcagagttgtcgactgcagagcgtttgggaggtatacactggtgggatcacatgccgtttcatcgctacgtcgcttcatttatagaccgcctgaccgtagcgcccctagctggaacaccaccggggaggtcgtcgtgaccatggaacccgaagtgcccataaaaaaactggagacaatggtgaagctggatgccacgtctgaagcagtggttaaggtcgacgtggcggaggaggagaaggaaaaaaaaaaaaagaaaaaaggcacggcagaagagcccgaggaggaagagccagacgagtcaatgctggattggtggagcaaatattttgctagtattgacaccatgaaagagcagctgagacagcaggaaccttccggaattgacctggaggagaaagaggaggttgacaacaccgagggacttaagggatccatgaaaggcaaggagaaggcaagagcagctaaggaagagaagaagaagaagacacagtcaagtggctcaggccaggggtctgaagctccagagaaaaagaagccaaaaatagatgagctcaaggtttatccaaaggaactggagtctgaattcgataattttgaggattggctccatactttcaacctccttcgaggcaaaaccggagatgacgaagatggcagcacagaagaggaacggattgtgggcagatttaaaggatctctttgcgtgtataaggtcccccttcctgaggacgtgagtcgcgaggcagggtatgattccacttacgggatgttccagggaataccgagcaatgatccgattaatgtgctggttcgggtttatgtcgtgagagccactgacctgcaccctgctgatattaatgggaaagccgacccctatatcgcaattcgcttaggaaagactgacatcagagataaggagaactatatttctaagcagctgaaccctgtgttcgggaagtctttcgatatcgaggccagctttccaatggaatcaatgcttacagtggctgtgtacgattgggatctggtaggcaccgacgacctcatcggtgagaccaagatcgacctggagaataggttctacagtaagcaccgcgctacatgtggcattgcccagacctactctactcatggatacaacatctggagagatccaatgaaaccatcacagatcctcaccagactctgcaaggatggaaaggtggacggccctcactttggccctcccggacgcgtaaaagtcgcgaatcgggtcttcacaggacccagcgagattgaggacgaaaacggacagaggaaaccaacagatgaacatgtggcactgcttgccctcagacactgggaagatattccaagggcagggtgccggctcgttcccgagcacgtggaaaccagacccttgctcaaccctgataagccagggatcgagcagggcagactggagctctgggtagacatgttcccgatggacatgcccgcacctggcacacccctggacattagtccgcgaaaacccaaaaaatacgagctgcgtgtgataatatggaacaccgacgaggtggtccttgaggatgatgacttcttcaccggagaaaaaagctctgatatcttcgtaagagggtggctgaagggccagcaggaagacaagcaggatactgacgtacactaccattcgcttacaggagagggcaacttcaattggaggtatctgtttccatttgattacttagcggctgaagaaaagattgttatttccaaaaaagaatccatgttttcttgggacgagacggagtataagatcccagccagattgacattgcagatctgggatgctgatcacttctcagccgacgattttcttggtgctatcgaattggacctgaacaggttccctcggggagctaagaccgccaaacagtgtaccatggagatggctaccggggaagttgatgtgcccctggtgtctatcttcaagcaaaagagagtgaagggctggtggcctctgcttgcgaggaatgaaaatgatgagttcgaactgactggtaaagtggaagccgagctccatctgttgacggccgaggaagccgagaaaaatcccgttgggctcgctcgcaatgaaccagatccattagagaagccaaatcggccagacactagctttatctggtttctaaaccccttaaagtcagcgagatatttcctgtggcacacctacaggtggcttctgctcaagctactccttctgctcctattgctgctgctgctggccctgttcttgtactcagtccccggttacttagtaaagaagatcttgggggcttag

SEQ ID NO: 149911 - DNA, 3693 bp, Artificial Sequence
  derived and/or modified sequence
atgatcaagaccgagaagagctaccccgagagaagactgagaggcgtgctggaggagctgagctgcggctgctgcagattcctgagcctggccgacaaggaccagggccacagcagcagaaccagactggacagagagagactgaagagctgcatgagagagctggagaacatgggccagcaggccagaatgctgagagcccaggtgaagagacacaccgtgagagacaagctgagactgtgccagaacttcctgcagaagctgagattcctggccgacgagccccagcacagcatccccgacatcttcatctggatgatgagcaacaacaagagagtggcctacgccagagtgcccagcaaggacctgctgttcagcatcgtggaggaggagaccggcaaggactgcgccaaggtgaagaccctgttcctgaagctgcccggcaagagaggcttcggcagcgccggctggaccgtgcaggccaaggtggagctgtacctgtggctgggcctgagcaagcagagaaaggagttcctgtgcggcctgccctgcggcttccaggaggtgaaggccgcccagggcctgggcctgcacgccttcccccccgtgagcctggtgtacaccaagaagcaggccttccagctgagagcccacatgtaccaggccagaagcctgttcgccgccgacagcagcggcctgagcgaccccttcgccagagtgttcttcatcaaccagagccagtgcaccgaggtgctgaacgagaccctgtgccccacctgggaccagatgctggtgttcgacaacctggagctgtacggcgaggcccacgagctgagagacgacccccccatcatcgtgatcgagatctacgaccaggacagcatgggcaaggccgacttcatgggcagaaccttcgccaagcccctggtgaagatggccgacgaggcctactgcccccccagattccccccccagctggagtactaccagatctacagaggcaacgccaccgccggcgacctgctggccgccttcgagctgctgcagatcggccccgccggcaaggccgacctgccccccatcaacggccccgtggacgtggacagaggccccatcatgcccgtgcccatgggcatcagacccgtgctgagcaagtacagagtggaggtgctgttctggggcctgagagacctgaagagagtgaacctggcccaggtggacagacccagagtggacatcgagtgcgccggcaagggcgtgcagagcagcctgatccacaactacaagaagaaccccaacttcaacaccctggtgaagtggttcgaggtggacctgcccgagaacgagctgctgcacccccccctgaacatcagagtggtggactgcagagccttcggcagatacaccctggtgggcagccacgccgtgagcagcctgagaagattcatctacagaccccccgacagaagcgcccccagctggaacaccaccggcgaggtggtggtgaccatggagcccgaggtgcccatcaagaagctggagaccatggtgaagctggacgccaccagcgaggccgtggtgaaggtggacgtggccgaggaggagaaggagaagaagaagaagaagaagggcaccgccgaggagcccgaggaggaggagcccgacgagagcatgctggactggtggagcaagtacttcgccagcatcgacaccatgaaggagcagctgagacagcaggagcccagcggcatcgacctggaggagaaggaggaggtggacaacaccgagggcctgaagggcagcatgaagggcaaggagaaggccagagccgccaaggaggagaagaagaagaagacccagagcagcggcagcggccagggcagcgaggcccccgagaagaagaagcccaagatcgacgagctgaaggtgtaccccaaggagctggagagcgagttcgacaacttcgaggactggctgcacaccttcaacctgctgagaggcaagaccggcgacgacgaggacggcagcaccgaggaggagagaatcgtgggcagattcaagggcagcctgtgcgtgtacaaggtgcccctgcccgaggacgtgagcagagaggccggctacgacagcacctacggcatgttccagggcatccccagcaacgaccccatcaacgtgctggtgagagtgtacgtggtgagagccaccgacctgcaccccgccgacatcaacggcaaggccgacccctacatcgccatcagactgggcaagaccgacatcagagacaaggagaactacatcagcaagcagctgaaccccgtgttcggcaagagcttcgacatcgaggccagcttccccatggagagcatgctgaccgtggccgtgtacgactgggacctggtgggcaccgacgacctgatcggcgagaccaagatcgacctggagaacagattctacagcaagcacagagccacctgcggcatcgcccagacctacagcacccacggctacaacatctggagagaccccatgaagcccagccagatcctgaccagactgtgcaaggacggcaaggtggacggcccccacttcggcccccccggcagagtgaaggtggccaacagagtgttcaccggccccagcgagatcgaggacgagaacggccagagaaagcccaccgacgagcacgtggccctgctggccctgagacactgggaggacatccccagagccggctgcagactggtgcccgagcacgtggagaccagacccctgctgaaccccgacaagcccggcatcgagcagggcagactggagctgtgggtggacatgttccccatggacatgcccgcccccggcacccccctggacatcagccccagaaagcccaagaagtacgagctgagagtgatcatctggaacaccgacgaggtggtgctggaggacgacgacttcttcaccggcgagaagagcagcgacatcttcgtgagaggctggctgaagggccagcaggaggacaagcaggacaccgacgtgcactaccacagcctgaccggcgagggcaacttcaactggagatacctgttccccttcgactacctggccgccgaggagaagatcgtgatcagcaagaaggagagcatgttcagctgggacgagaccgagtacaagatccccgccagactgaccctgcagatctgggacgccgaccacttcagcgccgacgacttcctgggcgccatcgagctggacctgaacagattccccagaggcgccaagaccgccaagcagtgcaccatggagatggccaccggcgaggtggacgtgcccctggtgagcatcttcaagcagaagagagtgaagggctggtggcccctgctggccagaaacgagaacgacgagttcgagctgaccggcaaggtggaggccgagctgcacctgctgaccgccgaggaggccgagaagaaccccgtgggcctggccagaaacgagcccgaccccctggagaagcccaacagacccgacaccagcttcatctggttcctgaaccccctgaagagcgccagatacttcctgtggcacacctacagatggctgctgctgaagctgctgctgctgctgctgctgctgctgctgctggccctgttcctgtacagcgtgcccggctacctggtgaagaagatcctgggcgcctag

SEQ ID NO: 149912 - protein, 594 aa, Artificial Sequence
  derived and/or modified sequence
MAGEENFKEELRSQDASRNLNQHEVAGHPHSWSLEMLLRRLRAVHTKQDDKFANLLDAVGEFGTFQQRLVALTFIPSIMSAFFMFADHFVFTAQKPYCNTSWILAVGPHLSKAEQLNLTIPQAPNGSFLTCFMYLPVPWNLDSIIQFGLNDTDTCQDGWIYPDAKKRSLINEFDLVCGMETKKDTAQIMFMAGLPIGSLIFRLITDKMGRYPAILLSLLGLIIFGFGTAFMNSFHLYLFFRFGISQSVVGYAISSISLATEWLVGEHRAHAIILGHCFFAVGAVLLTGIAYSLPHWQLLFLVGGILVIPFISYIWILPESPRWLMMKGKVKEAKQVLCYAASVNKKTIPSNLLDELQLPRKKVTRASVLDFCKNRQLCKVTLVMSCVWFTVSYTYFTLSLRMRELGVSVHFRHVVPSIMEVPARLCCIFLLQQIGRKWSLAVTLLQAIIWCLLLLFLPEGEDGLRLKWPRCPATELKSMTILVLMLREFSLAATVTVFFLYTAELLPTVLRATGLGLVSLASVAGAILSLTIISQTPSLLPIFLCCVLAIVAFSLSSLLPETRDQPLSESLNHSSQIRNKVKDMKTKETSSDDV

SEQ ID NO: 149913 - DNA, 1785 bp, Artificial Sequence
  derived and/or modified sequence
atggccggcgaggagaacttcaaggaggagctgagaagccaggacgccagcagaaacctgaaccagcacgaggtggccggccacccccacagctggagcctggagatgctgctgagaagactgagagccgtgcacaccaagcaggacgacaagttcgccaacctgctggacgccgtgggcgagttcggcaccttccagcagagactggtggccctgaccttcatccccagcatcatgagcgccttcttcatgttcgccgaccacttcgtgttcaccgcccagaagccctactgcaacaccagctggatcctggccgtgggcccccacctgagcaaggccgagcagctgaacctgaccatcccccaggcccccaacggcagcttcctgacctgcttcatgtacctgcccgtgccctggaacctggacagcatcatccagttcggcctgaacgacaccgacacctgccaggacggctggatctaccccgacgccaagaagagaagcctgatcaacgagttcgacctggtgtgcggcatggagaccaagaaggacaccgcccagatcatgttcatggccggcctgcccatcggcagcctgatcttcagactgatcaccgacaagatgggcagataccccgccatcctgctgagcctgctgggcctgatcatcttcggcttcggcaccgccttcatgaacagcttccacctgtacctgttcttcagattcggcatcagccagagcgtggtgggctacgccatcagcagcatcagcctggccaccgagtggctggtgggcgagcacagagcccacgccatcatcctgggccactgcttcttcgccgtgggcgccgtgctgctgaccggcatcgcctacagcctgccccactggcagctgctgttcctggtgggcggcatcctggtgatccccttcatcagctacatctggatcctgcccgagagccccagatggctgatgatgaagggcaaggtgaaggaggccaagcaggtgctgtgctacgccgccagcgtgaacaagaagaccatccccagcaacctgctggacgagctgcagctgcccagaaagaaggtgaccagagccagcgtgctggacttctgcaagaacagacagctgtgcaaggtgaccctggtgatgagctgcgtgtggttcaccgtgagctacacctacttcaccctgagcctgagaatgagagagctgggcgtgagcgtgcacttcagacacgtggtgcccagcatcatggaggtgcccgccagactgtgctgcatcttcctgctgcagcagatcggcagaaagtggagcctggccgtgaccctgctgcaggccatcatctggtgcctgctgctgctgttcctgcccgagggcgaggacggcctgagactgaagtggcccagatgccccgccaccgagctgaagagcatgaccatcctggtgctgatgctgagagagttcagcctggccgccaccgtgaccgtgttcttcctgtacaccgccgagctgctgcccaccgtgctgagagccaccggcctgggcctggtgagcctggccagcgtggccggcgccatcctgagcctgaccatcatcagccagacccccagcctgctgcccatcttcctgtgctgcgtgctggccatcgtggccttcagcctgagcagcctgctgcccgagaccagagaccagcccctgagcgagagcctgaaccacagcagccagatcagaaacaaggtgaaggacatgaagaccaaggagaccagcagcgacgacgtgtag

SEQ ID NO: 149914 - DNA, 1785 bp, Artificial Sequence
  derived and/or modified sequence
atggcaggtgaggagaacttcaaggaagaactgagatctcaggatgcctcccggaaccttaaccaacacgaggtggccggccatccacactcatggtctctcgagatgctgcttcgccggcttagagcagtccataccaagcaagatgacaagtttgccaatctcctggacgctgtcggagaatttggtactttccagcagagactagttgctttaacgttcattccctctataatgtcagccttctttatgtttgccgaccacttcgtcttcactgcacagaaaccctactgtaacacaagttggattttggcagtcggcccgcatctctccaaggctgagcagctcaaccttacaatcccacaggctcctaacggctcttttcttacctgcttcatgtacctgcctgtaccgtggaacttggactctatcatacaattcggcctcaacgacacagacacttgccaggacggatggatttacccagacgctaagaaaagatcactcattaacgaattcgatcttgtttgcgggatggagactaagaaagacaccgctcagattatgtttatggccggactcccaatcggcagcctgatttttcggcttataacagacaaaatgggcagataccccgctatacttctgtctctcctgggactcataatcttcggatttgggaccgctttcatgaacagcttccacctgtatctgttctttcggtttgggatctcgcagagcgttgtgggctacgccatttcatctatttctctggcaaccgagtggctcgtcggcgaacatcgggcccatgccataatcctgggacactgttttttcgccgtgggggcagttcttttgaccggcatagcctacagcctgcctcactggcaattgttgttcctcgtgggcggaattttggttattccgttcatatcctacatttggatattgcccgagtcccctaggtggctaatgatgaagggtaaagtgaaggaagcgaagcaagtgctttgttatgcagccagcgtaaataagaaaacgatcccgtccaatcttcttgacgaattacaactcccacgcaagaaagtcactagggcctccgtgctcgacttttgtaagaaccgacagttgtgtaaggtcacactggtaatgagttgtgtctggttcacagtaagttatacttacttcactctgtcacttcggatgcgcgagctgggcgtgagcgtccacttccggcatgttgtcccgtctattatggaagtgccagctcggctttgttgtatcttcctcctccagcagattggccgcaagtggtcattagcggtcaccctactacaggctatcatttggtgcttgttgttgttgtttctccctgaaggagaagatggcctgagacttaagtggcccaggtgcccggccacagaactcaagtccatgactatccttgtgctgatgttgcgggagttttccctcgctgcgacagtaacagtattttttttatatactgctgaactcctgccaacagtgttgagagcgactgggctggggctggtgagcctagctagcgtcgcaggggccattttatccctgaccatcatcagccagacaccatcacttctcccgatttttctgtgctgtgtcctcgctattgtggcatttagtttgtcctccttgctgccggagacgagagaccagccactaagtgaatccttaaaccactcttcacagatccgcaacaaagtgaaggacatgaaaacgaaagagacctcgagcgacgacgtgtag

SEQ ID NO: 149915 - DNA, 1785 bp, Artificial Sequence
  derived and/or modified sequence
atggcaggcgaggaaaattttaaggaagagttgcggtcccaggacgcctcccgcaatctgaatcagcatgaagtcgcaggccatccccactcatggtctctggaaatgctactacggcggctccgcgccgtgcatacaaaacaagatgacaaatttgccaatcttttggacgcagtcggcgaatttgggacctttcagcaacgactggtcgccctgactttcattccctcaatcatgtctgccttcttcatgtttgcggaccactttgtcttcaccgcacagaagccctactgcaacaccagctggatactggcagtgggtccacatttatctaaggccgaacagctcaacctgactattccccaagcccctaacggaagttttctcacgtgcttcatgtacctgcctgttccttggaatctagacagcataatccagttcgggctcaatgatacagacacctgccaggacgggtggatttatcctgatgccaagaaaagaagcctgataaacgaatttgatctcgtatgcgggatggaaactaaaaaagatactgctcaaataatgttcatggccggtctgcctataggaagcctcatttttcggttaataacggacaaaatggggcggtacccggcaatactgctcagcctgctgggactgataatatttgggtttggcacggcctttatgaactcatttcatttgtacctgttcttccgtttcggcatttcacagtcagtggttggctatgctatcagttccatctccctggccaccgagtggctggttggagagcaccgtgcacatgctattatcctagggcactgcttctttgctgttggggccgtgctgttaacgggcatcgcttactctttaccacattggcagttacttttcctggtggggggaattcttgtgattcccttcatctcatacatatggatcctgcctgaaagccctaggtggctaatgatgaagggcaaagtgaaagaggccaagcaggtgctatgctatgcagcctctgtcaataaaaaaacaattccttccaatctgctggatgagctccaactccctcgaaaaaaagtgacaagggcctccgtcctcgatttttgcaaaaatcgacagctatgtaaggttactctggtgatgtcatgcgtgtggttcacagtctcttatacctactttactctgagtttgagaatgcgggaattgggcgtttccgtccattttcggcatgtggtgcccagcatcatggaagttccagcgcggctttgctgcatctttctgcttcagcagattggacgcaagtggtctcttgccgtgacgctgctccaggctattatttggtgccttcttctgctttttttgcctgagggcgaggatgggttaagactaaagtggcctaggtgtcccgccacagagctaaagagcatgactattctggttctcatgcttagggagttctctctcgctgctaccgtaaccgtgttcttcctctacaccgcagaacttctgcctactgtcctgcgcgctaccggcctcggactggtttcccttgcctcagtggccggcgcaatcttgtcgcttacaatcatcagccagacacccagtttgctgccaatcttcctatgctgcgtactagcgatcgtcgctttcagcctctcgagccttctcccagagacgcgggatcagccactgtccgagagccttaaccactccagccagatcagaaataaagtgaaagatatgaaaacaaaggaaacctcatcagatgatgtctag

SEQ ID NO: 149916 - DNA, 1785 bp, Artificial Sequence
  derived and/or modified sequence
atggccggggaggagaacttcaaggaggagctgcggagccaggatgccagcaggaacctgaaccagcacgaggtggccggccacccccacagctggagcctggagatgctgctgcggcggctgcgggctgtgcacaccaagcaggatgacaagtttgccaacctgctggatgctgtgggggagtttggcaccttccagcagaggctggtggccctgaccttcatccccagcatcatgtctgccttcttcatgtttgctgaccactttgtgttcaccgcccagaagccctactgcaacacctcctggatcctggccgtgggcccccacctgagcaaggccgagcagctgaacctgaccatcccccaggccccaaatggcagcttcctgacctgcttcatgtacctgcctgtgccctggaacctggacagcatcatccagtttggcctgaatgacacagacacctgccaggacggctggatctacccagatgccaagaagaggagcctcatcaatgaatttgacctggtgtgtggcatggagaccaagaaggacacagcccagatcatgttcatggccggcctgcccatcggcagcctcatcttccgcctcatcacagacaagatgggccgctacccagccatcctgctgagcctgctgggcctcatcatcttcggcttcggcacagccttcatgaacagcttccacctgtacctgttcttccgcttcggcatcagccagagcgtggtgggctacgccatcagcagcatcagcctggccacagagtggctggtgggggagcaccgggcccacgccatcatcctgggccactgcttctttgctgtgggcgctgtgctgctgactggaattgcctacagcctgccccactggcagctgctcttcctggtgggcggcatcctggtgatccccttcatctcctacatctggatcctgcctgagagcccccgctggctgatgatgaagggcaaggtgaaggaggccaagcaggtgctgtgctacgccgcctctgtgaacaagaagaccatccccagcaacctgctggatgagctgcagctgcccaggaagaaggtgacccgggcctctgtgctggacttctgcaagaaccggcagctgtgcaaggtgaccctggtgatgagctgtgtgtggttcaccgtgtcctacacctacttcaccctgagcctgaggatgagggagctgggcgtgtctgtgcacttcagacatgtggtgcccagcatcatggaggtgcctgcccggctgtgctgcatcttcctgctgcagcagatcggcaggaagtggagcctggccgtgaccctgctgcaggccatcatctggtgcctgctgctgctcttcctgcctgaaggagaagatggcctgcggctgaagtggccccgctgcccagccacagagctgaagtccatgaccatcctggtgctgatgctgcgggagttcagcctggccgccaccgtgaccgtcttcttcctgtacacagctgagctgctgcccaccgtgctgcgggccaccggcctgggcctggtgtccctggcctctgtggccggggccatcctgagcctgaccatcatcagccagacccccagcctgctgcccatcttcctgtgctgcgtgctggccatcgtggccttcagcctgagcagcctgctgcctgagacccgggaccagcccctgtctgagagcctgaaccacagcagccagatccggaacaaggtgaaggacatgaagaccaaggagaccagcagtgatgatgtgtag

SEQ ID NO: 149917 - DNA, 1785 bp, Artificial Sequence
  derived and/or modified sequence
atggccggcgaggagaacttcaaggaggagctgcggagccaggacgccagtagaaacctcaaccagcacgaagtggctggccaccctcatagctggtctttagagatgctgctgcgtcgcctgcgcgcagtgcacacaaaacaggacgacaagtttgctaatttactggatgctgtgggcgaattcggaacctttcaacagcgacttgtcgctctgacctttatcccttccattatgtccgccttctttatgttcgctgaccacttcgtgttcaccgctcagaaaccatattgtaacacgtcttggatcctcgcagttggcccacacttgtctaaagccgaacagctcaatctgaccattccacaggccccaaacggctctttcctcacttgcttcatgtacctgccagttccttggaacctggacagcataatccagttcgggctgaacgataccgacacctgtcaggatggatggatctaccccgatgccaagaagagatccctgattaatgaatttgatctggtgtgcggcatggaaacaaagaaagacacagcccaaattatgtttatggctgggttacctattggtagcctcatctttagactcattaccgacaaaatgggtagatacccggcaatacttctgagcctactaggtctcatcatcttcgggttcggaactgcctttatgaacagctttcacttatacctgtttttccgctttggaattagccagtccgtggtgggctacgccatctcttctatcagcctggccacagaatggcttgtaggagaacatagagctcacgcaattatactgggccattgctttttcgccgttggcgcagtcctcctgacaggtatcgcatactccctaccacattggcaactcctttttcttgttggtggcatcctggtgatccctttcatctcttacatctggattctgccagagtcacctagatggctcatgatgaaaggaaaggtcaaggaagccaagcaggtgctctgctatgccgcgtctgtgaataaaaaaacaattcctagcaatctgctggatgagcttcagctgcctagaaagaaggtcacgcgggcgtctgtgctcgacttttgtaagaataggcagctttgtaaggtgactctggtcatgtcatgtgtctggttcaccgtgtcctacacatattttacactctctcttcggatgcgcgagctcggggttagcgtgcacttcagacatgtggtgccttcgataatggaggtgccggctcggctctgttgcatctttcttctacagcagataggtcgcaagtggagcttggccgtgaccctgctgcaggccatcatctggtgtctccttctcctattcttgccagagggggaggacggattaaggctgaagtggcctcggtgtcccgcaacggaattgaagagcatgacaatactcgttctgatgcttcgagaattctccctcgccgccaccgtgacagttttttttctgtatacggccgaactgttgccgactgtcctgcgtgccaccggtctcggccttgtttcactggcatccgtggctggtgccatcctctctctgacgattatcagtcagactccctcgttacttcctatattcctgtgctgcgtgctcgccatagtggcattttcattgtcttcccttcttcctgagacacgagaccagcctctcagcgagtcgttgaaccattcctcacagattaggaacaaagtgaaagacatgaaaaccaaggagacctcttccgacgatgtatag

SEQ ID NO: 149918 - DNA, 1785 bp, Artificial Sequence
  derived and/or modified sequence
atggccggcgaggagaacttcaaggaggagctgcggagccaggacgcttcgagaaatctgaaccagcatgaggtagccggacacccgcatagttggtcactcgagatgctgctccgccggttgcgcgctgtccacaccaagcaggacgacaagttcgcgaacctcctcgatgcggttggagagtttggcaccttccagcagcgcctggtggccctgaccttcattccttccatcatgtccgccttttttatgttcgccgaccactttgtttttacagcacagaagccctattgcaatacctcatggattctcgcagtcgggccacatttgtccaaagccgaacaactgaatctgactatccctcaggcccctaatggcagttttctaacctgtttcatgtatctgccggtcccctggaatctggatagcataatccagttcgggcttaatgacacagatacttgccaggatgggtggatttatcccgatgccaagaaaaggagtctgattaatgaatttgatcttgtgtgtggtatggagactaagaaggacactgctcaaattatgttcatggcgggtcttcccataggctccctcatcttccgtctgataaccgataaaatgggtaggtaccccgcaattctgctgagcctccttggactgattatctttgggttcggcactgctttcatgaactccttccatctgtatctcttcttcaggttcgggataagccaatctgtggtggggtatgcaatcagttccatcagtctggctaccgagtggctagtgggagagcaccgtgcccacgctattatactcggccattgctttttcgctgtcggggccgttttgctcactggtattgcttatagcctcccacattggcaactgttgtttctggtgggcggcatactggtgatccctttcattagctatatctggatcctgccagagagtcctaggtggctgatgatgaaggggaaagtgaaggaagcgaagcaagtcctgtgctacgctgcgtccgtgaataagaaaacgattcccagtaacctgctcgacgagctgcagttgccacgcaagaaggtgacacgcgcttccgtactcgatttttgtaagaataggcaactgtgcaaggtgactctggtgatgtcctgtgtctggtttaccgtctcctacacttactttacactatctcttcgtatgcgggaacttggcgtgagcgttcattttagacacgtggtgccttctatcatggaagtccccgcgcggctgtgttgtattttcctattgcaacagattggccggaagtggagtctagctgtcaccctgctgcaggccatcatatggtgcttgcttttactgtttctgcccgagggggaagatggactgcgcctgaaatggccgaggtgtcccgccacagaactaaaaagcatgaccatcctggtattaatgctccgtgagttctcactcgctgcaactgtaactgtcttctttctttacaccgccgagctcctgccaacagtcctgagggccaccggcttggggcttgtaagtttagcttctgtggctggagccatacttagcttgacaataatttcacagacacctagcctgctccccatttttctgtgctgcgttctggcgatcgtggccttttccctcagttctttgctcccagagactagagatcagccactgagcgagagcttaaaccacagttcccagattagaaacaaagtcaaggacatgaaaaccaaagagacctcaagcgacgatgtgtag

SEQ ID NO: 149919 - DNA, 1785 bp, Artificial Sequence
  derived and/or modified sequence
atggctggtgaagaaaacttcaaagaggagctcaggtcccaagatgcctcacgcaacctgaatcagcatgaagtcgcgggacacccccacagctggagcctggagatgcttctcagacgactcagggccgtccacaccaagcaggatgacaagtttgccaacctcctggacgcggtaggagagtttgggaccttccagcagaggctggttgcccttacctttattccctcgattatgtcagcttttttcatgtttgccgatcatttcgtcttcactgcacaaaaaccttactgtaacacctcatggattttggccgttggcccacatttgtctaaggcggaacagttaaacctaaccatacctcaggcgccaaatggatcgtttctgacctgttttatgtacctacctgtgccctggaacttggacagcattatccagtttggcctaaatgatacagatacgtgccaggacggatggatctaccccgatgccaaaaaaaggagcctcatcaacgaattcgacctggtgtgcgggatggagaccaagaaggacaccgctcagatcatgtttatggccggactcccaataggatctttaatttttaggctgattactgataaaatgggcagatatcctgcaatcctgttatctctgctcggcctgattattttcggtttcggaacggcattcatgaattcttttcatctatacttattttttaggttcggtattagccagtccgtagtcgggtatgcgatttcaagtatctcactggcaacagaatggcttgtgggggagcatcgggctcacgccattatcttgggtcattgtttctttgctgtgggcgcagtgctgctgacaggtatcgcctatagtctccctcattggcagctgttgttccttgtgggaggaattctggtgatccctttcatcagctatatctggatacttcccgagtcccctcgatggctgatgatgaagggcaaggtcaaagaagccaagcaggtgttatgttatgccgctagtgtgaacaagaagacaatcccaagcaatctcctggacgagctgcagctgccgagaaagaaagtgactagagcgagcgtcctggacttctgtaagaatcgacagctttgtaaagttacgctagttatgtcctgcgtgtggtttaccgtgagctacacttacttcaccctgtccttgcggatgcgagagttgggggtgagcgtacacttcagacacgtggtcccaagtatcatggaggtgcccgcacgtttgtgctgcatttttctgctgcagcagattggcaggaagtggtctctggctgtgaccctactccaggcaattatttggtgcctgttgctgctgttccttccagaaggcgaagatggcctccgtttgaaatggcccagatgtccagcaaccgagctgaagagcatgaccattttggtgctgatgttgcgagagttcagcctagctgccacggtgaccgttttcttcctgtatacagccgagctgctccccacagtccttcgagccacaggcctcgggctggtttctttggccagcgtggctggagctattctgtcactgactataatctcccagaccccatcacttcttcctatcttcctgtgctgtgtgctcgccattgtcgccttttcactgtcttcactcctgccagaaacccgagaccagcctttgtctgagtcattaaaccatagctctcagatcaggaataaagtgaaagatatgaaaactaaagagacgagtagtgatgatgtgtag

SEQ ID NO: 149920 - DNA, 1785 bp, Artificial Sequence
  derived and/or modified sequence
atggcaggcgaggagaactttaaggaagagttgagatcgcaggatgcctctcgaaacttgaatcagcacgaagtcgccggtcatccacactcttggagcctggaaatgcttctcaggcggctcagagctgttcacacgaagcaggacgacaagtttgcaaacctcctggatgctgttggcgagtttggtacttttcagcaacggcttgtggccctaacatttatcccttccatcatgtctgccttctttatgtttgctgaccactttgtatttactgcccaaaaaccgtattgcaatacaagctggattttggcagtgggcccacacctctccaaagccgagcagttaaatctgactataccccaggcccctaacggcagtttcttgacctgtttcatgtatctccctgtgccctggaatctggattcaatcatccaatttggactgaatgatacggacacctgccaggatggttggatctaccctgatgctaagaagaggtctctgatcaacgaattcgacttagtgtgtggcatggagactaaaaaagatactgcacaaatcatgtttatggcaggattgcctatagggtcgctcatcttccggctaatcaccgataaaatggggagatatcctgccatattgctgagtttactgggcctgataattttcggattcggaaccgctttcatgaactccttccatctgtatttgttttttcgatttgggatctcacagagcgtggtggggtacgccatcagcagcatctctctggccactgagtggctggttggagagcaccgagcccacgcaatcattcttggacactgcttctttgcagtgggcgcagtgctactgactgggattgcgtactcactcccacactggcagctgttatttctggtcggcggtattctcgtcatccccttcatatcctatatctggattttgcctgaatctcccagatggttgatgatgaagggcaaggtaaaggaggcaaagcaggtcttatgttacgctgccagcgtaaataagaaaacgattccttccaacctgctcgacgagctccagttgcctcgtaaaaaggtcacgagagcctccgtgttggatttctgtaagaaccgccagctttgtaaagtgacgttggtaatgtcctgcgtttggttcaccgtgagttacacgtacttcacgctctctctgcgcatgagagagctcggggtgtctgtgcacttccggcacgtggttccaagcattatggaggtcccagcacggttgtgttgtattttccttctgcagcagatagggagaaagtggtccttggccgtgaccctgctgcaggccattatctggtgcctcttgttgttgtttctgccagagggcgaggatggccttcgactgaagtggcccaggtgtcccgcaacggaactgaaatccatgactatcttagtgctcatgctacgggagttctccctggctgctacagtgaccgtgttctttctgtacacagctgagctgctcccaactgtcctgagagctactggattgggtctggtgtcactggcgagcgtggccggagccattctaagtcttaccatcataagtcagaccccttcccttctaccgatatttctgtgttgcgtgctggccatcgtcgctttctccctgtcaagtctgctacctgagacaagggatcagcctctgtcagaatccctgaaccactctagccagattaggaacaaggtcaaagacatgaagaccaaggaaacctcctctgacgacgtgtag

SEQ ID NO: 149921 - protein, 339 aa, Artificial Sequence
  derived and/or modified sequence
MKDSLVLLGRVPAHPDSRCWFLAWNPAGTLLASCGGDRRIRIWGTEGDSWICKSVLSEGHQRTVRKVAWSPCGNYLASASFDATTCIWKKNQDDFECVTTLEGHENEVKSVAWAPSGNLLATCSRDKSVWVWEVDEEDEYECVSVLNSHTQDVKHVVWHPSQELLASASYDDTVKLYREEEDDWVCCATLEGHESTVWSLAFDPSGQRLASCSDDRTVRIWRQYLPGNEQGVACSGSDPSWKCICTLSGFHSRTIYDIAWCQLTGALATACGDDAIRVFQEDPNSDPQQPTFSLTAHLHQAHSQDVNCVAWNPKEPGLLASCSDDGEVAFWKYQRPEGL

SEQ ID NO: 149922 - DNA, 1020 bp, Artificial Sequence
  derived and/or modified sequence
atgaaagactctttagtgctgctgggtcgggtgcctgctcaccctgactcgagatgttggtttctagcatggaaccctgccggaacactgctagcatcctgcggtggggaccggcgcatccggatctggggtacggaaggagatagttggatttgcaaaagcgtgttgtctgaggggcaccagcgcacagttcggaaggtcgcttggagcccgtgtggtaattacttggcatctgcttcctttgacgccacaacctgtatctggaagaagaatcaggatgactttgagtgcgtcactacgctggaggggcatgagaatgaggtgaaatcagttgcgtgggctccaagtggcaatctcctcgctacctgcagcagagataagtctgtatgggtctgggaagtggacgaggaagacgaatacgagtgcgtttccgtgctaaactctcatacacaggatgtgaaacacgtagtttggcacccctcacaggaactgctcgccagtgcctcctacgatgataccgtcaagctatacagagaggaggaagacgattgggtgtgttgtgctacgctcgaaggtcacgagagcaccgtatggtcactagcctttgatcccagtggtcagagactcgcatcctgcagtgatgaccggaccgtccgtatctggcggcagtacctgccaggcaacgagcagggtgtggcttgttccggaagcgacccttcttggaagtgcatctgcacactttccggctttcacagtagaacaatatacgatattgcctggtgccaattgactggagctctggcgactgcatgtggcgacgatgccattcgtgtgttccaggaggaccccaatagcgaccctcagcaacccacgttctccttgacagcgcacctccatcaggcacactctcaagacgtcaactgtgttgcctggaatcccaaagaaccgggtctactggccagctgtagcgacgatggtgaagtggccttttggaagtaccagcggccagaaggcttgtag

SEQ ID NO: 149923 - DNA, 1020 bp, Artificial Sequence
  derived and/or modified sequence
atgaaggacagcctggtgctgctgggccgggtgcctgcccacccagacagccgctgctggttcctggcctggaacccagctggcaccctgctggccagctgtggcggggaccggcgcatccgcatctggggcacagaaggagacagctggatctgcaagtctgtgctgtctgagggccaccagaggacagtgaggaaggtggcctggagcccctgtggcaactacctggccagcgccagctttgatgccaccacctgcatctggaagaagaaccaggatgactttgaatgtgtgaccaccctggagggccatgaaaatgaggtgaagtctgtggcctgggcccccagcggcaacctgctggccacctgcagccgggacaagtctgtgtgggtgtgggaggtggatgaagaagatgaatatgaatgtgtgtctgtgctgaacagccacacccaggatgtgaagcacgtggtgtggcaccccagccaggagctgctggccagcgccagctatgatgacacagtgaagctgtaccgggaggaggaggatgactgggtgtgctgtgccaccctggagggccacgagagcacagtgtggagcctggcctttgaccccagcggccagaggctggccagctgcagtgatgacagaacagtgcgcatctggaggcagtacctgcctggaaatgagcagggcgtggcctgcagcggcagtgaccccagctggaagtgcatctgcaccctgagcggcttccacagcaggaccatctatgacatcgcctggtgccagctgaccggggccctggccacagcctgtggagatgatgccatccgggtcttccaggaggaccccaacagcgacccccagcagcccaccttcagcctgacagcccacctgcaccaggcccacagccaggatgtgaactgtgtggcctggaaccccaaggagcccggcctgctggccagctgcagtgatgatggagaggtggccttctggaagtaccagaggcctgagggcctgtag

SEQ ID NO: 149924 - DNA, 1020 bp, Artificial Sequence
  derived and/or modified sequence
atgaaggacagcctggtgctgctgggccgggtgcccgcccaccccgatagcaggtgttggtttttagcatggaaccctgctgggacccttctggcatcctgcggcggtgatcgccgcattaggatttggggcaccgagggtgacagttggatctgtaagagtgttctctccgaagggcatcagaggactgtgcgcaaagtggcctggtccccttgtggtaattacctggcgagtgccagcttcgacgctaccacttgtatttggaaaaagaatcaggacgacttcgagtgtgtaactacattggaagggcatgaaaatgaagtcaagtccgtcgcctgggctccttcaggcaatctcctagcaacgtgttcacgcgataagagcgtttgggtgtgggaagtggacgaagaagacgagtatgaatgcgtctccgttctcaactcacacacacaagacgtgaagcacgtcgtctggcatcccagccaagagctgcttgcatcggcctcgtatgatgataccgtaaaactgtaccgcgaagaggaggatgattgggtctgttgtgctacactcgagggtcacgaatcaacagtatggagtttagcttttgaccctagtggccagcggttagcaagttgtagcgatgatagaaccgttagaatctggcgacagtacctgccggggaacgagcagggagttgcttgctcaggatctgatccctcctggaagtgcatttgtacactgtcgggattccattcccgcacaatctatgatatcgcctggtgccagctgacgggagctcttgccacagcatgtggagacgacgctattcgtgtgttccaagaagatcccaattctgacccgcagcagcctaccttttcattaactgcacatctgcatcaggcccattcacaggacgttaattgcgttgcgtggaatcctaaggagccaggtctgttggcatcatgctctgacgacggcgaggtcgccttttggaagtaccagcggcctgaggggctgtag

SEQ ID NO: 149925 - DNA, 1020 bp, Artificial Sequence
  derived and/or modified sequence
atgaaagactctctggtactccttgggcgagttccagcccatcccgattctcggtgctggttcttagcctggaaccctgcaggcaccctccttgcctcatgcggcggagaccgacgtatccggatctggggaaccgagggggattcctggatatgcaaaagtgtgttgagcgagggacaccaaaggacagtacgcaaggtcgcttggtctccttgtggaaattacctagcttctgccagttttgatgccactacttgcatctggaagaaaaatcaggatgactttgaatgcgttaccacactagaaggacacgagaatgaagtaaagtctgttgcctgggccccttcaggtaacctacttgccacgtgcagccgagataaatcagtctgggtgtgggaggtagacgaggaagatgagtacgaatgtgtgtccgtgcttaactctcacacccaggacgtgaaacacgtagtctggcatccctcacaggaactgctggcatctgcttcttacgatgataccgtgaaactctaccgggaagaggaagatgactgggtctgctgcgcaactctcgaaggtcacgagtcgacagtctggtctttagcttttgaccccagtggtcagagactagcttcatgttccgacgaccgcacagtgagaatttggcgccaatatctccctggtaacgaacagggggttgcttgcagtggatcggacccgtcctggaagtgtatttgtactctgtctggattccacagccgaactatctatgacatagcttggtgtcagctcaccggggcattggccactgcctgtggggatgacgccattcgagtcttccaggaggatcctaactctgaccctcagcagccaaccttttcactgaccgcacacctgcaccaggctcactctcaggatgtaaactgcgtcgcatggaacccgaaagaacctggcctcctggctagctgcagcgacgacggcgaggttgccttctggaagtatcagcgccctgaaggcctgtag

SEQ ID NO: 149926 - DNA, 1533 bp, Artificial Sequence
  derived and/or modified sequence
ccctgccgaggtgaggggagcgactacaactcccagagggtatggcggccgcagcagtgggcagttgagtttccggggcgacccaggtcctccggcggaagcgggagcctctgtcggccgcggaagcctggagtgggcggtacgcagacgcgcgcggtgagacccgctgtctgctcagcggactctgcccgcccccacctccccctgcgtcgggccgacatgaaggactcgctggtgctgctgggccgtgtcccggcgcacccggactcccgctgctggttcctggcctggaaccccgcggggaccctgctggcctcgtgcggcggcgaccggagaatccgcatctggggcacggagggtgacagctggatctgcaagtctgtcctttctgaaggccaccagcgcaccgtgcggaaggtagcctggtccccctgcggtaattacctggcctctgccagctttgatgctaccacttgcatttggaagaagaaccaggatgactttgagtgtgtaaccactctcgagggccatgaaaatgaggtcaagtcagtggcttgggccccatctggcaacctcctggccacttgcagccgagataagagcgtttgggtctgggaagttgatgaagaggatgagtatgaatgtgtcagtgttctcaactcccacacacaggatgtcaagcatgtggtttggcacccaagtcaggagctcttagcttctgccagctatgatgacacagtgaagctgtaccgggaggaagaggatgactgggtatgctgtgccacccttgagggccatgaatccactgtgtggagcttggcctttgacccgagtggccagcgcctggcgtcttgtagtgatgaccgtactgtgcgtatctggcgtcagtatctaccaggcaatgaacaaggggtggcatgcagcggctctgaccccagttggaaatgtatctgtactttgtccggcttccactcaaggaccatttatgacattgcttggtgtcagctgacaggggctctggccacagcttgtggggatgacgcgatccgcgtgtttcaggaggatcccaactcggatccacagcagcccaccttctccctgacagcccacttgcatcaggcccattcccaggatgtcaactgtgtggcctggaaccccaaggagccagggctactggcctcctgcagtgatgatggggaggtggccttctggaagtatcagcggcctgaaggcctctgagctacctcgactttggacagagtaatgactccccagaaaacgtcatataagactttaccagcccctgagaggaccaggaggagcatccttgaccttcatttaacttggctcacttctcttcagacttgggtagaagtgcagagccacagaattgctttccttccccgcctttgacatgaggccttcagtaaagagctacagaacatgagtacattgttataccacagatttttcttgcattagggcacagtgttaaattttttggaggtaaatatactatttataatcactata

SEQ ID NO: 149927 - DNA, 1020 bp, Artificial Sequence
  derived and/or modified sequence
atgaaggacagcctggtgctgctgggcagagtgcccgcccaccccgacagcagatgctggttcctggcctggaaccccgccggcaccctgctggccagctgcggcggcgacagaagaatcagaatctggggcaccgagggcgacagctggatctgcaagagcgtgctgagcgagggccaccagagaaccgtgagaaaggtggcctggagcccctgcggcaactacctggccagcgccagcttcgacgccaccacctgcatctggaagaagaaccaggacgacttcgagtgcgtgaccaccctggagggccacgagaacgaggtgaagagcgtggcctgggcccccagcggcaacctgctggccacctgcagcagagacaagagcgtgtgggtgtgggaggtggacgaggaggacgagtacgagtgcgtgagcgtgctgaacagccacacccaggacgtgaagcacgtggtgtggcaccccagccaggagctgctggccagcgccagctacgacgacaccgtgaagctgtacagagaggaggaggacgactgggtgtgctgcgccaccctggagggccacgagagcaccgtgtggagcctggccttcgaccccagcggccagagactggccagctgcagcgacgacagaaccgtgagaatctggagacagtacctgcccggcaacgagcagggcgtggcctgcagcggcagcgaccccagctggaagtgcatctgcaccctgagcggcttccacagcagaaccatctacgacatcgcctggtgccagctgaccggcgccctggccaccgcctgcggcgacgacgccatcagagtgttccaggaggaccccaacagcgacccccagcagcccaccttcagcctgaccgcccacctgcaccaggcccacagccaggacgtgaactgcgtggcctggaaccccaaggagcccggcctgctggccagctgcagcgacgacggcgaggtggccttctggaagtaccagagacccgagggcctgtag

SEQ ID NO: 149928 - protein, 142 aa, Artificial Sequence
  derived and/or modified sequence
MAAGGSDPRAGDVEEDASQLIFPKEFETAETLLNSEVHMLLEHRKQQNESAEDEQELSEVFMKTLNYTARFSRFKNRETIASVRSLLLQKKLHKFELACLANLCPETAEESKALIPSLEGRFEDEELQQILDDIQTKRSFQY

SEQ ID NO: 149929 - DNA, 429 bp, Artificial Sequence
  derived and/or modified sequence
atggcagcagggggttcagatcctagggccggggacgtcgaggaagatgccagtcagcttatttttccgaaggagtttgaaactgctgagaccctccttaattcagaagttcatatgttgctagagcaccgcaaacagcagaacgaatcagccgaggatgagcaggaactgtcagaagtgttcatgaagactctcaactacaccgcccgattctcaaggttcaaaaaccgcgagacaatcgccagtgtccgctctcttttgctgcaaaagaaactccacaagttcgagctggcgtgtctggccaatctgtgtcctgagaccgccgaagaatccaaggcactgattccgtcgcttgaaggtcgcttcgaggacgaagaactgcaacaaatactggatgatatccagaccaagcgaagtttccagtattag

SEQ ID NO: 149930 - DNA, 429 bp, Artificial Sequence
  derived and/or modified sequence
atggctgctgggggcagtgaccccagggctggagatgtggaggaggatgccagccagctgatcttccccaaggagtttgaaacagctgagaccctgctgaacagcgaggtgcacatgctgctggagcacaggaagcagcagaatgaatctgcagaagatgagcaggagctgtctgaggtgttcatgaagaccctgaactacacagcccgcttcagccgcttcaagaaccgggagaccatcgcctctgtgcgcagcctgctgctgcagaagaagctgcacaagtttgagctggcctgcctggccaacctgtgcccagagacagctgaggagagcaaggccctgatccccagcctggagggccgctttgaagatgaggagctgcagcagatcctggatgacatccagaccaagaggagcttccagtactag

SEQ ID NO: 149931 - DNA, 2271 bp, Artificial Sequence
  derived and/or modified sequence
ttgctccgcgcttctgcttccggcggcgctggtggtggcgcgcggcgcggcgcggcgatggcggcgggtggcagcgatccgcgggctggcgacgtagaggaggacgcctcacagctcatctttcctaaagagtttgaaacagctgagacacttctaaattcagaagttcatatgcttctggaacatcgaaagcagcagaatgagagtgcagaggacgaacaggagctctcagaagtcttcatgaaaacattaaactacacagcccgtttcagtcgtttcaaaaacagagagaccattgccagtgttcgtagcttgctactccagaaaaagcttcataagtttgagttggcctgtttggccaacctttgcccagagactgctgaggagtccaaggctctaatcccaagcttggagggacggtttgaagatgaggagctgcagcagattcttgatgatatccagacaaagcgcagctttcagtattaatctccaaacatcactgctgctcggagaaaccacatccccaggcataacaccaccttcccactgtctggggctgacttgcacagaaattctgttgaagacagttgagaattcctttggagaaaacagcccagcttggcgtggggttaggttgctgtttcaaataactcacaggcccaggtgacatggaatcttggagcagccttgtgcagtggcagccagtggcttcctgaacgtgcctctgcgaagtgtgagatgaggggtcacataaccacactgttgactacctcattcctggtttttggcctccacatcatcttttttcttaatatttcatgttttaatttcagggtgtttatactttttgaaactagaccagaagatagtagactttatagagaaagaccagttttacctagatactaaaggaagaattaaaccgctgttagtttgaaatgctttttttttttttttttaaatggagatagggtcttaactcttgtccaggctggaggagtgcagtcgtacagtcatggctcactgaagtcttgaccccgctgcctcagcctcccaaataactggggccacaggtgtgcaccacaactctcagctaatttttaaaattttttatagaggtggggttttactatgctgtccagactggtcttaaactcctgggctcaagtgatccccctgccttggcctcccaaactggtgagattacaggcatgagccaccacaactggcctgaaattcttaaaggatgggagtgtcgatgacagcaccttggcatcgttgtgcctaacctgggagacggaagaagcacgccatgggaagtgtttacacttggggacaagtgctaagtattgtggagcccatagccccttgagatagatggctactttgcctttcttcttgaactgtcttgcagaatgtggatttggggtaagtggtcttgaaggattcatttagtcaccctcaaattaagatttttacttcatctttcttgggcctgcacctccaagataacaaagaagaagcaatggtcgtgccaaagaggtccacaaccaggtgtgcactgttcactgcagcccatttgctgtatgaactgtggttgttgtgtgcccaatgacaaggctactaagaaattcatcatttgaaacgtagaggccgcagcagtcagcgatgtttctgaaatgagcatccttgacgcctgtgtacttcccaggctggatgtgaagctacattaccatgtgagttgtgccattcacagcacagtggtgaggaattgagctcatgaagcaggcaaggaccgaacacctccaccccaacgtagacctgcaggtgctgccccatgacctccaccaaagcccatataaggagcggagttgttaaggactgaagaaaaacttctctggagaaaaataaaattgcaattctacttaaaaaaatttttttttttttttacttcataggccaggcttgaagttctgaacactttgaagtctccaattatgagagatccagtctaagcctctggcctgctaattagcaataagtgctttatttggaaggagggagtcatccactcttgagccactgcagtgaagtcacttgatctcagtctgggggaaaacacttcaatagctaaacattctagctttgatttttctgaagggaatacacttgttttcaattttggggtttttctttggggcacttgcttgactctgtatgaacttgtgatccaaggaaaaaggagaaagaacagtgttggcttttaaaatc

SEQ ID NO: 149932 - DNA, 429 bp, Artificial Sequence
  derived and/or modified sequence
atggccgccggcggcagcgacccccgggccggcgacgtggaggaggacgcctcccagttgatcttcccaaaagaatttgagacggccgagaccctcctgaattccgaggtacatatgctgctggaacacaggaagcagcagaacgaaagtgcggaagacgagcaggaactgtccgaagtctttatgaaaactctgaattacaccgcccggttttcacgtttcaaaaaccgggagacaattgccagcgtacggtcgctactcctgcagaaaaagctacacaagtttgagcttgcttgtctggctaacctgtgccccgaaacggcagaggaaagtaaggccctgatcccctcattggaggggcgattcgaagacgaggaactgcaacaaattctcgacgacatccagaccaagcggtctttccaatactag

SEQ ID NO: 149933 - DNA, 429 bp, Artificial Sequence
  derived and/or modified sequence
atggcagccggaggatcagatccacgtgcgggagatgtggaggaggatgcatcgcagcttattttccctaaagagttcgagaccgctgagacccttctcaatagtgaggtccatatgctgctagaacaccgcaaacagcagaacgagagcgccgaggatgaacaagaactttccgaggtgttcatgaagaccctcaactatacagctcgcttcagcagattcaagaaccgcgaaacgatcgcatccgtccgatccctgttgttacagaagaaactccataaattcgaactggcttgcctggccaacctctgccccgaaacggcagaagaatcaaaagctttgatcccttccctggagggcaggttcgaagacgaggaactgcaacagatactggatgacattcaaaccaagaggtctttccagtactag

SEQ ID NO: 149934 - DNA, 429 bp, Artificial Sequence
  derived and/or modified sequence
atggccgccggcggcagcgaccccagagccggcgacgtggaggaggacgccagccagctgatcttccccaaggagttcgagaccgccgagaccctgctgaacagcgaggtgcacatgctgctggagcacagaaagcagcagaacgagagcgccgaggacgagcaggagctgagcgaggtgttcatgaagaccctgaactacaccgccagattcagcagattcaagaacagagagaccatcgccagcgtgagaagcctgctgctgcagaagaagctgcacaagttcgagctggcctgcctggccaacctgtgccccgagaccgccgaggagagcaaggccctgatccccagcctggagggcagattcgaggacgaggagctgcagcagatcctggacgacatccagaccaagagaagcttccagtactag

SEQ ID NO: 149935 - protein, 411 aa, Artificial Sequence
  derived and/or modified sequence
MRRRRAGGRTMVERASKFVLVVAGSVCFMLILYQYAGPGLSLGAPGGRAPPDDLDLFPTPDPHYEKKYYFPVRELERSLRFDMKGDDVIVFLHIQKTGGTTFGRHLVQNVRLEVPCDCRPGQKKCTCYRPNRRETWLFSRFSTGWSCGLHADWTELTNCVPGVLDRRDSAALRTPRKFYYITLLRDPVSRYLSEWRHVQRGATWKTSLHMCDGRTPTPEELPPCYEGTDWSGCTLQEFMDCPYNLANNRQVRMLADLSLVGCYNLSFIPEGKRAQLLLESAKKNLRGMAFFGLTEFQRKTQYLFERTFNLKFIRPFMQYNSTRAGGVEVDEDTIRRIEELNDLDMQLYDYAKDLFQQRYQYKRQLERREQRLRSREERLLHRAKEALPREDADEPGRVPTEDYMSHIIEKW

SEQ ID NO: 149936 - DNA, 1236 bp, Artificial Sequence
  derived and/or modified sequence
atgcggcgtcgaagagctggcgggagaacgatggtcgaacgagcctcaaaatttgttctcgttgtggctgggtctgtgtgcttcatgctgatcctgtaccaatatgcaggccctggactgagcctaggcgcgcctgggggacgagccccaccggacgatctggacctatttcctactcctgacccacactacgagaagaagtactactttcctgtccgtgagctggagagatcacttcgcttcgacatgaaaggggacgacgtaatcgtattcctgcacatccagaaaacaggcgggaccacattcggaagacacctagtgcagaatgtcaggttagaggtgccatgcgattgtaggccaggccaaaaaaaatgcacctgctacaggccaaatcgacgggagacgtggctgttctcaaggttcagcacgggatggagttgcggattacatgcagattggacagaattgactaactgcgtgcctggggtgctggaccgccgggacagcgccgctctacgcaccccccgtaagttttactatataaccctgttgcgcgaccccgtgtcaagatacctgagcgaatggcggcatgttcagcgcggggctacttggaaaacaagcctgcatatgtgtgacgggaggacgcccacaccggaagagcttcctccatgttacgaagggaccgactggagcggctgcactttgcaggaatttatggattgcccttacaatttggccaacaatcggcaggtgagaatgctcgcagatctgtcactggttggttgctacaatctgagctttatccccgaggggaaaagagcccagttgctgctcgagtccgcaaaaaagaacctgagaggaatggccttcttcggcctgactgaatttcagcggaagacccagtatctgtttgaacggacattcaacctcaaatttattaggccatttatgcagtacaactccacaagagctggcggggtggaggtggacgaggatacaatccgaaggatcgaagagttgaacgatctggacatgcagctgtacgactacgccaaagacctcttccagcagaggtaccagtataagcgccaactggagcgaagagagcagcggctgagaagccgggaagaacgtttattacaccgcgcgaaggaagctctgcctcgcgaggacgccgacgagccaggcagagtccccaccgaggattatatgagtcacatcatcgaaaaatggtag

SEQ ID NO: 149937 - DNA, 3932 bp, Artificial Sequence
  derived and/or modified sequence
ggcgatggtgacacatgcggcggcggcgcgccggcggcaggaccatggttgagcgcgccagcaagttcgtgctggtggtggcgggctcggtgtgcttcatgctcatcttgtaccagtacgcgggcccaggactgagcctgggcgcgcccggcggccgcgcgccgcccgacgacctggacctgttccccacacccgacccccactacgagaagaagtactacttcccggtccgcgagctggagcgctcgctgcgcttcgacatgaagggcgacgacgtgatcgtcttcctgcacatccagaagacgggcggcaccaccttcggccgccacctcgtgcagaacgtacgcctcgaggtgccgtgcgactgccggcccggccagaagaagtgcacctgctaccggcccaaccgccgcgagacttggctcttctcccgcttctccaccggctggagctgcgggctgcacgccgactggaccgagctcaccaactgcgtgcccggcgtgctggaccgccgcgactccgccgcgctgcgcacgcccaggaagttctactacatcaccctgctacgagaccccgtgtcccgctacctgagcgagtggcggcatgtgcagaggggtgccacgtggaagacgtcgttgcatatgtgtgatgggcgcacgcccacgcctgaggagctgccgccctgctacgagggcacggactggtcgggctgcacgctacaggagttcatggactgcccgtacaacctggccaacaaccgccaggtgcgcatgctggccgacctgagcctggtgggctgctacaacctgtccttcatccccgagggcaagcgggcccagctgctgctcgagagcgccaagaagaacctgcggggcatggccttcttcggcctgaccgagttccagcgcaagacgcagtacctgttcgagcggacgttcaacctcaagttcatccggcccttcatgcagtacaatagcacgcgggcgggcggcgtggaggtggatgaagacaccatccggcgcatcgaggagctcaacgacctggacatgcagctgtacgactacgccaaggacctcttccagcagcgctaccagtacaagcggcagctggagcgcagggagcagcgcctgaggagccgcgaggagcgtctgctgcaccgggccaaggaggcactgccgcgggaggatgccgacgagccgggccgcgtgcccaccgaggactacatgagccacatcattgagaagtggtagtggcggtggtggccacggggaggcctcttggggggtgtgggggataaaacaggacagacgacaggtccacccaagactgtcaagggatgagcatcccaaacctgctccacagaggtagctgcgtcctgaaaaaaaacagagcagggatgtagtggggctgggcagggatgggggcttgagaaatcaacaggtgcagcccagtgggtcagaggaaagcgtgctcgaaggatgccatggtcagggcagggcctccagagcaggtgttgtgcctggagctgctctcctggcctccttggatttatcgcaaaaactgaaggtttgcgcaagagacgaggacagcggaaagtggacctgccaggccgggagtgtgtccctcaccaactatgcacacagcactcgctcttagctcctctgtccgggctactaggagtgagaccagcttctggcaactgccccagctccaggccatcccatagcccctcctcttctggctgcccccaatgccccgaggcctggggagcccccagctcacccatctgtagctccctcaaagtcagggcccaccccatctgaggcagagaagactcgagtccagcccccaggaagcctgctcccctctctggcccatggtcctgcttcatgctttgggtcaggaggccaaagctgatgttcaggccccacccactccctacagtcctcagaccaaggaggggtttgggtagtaggcccgagctgcattgccggccttcctcgggccaactggcagcccaggagtggggaggctttggccagggatgctgccacttgtgcgtgagtccgcggctggcccttggaggtgaccatccaggcaggcctggctcagactggaagggctggggaccgagggctcccctgcctctgttctcctttctgacccactgggatttgctagcaggctgccccagccccatcaccgaaacacatactcaagagctcaaataccactgctcccaccagcgtacggattaagttcatcaggcttccatcggctggagcatgggaccatagcccctgcccaggagccgtaccctcggaccacagtggctctgtatggccaggaactgggactcgagctttcagattctcaactagccttggcaaaacagctgtaggtggcctccctgacaacagacactcagccctccccaccctggctctccttgcatttccccatgctccccaccccctggcaaaaggctggccatgctctgttcccagcagccgcgcaggtttccccactggctgcaatggccctaccaaaagccatgttgcatatccgttgtaagcacgtgccctgtgccctgtccccattccttatgccctaggaggccaagctggtgtctctaggagggcccacacaggcaccctggatcccccagagagtagattggtgtgctcaggccgcaggctgactcagaggtagggcagtgggctctgcaggccacctggctggggttggtgggggtcctctctcctgccccagcttccactcagccaccacagttgccacaccatggggtggagacgtgggtcaccacgggcttgggagcaagcgccttctgcagcacaggaagccgaagctggggtcaggtgaggtcgctacccctggaggtctggcataagggccccaccctcaggtctcctacactggccccattttactttggggtccaaggacaggatggtcaacagggcagggtggacagcgtgccagcgccgcgcagggccacctccctgggtggatgcatcacactaaggaagtgagtgccaaggggatttagtggtgtggttctttcaaagggaggtcagggtcaatgggaatctgctcggacactcaacatgggggtgggtgcactccttggaggaggaggaacacgttcaggggattgtgaggtcttgcacaagccacgtggggcaccttggcttcccggcaggaggtggacacccagccagaggcctggctcaaggtgacctcaccttcaccatgggcttcctgggtgcgcgggcctgagcgcaggttgttttgtacatattggaatatgtgttaacttatgccccgcatcccaactcacacggaagcacgggtcttgtctcagtctcttcgctgcatttggaaagcagtctcctctcgggccagcgccgggctgaggtgtccagaggcggcggcagctggcagtgccctcagcccccaagtgtccagcctggcacttcccattcaggccacctgctttgggtcaacagttcctttgccagcagcatctcctaaattgtaaggactctgtccaccggggccctcccagggctgtgaggacggaaacaggcagggagtggagctaacagcttagtcaccaggacccccagacctgcaaacgtcccctcctggaaggggaagccaggaacagcagaactgcccacaaaacaaggctgtgaacttttcgggaactggaactgtttaacttgaacccaggattgtttaaagctttatttatttatagcttcttcttaaaaaaaagtgttgaagaaattttttggttattcatacaaaaaaatgagttgatgatggaaaagcaagtcataatcatctaattgtttttgtctaggtcgagaatgaatgttagctgatgaaataaaccctgacaagga

SEQ ID NO: 149938 - DNA, 1236 bp, Artificial Sequence
  derived and/or modified sequence
atgagaagaagaagagctgggggccgcaccatggtggagcgggccagcaagtttgtgctggtggtggccggctctgtgtgcttcatgctgatcctgtaccagtatgccggccctggcctgagcctgggcgcccctgggggccgggcccccccagatgacctggacctcttccccaccccagacccccactatgagaagaagtactacttccctgtgcgggagctggagaggagcctgcgctttgacatgaagggagatgatgtgattgtgttcctgcacatccagaagacaggaggcaccaccttcggccgccacctggtgcagaatgtgcggctggaggtgccctgtgactgccggcccggccagaagaagtgcacctgctaccggcccaacagaagagagacctggctgttcagccgcttcagcacaggctggagctgtggcctgcatgctgactggacagagctgaccaactgtgtgcctggggtgctggaccggcgggacagcgctgccctgcggacccccaggaagttctactacatcaccctgctgcgggaccctgtgagccgctacctgtctgagtggaggcatgtgcagagaggagccacctggaagaccagcctgcacatgtgtgatggccgcacccccaccccagaggagctgcccccctgctatgagggcacagactggagcggctgcaccctgcaggagttcatggactgcccctacaacctggccaacaaccggcaggtgaggatgctggccgacctgagcctggtgggctgctacaacctgtccttcatccctgagggcaagagggcccagctgctgctggagagcgccaagaagaacctgcggggcatggccttcttcggcctgacagagttccagaggaagacccagtacctgtttgagaggaccttcaacctgaagttcatccggcccttcatgcagtacaacagcacccgggccggcggcgtggaggtggatgaggacaccatcagaagaattgaggagctgaatgacctggacatgcagctgtatgactatgccaaggacctcttccagcagcgctaccagtacaagaggcagctggagcggcgggagcagaggctgcggagccgggaggagcggctgctgcaccgggccaaggaggccctgccccgggaggatgctgatgagcccggccgggtgcccacagaggactacatgagccacatcatcgagaagtggtag

SEQ ID NO: 149939 - DNA, 1236 bp, Artificial Sequence
  derived and/or modified sequence
atgcggcggcggcgggccggcggccggaccatggtggagcgggccagcaaattcgtcctcgtcgtcgccggcagcgtctgcttcatgctcatcctgtaccagtacgctggtccagggctgagcttgggcgccccaggtggtagagccccaccagatgacctggacttgtttccaacccctgatcctcactacgaaaaaaagtactatttccccgtccgggagctggagagatcactgcggttcgacatgaagggggatgatgtaatagttttcttacatatccagaagacaggaggaaccacttttggcagacatctggtacagaacgttcggctggaggttccgtgcgattgtcgacccggtcagaagaaatgtacatgttacagacctaatcgcagagagacctggctgttttcccgattcagtactgggtggtcctgtggcctgcacgctgattggaccgaactcaccaattgcgtgccaggagtgctggatagacgcgacagtgcggccctgagaacaccgcgcaagttttattatatcacactgctgcgcgaccctgtttcaaggtaccttagcgaatggcgacacgttcagagaggagccacctggaagacctccctacatatgtgtgacggcagaacccccactcctgaggagttgcctccctgctatgaaggaaccgactggtctgggtgcaccctgcaggagtttatggactgcccttataatctggccaataatcggcaggtgcggatgctggctgacttgtcattggtgggctgttacaacttgagtttcatcccggaggggaagagggctcaactcctcctggagtcagccaaaaagaacctgcgtgggatggccttttttgggctgaccgaattccagaggaagacacagtacctgttcgagcggaccttcaacttaaagtttatcagacctttcatgcagtacaattcaaccagggctggtggcgttgaggtcgatgaggatactattagaagaattgaagagctcaacgacctggatatgcagctatacgattacgccaaggacctgttccagcaacggtaccagtataagcggcagctagagcgaagggaacaacggctacggtcgagagaggaacgcctgctgcaccgcgccaaggaagccctcccccgggaggatgcagatgagccgggtagggtgcctactgaagattatatgtctcatattatcgagaagtggtag

SEQ ID NO: 149940 - DNA, 1236 bp, Artificial Sequence
  derived and/or modified sequence
atgcgcagacgccgtgcagggggtagaacgatggtcgaacgcgcttccaagttcgttctagtcgtggccggttccgtatgcttcatgctgatcctctaccagtacgctgggcctggacttagcctcggggctcccggaggtcgcgcaccccctgatgatcttgacctgttcccaacaccagaccctcattacgaaaaaaagtactattttcccgtgagagaactggaacgctcactacggttcgacatgaagggtgacgacgttattgttttcctccacatccagaagacagggggaaccacttttggaagacatctggtgcagaacgttagactcgaggtgccatgtgactgtaggcctggacagaaaaaatgcacctgctaccggccaaatcgtcgcgaaacttggttattctcccgttttagcacaggatggagttgtggcctccatgccgattggactgagctgacgaactgtgtgccgggagttctcgatagaagagacagcgctgccctacgaactccacgaaaattttactacattacattgctgcgcgaccctgtgagtaggtacctcagtgaatggaggcacgtccagagaggcgcaacttggaagacttccctgcatatgtgtgacggaaggactcccactcccgaggaactcccaccgtgttacgagggcactgactggtctgggtgcacgttacaggaatttatggactgcccatacaatctggccaacaatagacaggtccgcatgcttgctgacctctccctagtgggctgctataacctctcatttattcctgaagggaagcgggcacagttgctgttagagtcggctaagaagaatctgagaggcatggcgtttttcgggctgacagaatttcagcgcaagacacagtacctgtttgagcgcacattcaatctgaagttcataagacccttcatgcaatataattccacacgcgctggcggagtggaggtggatgaagatacaatacgcagaatcgaagaactgaacgacctagacatgcaactctacgactacgcaaaggatttatttcaacaacgataccaatacaaacggcagctcgaacgacgcgagcaacgcttgcggtcccgagaggaaagactgctgcacagggccaaagaggccctgcctagggaggatgccgacgagccaggccgagtgcctaccgaggattatatgagtcacatcatcgagaaatggtag

SEQ ID NO: 149941 - DNA, 1236 bp, Artificial Sequence
  derived and/or modified sequence
atgagaagaagaagagccggcggcagaaccatggtggagagagccagcaagttcgtgctggtggtggccggcagcgtgtgcttcatgctgatcctgtaccagtacgccggccccggcctgagcctgggcgcccccggcggcagagccccccccgacgacctggacctgttccccacccccgacccccactacgagaagaagtactacttccccgtgagagagctggagagaagcctgagattcgacatgaagggcgacgacgtgatcgtgttcctgcacatccagaagaccggcggcaccaccttcggcagacacctggtgcagaacgtgagactggaggtgccctgcgactgcagacccggccagaagaagtgcacctgctacagacccaacagaagagagacctggctgttcagcagattcagcaccggctggagctgcggcctgcacgccgactggaccgagctgaccaactgcgtgcccggcgtgctggacagaagagacagcgccgccctgagaacccccagaaagttctactacatcaccctgctgagagaccccgtgagcagatacctgagcgagtggagacacgtgcagagaggcgccacctggaagaccagcctgcacatgtgcgacggcagaacccccacccccgaggagctgcccccctgctacgagggcaccgactggagcggctgcaccctgcaggagttcatggactgcccctacaacctggccaacaacagacaggtgagaatgctggccgacctgagcctggtgggctgctacaacctgagcttcatccccgagggcaagagagcccagctgctgctggagagcgccaagaagaacctgagaggcatggccttcttcggcctgaccgagttccagagaaagacccagtacctgttcgagagaaccttcaacctgaagttcatcagacccttcatgcagtacaacagcaccagagccggcggcgtggaggtggacgaggacaccatcagaagaatcgaggagctgaacgacctggacatgcagctgtacgactacgccaaggacctgttccagcagagataccagtacaagagacagctggagagaagagagcagagactgagaagcagagaggagagactgctgcacagagccaaggaggccctgcccagagaggacgccgacgagcccggcagagtgcccaccgaggactacatgagccacatcatcgagaagtggtag

SEQ ID NO: 149942 - protein, 529 aa, Artificial Sequence
  derived and/or modified sequence
MAEDSESAASQQSLELDDQDTCGIDGDNEEETEHAKGSPGGYLGAKKKKKKQKRKKEKPNSGGTKSDSASDSQEIKIQQPSKHNTIWQQISAGAAMGSATMEGEWTGMRNDHKNPSVPMQKLQDIQRAMELLSACQGPARNIDEAAKHRYQFWDTQPVPKLDEVITSHGAIEPDKDNVRQEPYSLPQGFMWDTLDLSDAEVLKELYTLLNENYVEDDDNMFRFDYSPEFLLWALRPPGWLLQWHCGVRVSSNKKLVGFISAIPANIRIYDSVKKMVEINFLCVHKKLRSKRVAPVLIREITRRVNLEGIFQAVYTAGVVLPKPIATCRYWHRSLNPRKLVEVKFSHLSRNMTLQRTMKLYRLPDVTKTSGLRPMEPKDIKSVRELINTYLKQFHLAPVMDEEEVAHWFLPREHIIDTFVVESPNGKLTDFLSFYTLPSTVMHHPAHKSLKAAYSFYNIHTETPLLDLMSDALILAKSKGFDVFNALDLMENKTFLEKLKFGIGDGNLQYYLYNWRCPGTDSEKVGLVLQ

SEQ ID NO: 149943 - protein, 498 aa, Artificial Sequence
  derived and/or modified sequence
MAEDSESAASQQSLELDDQDTCGIDGDNEEETEHAKGSPGGYLGAKKKKKKQKRKKEKPNSGGTKSDSASDSQEIKIQQPSKNPSVPMQKLQDIQRAMELLSACQGPARNIDEAAKHRYQFWDTQPVPKLDEVITSHGAIEPDKDNVRQEPYSLPQGFMWDTLDLSDAEVLKELYTLLNENYVEDDDNMFRFDYSPEFLLWALRPPGWLLQWHCGVRVSSNKKLVGFISAIPANIRIYDSVKKMVEINFLCVHKKLRSKRVAPVLIREITRRVNLEGIFQAVYTAGVVLPKPIATCRYWHRSLNPRKLVEVKFSHLSRNMTLQRTMKLYRLPDVTKTSGLRPMEPKDIKSVRELINTYLKQFHLAPVMDEEEVAHWFLPREHIIDTFVVESPNGKLTDFLSFYTLPSTVMHHPAHKSLKAAYSFYNIHTETPLLDLMSDALILAKSKGFDVFNALDLMENKTFLEKLKFGIGDGNLQYYLYNWRCPGTDSEKVGLVLQ

SEQ ID NO: 149944 - protein, 310 aa, Artificial Sequence
  derived and/or modified sequence
MFRFDYSPEFLLWALRPPGWLLQWHCGVRVSSNKKLVGFISAIPANIRIYDSVKKMVEINFLCVHKKLRSKRVAPVLIREITRRVNLEGIFQAVYTAGVVLPKPIATCRYWHRSLNPRKLVEVKFSHLSRNMTLQRTMKLYRLPDVTKTSGLRPMEPKDIKSVRELINTYLKQFHLAPVMDEEEVAHWFLPREHIIDTFVVESPNGKLTDFLSFYTLPSTVMHHPAHKSLKAAYSFYNIHTETPLLDLMSDALILAKSKGFDVFNALDLMENKTFLEKLKFGIGDGNLQYYLYNWRCPGTDSEKVGLVLQ

SEQ ID NO: 149945 - DNA, 1590 bp, Artificial Sequence
  derived and/or modified sequence
atggctgaggattcggaaagcgccgcttcacaacaatctctggaactggacgatcaggacacctgcggcatagacggcgacaatgaggaggaaacagaacacgctaaaggttccccaggcggctacctgggggccaagaagaagaagaaaaaacaaaagaggaagaaagagaagccaaactccggggggaccaagtccgattcagcctccgactctcaggagataaagattcagcaaccaagcaaacataataccatctggcagcagattagcgcaggggcggcaatggggtcagcaactatggagggagaatggaccgggatgaggaacgatcataaaaacccctcagtgcccatgcagaagcttcaggacatccagagagccatggagttactttctgcatgccaggggccagcacgaaatatcgacgaagccgccaagcaccggtaccaattttgggatactcagcctgttcctaagctcgatgaagtaataacatcacacggggcaatagaaccagataaagacaacgtcagacaggagccctactccctgcctcaaggtttcatgtgggatacactggacctttccgatgcggaagtcctgaaggaactttacactttgttgaacgaaaactacgttgaagatgacgacaacatgttccggtttgactactccccagagttcttactctgggctctgaggcctccgggctggttgctgcagtggcattgtggagttcgggtgtcctccaataaaaagctcgttggatttattagtgctatccccgccaacatcagaatctacgactctgttaaaaaaatggtggagataaatttcttgtgtgtacataaaaaactgcggtctaaaagagtggctccagtgctgataagagagattacaaggcgggtgaacctggagggtatttttcaggctgtatatacggctggagtggtgctgcctaagcctattgcaacatgtcgctactggcatagatccctgaaccctagaaaattggtcgaagtgaagttctcccacctgagccgaaacatgactctgcagagaactatgaaactctaccgtctgcctgatgtcacgaaaacctcaggactccggcctatggaacccaaagatatcaaaagtgtcagagagttgataaacacctatctgaagcaatttcatctggcccccgtgatggacgaggaggaagttgcacactggtttcttccacgggaacacatcatagacactttcgttgtggagtcaccgaatggtaaactgactgatttcctatctttttatactctcccctccaccgttatgcatcatcctgcccacaagtccctcaaagctgcatattctttctataacatacacaccgaaacccccttgttggatctaatgagcgatgctttaatcctcgcaaagagcaaggggtttgatgtgtttaatgcactggacctgatggagaataagacctttcttgagaagctgaagttcgggatcggcgatgggaacctacaatattatctttacaactggcggtgccctggaacggattccgagaaggtgggcctggtcctccaatag

SEQ ID NO: 149946 - DNA, 1497 bp, Artificial Sequence
  derived and/or modified sequence
atggctgaagacagtgaatcggccgccagtcagcagtccctagagttggacgatcaagacacatgtggcatcgacggtgacaacgaagaagagacggaacacgctaagggaagcccgggtggctatctgggagccaagaaaaagaagaaaaagcaaaaacgtaagaaggagaaaccaaactccggtgggactaagagtgatagcgcctctgacagccaggagattaagatccaacagccgtcgaagaacccaagcgtaccgatgcagaagctacaggatatccagagagctatggagctgctgtccgcctgccagggcccggcgcggaacattgatgaggccgctaaacacagataccagttttgggacacccagccagtgcctaaactcgatgaggtcattaccagccacggagcaatcgaaccggataaagataatgtcagacaggaaccctatagcttacctcaggggttcatgtgggatacgcttgatctgtctgacgcagaagtgcttaaagaactgtacaccctactgaatgaaaattacgtagaggacgacgataacatgtttagatttgactactctccggagttcttactttgggctctgcggccaccagggtggctgcttcagtggcactgcggggtgcgggtgagttcaaacaaaaagttggtgggattcatcagtgcgattcctgcgaacatacgtatttacgattccgttaaaaaaatggtggagatcaacttcctgtgtgttcacaaaaagttgaggtctaagagggtggcaccggtgctgatcagagaaatcacaagaagggtaaacctcgaaggcatttttcaggctgtgtacacagccggcgtcgtgctgccaaagccaatcgccacgtgccggtattggcacaggtccctcaatcccaggaaactggtagaggtgaaattttcccacttgtcgaggaatatgaccctacaaaggacgatgaaactgtatcgtcttccggacgtgacaaagacctcaggactgcgcccgatggaaccgaaagacatcaaatccgtgcgggagctaattaacacgtacctgaagcagttccacctggcaccagtaatggatgaggaggaggtggcccactggttcctcccacgtgagcatataatcgacacgtttgttgttgagagtcccaacggcaagttgactgacttcttgtctttttacaccctaccttccacagttatgcaccaccctgcccataagtcgttgaaggctgcatactctttttacaatattcatacagaaaccccactattagacctcatgtcagacgccctgatcttggctaaaagcaagggctttgacgtgttcaacgctctcgacctgatggaaaataagacctttctcgagaagcttaagtttggcatcggggacggcaacttacagtactacctttacaattggcgatgtcccggcactgattctgagaaggttggactcgtccttcaatag

SEQ ID NO: 149947 - DNA, 1590 bp, Artificial Sequence
  derived and/or modified sequence
atggctgaagattctgagagcgctgccagccagcagagcctggagctggatgaccaggacacctgtggcattgatggagacaatgaggaggagacagagcacgccaagggcagccctgggggctacctgggcgccaagaagaagaagaagaagcagaagaggaagaaggagaagcccaacagcggcggcaccaagagtgacagcgccagtgacagccaggagatcaagatccagcagcccagcaagcacaacaccatctggcagcagatctctgctggggccgccatgggcagcgccaccatggagggggagtggacaggcatgagaaatgaccacaagaaccccagcgtgcccatgcagaagctgcaggacatccagagggccatggagctgctgagcgcctgccagggccctgccaggaacattgatgaagctgccaagcaccgctaccagttctgggacacccagcctgtgcccaagctggatgaggtgatcaccagccacggggccattgaaccagacaaggacaacgtgcggcaggagccctacagcctgccccagggcttcatgtgggacaccctggacctgagtgatgctgaggtgctgaaggagctgtacaccctgctgaatgaaaattatgtggaggatgatgacaacatgttccgctttgactacagccctgagttcctgctgtgggccctgcggcccccaggctggctgctgcagtggcactgcggcgtgcgggtgagcagcaacaagaagctggtgggcttcatcagcgccatcccagccaacatccgcatctatgattctgtgaagaagatggtggagatcaacttcctgtgtgtgcacaagaagctgcggagcaagagggtggcccctgtgctgatccgggagatcacccggcgggtgaacctggagggcatcttccaggccgtgtacacagctggggtggtgctgcccaagcccatcgccacctgccgctactggcacaggagcctgaaccccaggaagctggtggaggtgaagttcagccacctgagcaggaacatgaccctgcagaggaccatgaagctgtaccgcctgcctgatgtgaccaagaccagcggcctgcggcccatggagcccaaggacatcaagtctgtgcgggagctgatcaacacctacctgaagcagttccacctggcccctgtgatggatgaggaggaggtggcccactggttcctgccccgggagcacatcatcgacacctttgtggtggagagccccaacgggaagctgacagacttcctgtccttctacaccctgcccagcacagtgatgcaccacccagcccacaagagcctgaaggccgcctacagcttctacaacatccacacagagacccccctgctggacctgatgtctgatgccctgatcctggccaagagcaagggctttgatgtgttcaatgccctggacctgatggagaacaagaccttcctggagaagctgaagtttggaattggagatggcaacctgcagtactacctgtacaactggcgctgccctggaacagattctgagaaggtgggcctggtgctgcagtag

SEQ ID NO: 149948 - DNA, 1497 bp, Artificial Sequence
  derived and/or modified sequence
atggctgaagattctgagagcgctgccagccagcagagcctggagctggatgaccaggacacctgtggcattgatggagacaatgaggaggagacagagcacgccaagggcagccctgggggctacctgggcgccaagaagaagaagaagaagcagaagaggaagaaggagaagcccaacagcggcggcaccaagagtgacagcgccagtgacagccaggagatcaagatccagcagcccagcaagaaccccagcgtgcccatgcagaagctgcaggacatccagagggccatggagctgctgagcgcctgccagggccctgccagaaatattgatgaggccgccaagcaccgctaccagttctgggacacccagcctgtgcccaagctggatgaagtcatcaccagccatggagccatcgagccagacaaggacaacgtgcggcaggagccctacagcctgccccagggcttcatgtgggacaccctggacctgagtgatgctgaggtgctgaaggagctgtacaccctgctgaatgaaaactacgtggaggatgatgacaacatgttccgctttgactacagccctgagttcctgctgtgggccctgcggcccccaggctggctgctgcagtggcactgcggcgtgcgggtgagcagcaacaagaagctggtgggcttcatcagcgccatcccagccaacatccgcatctatgacagcgtgaagaagatggtggagatcaacttcctgtgtgtgcacaagaagctgcggagcaagagggtggcccctgtgctgatccgggagatcaccaggagagtgaacctggagggcatcttccaggccgtgtacacagctggggtggtgctgcccaagcccatcgccacctgccgctactggcacaggagcctgaaccccaggaagctggtggaggtgaagttcagccacctgagcaggaacatgaccctgcagaggaccatgaagctgtaccgcctgcctgatgtgaccaagaccagcggcctgcggcccatggagcccaaggacatcaagtctgtgcgggagctgatcaacacctacctgaagcagttccacctggcccctgtgatggatgaggaggaggtggcccactggttcctgccccgggagcacatcatcgacacctttgtggtggagagccccaacgggaagctgacagacttcctgtccttctacaccctgcccagcacagtgatgcaccacccagcccacaagagcctgaaggccgcctacagcttctacaacatccacacagagacccccctgctggacctgatgtctgatgccctgatcctggccaagagcaaaggatttgatgtgttcaatgccctggacctgatggagaacaagaccttcctggagaagctgaagtttggaattggagatggcaacctgcagtactacctgtacaactggcgctgccccggcacagacagcgagaaggtgggcctggtgctgcagtag

SEQ ID NO: 149949 - DNA, 1590 bp, Artificial Sequence
  derived and/or modified sequence
atggccgaggacagcgagagcgccgccagccagcagagcctggagttggacgatcaagacacgtgcggaatagatggcgataacgaggaggagactgagcatgcaaaaggcagtcccggaggatacctcggggccaagaagaaaaagaagaagcagaagcgaaagaaagagaaacctaatagcgggggcaccaagtccgacagcgcttctgattcacaggagattaaaattcagcaaccttcgaaacacaacacaatctggcaacagattagcgctggggcggctatgggttcagcaactatggaaggagagtggaccggaatgcgcaatgaccacaagaacccgtccgtgcccatgcagaagctccaggacatccagagagccatggagctgctgtctgcctgtcagggaccagctcggaacatcgatgaagctgccaagcatcggtaccaattctgggatactcagccagtgccaaagttggatgaggtgataacctcacacggggctattgaacccgacaaggataacgttagacaggaaccgtactcccttccacaaggctttatgtgggatactctggacctctctgatgccgaggtgcttaaggagttgtacaccttgctcaacgaaaactacgtggaggacgacgacaatatgttcaggttcgactattcacccgagttcctcctttgggccttgcgacctcccggctggctcctgcagtggcactgtggcgtgcgtgtgagctcaaataaaaaacttgtgggcttcatttccgccatacctgcaaacatacggatatacgattccgtgaaaaagatggtggagatcaatttcctgtgcgtgcataaaaaattacgctctaagcgtgtcgccccagtcctgatacgtgagatcacgagacgcgttaacctggagggcatcttccaagccgtgtataccgccggcgtggtcctccctaagcccatcgctacttgtaggtactggcaccggtcattgaaccctcgcaaactcgttgaggtgaaatttagtcacctaagccgcaatatgacgctccagcgaactatgaagttatataggctgccagacgtgaccaagacctccggattgcgccctatggaacctaaagacattaagtcagtgagggagctcattaacacatatctcaagcagtttcacctggcacccgttatggatgaagaggaagtggcacattggttcctgccgagggagcatatcattgatacattcgtcgttgagtctcccaatggaaaattgacagactttctttccttttacacgctgccttccacggtcatgcaccaccctgcccacaaaagcctgaaggccgcatatagtttttacaacatacacactgaaaccccgttgcttgatcttatgagcgatgccctgatcctagccaagtccaaagggttcgacgtatttaatgctttggacctgatggagaataagacattcctagaaaagctgaagtttgggatcggtgacggaaacttacagtattacttatataattggaggtgtccaggcactgattccgagaaggttgggctcgtgctccaatag

SEQ ID NO: 149950 - DNA, 1497 bp, Artificial Sequence
  derived and/or modified sequence
atggccgaggacagcgagagcgccgccagccagcagagcctggagctcgatgaccaggacacctgtggaatcgacggagataatgaggaggagactgaacacgctaagggatcacctggtgggtatctgggcgccaaaaaaaagaaaaaaaaacagaagcgcaagaaagagaagccaaacagtggaggaacaaagagcgacagtgcatccgactctcaggaaattaagatacagcaaccctcaaagaatccctccgtacccatgcagaagctgcaggatattcagcgcgcgatggaacttctgtcagcatgccaagggcccgctcggaatattgacgaggcagcaaaacacaggtatcaattttgggatacccagcctgtccctaaactggatgaggtgattactagccacggcgcaatcgaaccagataaggacaacgtgaggcaagagccttactctctgccccagggatttatgtgggacacattggatctgagcgatgctgaagtgctaaaggagctctatacactgctgaatgaaaattacgtagaggacgacgacaacatgttcaggtttgactacagcccggaatttctcctctgggcactgagacccccagggtggctgttgcagtggcattgcggggtcagagtgagctcaaacaagaaattggtaggatttatctccgccattccagccaacatcagaatatatgacagcgttaagaagatggtcgagattaatttcctgtgcgtgcacaaaaagctgcggtcaaagagggtcgctcctgttttgattagggagattacccgaagggtgaatctcgaagggatctttcaggccgtgtacacagcaggggtggtcctgccaaagccaattgccacatgccgttattggcataggagcctgaacccaaggaaactggtggaggttaaatttagccacctctctcgcaatatgacacttcagaggactatgaagttgtaccgcctgcccgacgtgaccaagactagtggcctgcggcccatggagcccaaggatatcaaatccgtccgggagctcatcaacacctacctaaagcagtttcacctcgcccccgtcatggatgaggaggaggtcgctcattggtttctccccagggaacatattattgacacctttgtcgtggagtcacccaatggaaagttgacagacttcttgtccttctacacgcttccatctactgtgatgcaccatcctgcccacaaatctctaaaggccgcttattccttctacaacatccataccgaaactcctctccttgatctcatgtcagatgccctgatactggctaagtctaagggatttgatgtttttaacgctctggacctcatggagaacaagaccttcctcgaaaagctgaagtttggcatcggagatggaaatctgcagtactacctctacaactggcggtgcccgggaaccgatagcgagaaagtgggtcttgtgctccaatag

SEQ ID NO: 149951 - DNA, 1844 bp, Artificial Sequence
  derived and/or modified sequence
agccagcgccgccgcgatggcggaggacagcgagtctgcggccagccagcagagcctggaactggacgaccaggacacgtgcgggatagacggggacaatgaggaggagacggagcacgccaaaggaagtcctggagggtatttgggagccaaaaagaaaaagaagaaacagaagagaaaaaaggagaaaccaaattccggaggcaccaagtcagactcggcatctgattcccaggagattaaaattcagcagccttcgaaacacaacaccatctggcagcagatttcagcgggagcagccatgggtagtgctactatggaaggtgaatggacaggcatgagaaatgatcataagaatcccagtgttccaatgcagaagttgcaggatatccagagagcaatggagctgctatccgcatgccagggcccagccaggaacattgatgaggctgcaaagcacagataccagttttgggacacacaaccggtaccaaaactagatgaagtcataacatctcatggtgcaattgaaccagataaagacaacgtacgccaagaaccgtattctttgccacagggttttatgtgggacactttagacttgagtgatgccgaagtgctcaaggagttatacacgttgttaaatgagaattacgtagaagatgatgacaatatgttccgatttgactattcacccgagttcctgttgtgggctctgcgtccaccaggctggctcctgcagtggcactgtggggtcagagtgtcttcaaataaaaaactggtcgggttcataagtgccatcccagcaaacattcggatttatgacagtgtgaagaagatggtagaaatcaactttctttgtgttcataagaagttgagatcgaaacgggtagccccagtgctaatccgagagatcactagaagagtgaacctggaagggatcttccaggctgtgtacaccgcgggagtggttcttcctaagcccatagccacatgcagatactggcatcgatcactaaaccccagaaaattggtagaagtgaaattttctcacttgagtagaaatatgactttacagagaacaatgaagctatacagacttccagatgttacaaagacttcaggtttgagaccaatggaaccaaaagatatcaaatcagttcgagaattaatcaacacttacctgaagcagtttcatctggctccagtgatggatgaagaggaagtagcccactggttcctcccccgggagcacattattgacacgtttgtagtggagagccccaacggtaaactgactgatttcctgagcttctatacgctcccctccacggtgatgcaccaccctgctcacaagagcctcaaagccgcctactcattctacaacatccacacagagacgcccctgctggacctcatgagcgacgcgctcatcctggctaaatcgaaaggatttgatgtattcaatgcactggatttgatggaaaataagacattcttggaaaaactcaagtttggtataggagatggcaatttgcagtattacctgtacaattggaggtgtccaggtacagattctgaaaaggttggactagtactacaatagatggatatttttatttctagaactctgacatcatcatttgttaatatttaatgatttctggaactgccattccaaagaagaataaaagcacaactcaagtgaaattgaagtagtcgataatcagaaaagatgacaaaagtccacatgtgacatttgtacgtttctagctagaatgttaaacttcatcctttttttactgttgacctatttgtgggagggatgaaaggctacaaagagc

SEQ ID NO: 149952 - DNA, 2869 bp, Artificial Sequence
  derived and/or modified sequence
agtacggcgggaggcactagagggagctgcggccgctccggcccggccccgagcaccgcctccccagccagcgccgccgcgatggcggaggacagcgagtctgcggccagccagcagagcctggaactggacgaccaggacacgtgcgggatagacggggacaatgaggaggagacggagcacgccaaaggaagtcctggagggtatttgggagccaaaaagaaaaagaagaaacagaagagaaaaaaggagaaaccaaattccggaggcaccaagtcagactcggcatctgattcccaggagattaaaattcagcagccttcgaaaaatcccagtgttccaatgcagaagttgcaggatatccagagagcaatggagctgctatccgcatgccagggcccagccaggaacattgatgaggctgcaaagcacagataccagttttgggacacacaaccggtaccaaaactagatgaagtcataacatctcatggtgcaattgaaccagataaagacaacgtacgccaagaaccgtattctttgccacagggttttatgtgggacactttagacttgagtgatgccgaagtgctcaaggagttatacacgttgttaaatgagaattacgtagaagatgatgacaatatgttccgatttgactattcacccgagttcctgttgtgggctctgcgtccaccaggctggctcctgcagtggcactgtggggtcagagtgtcttcaaataaaaaactggtcgggttcataagtgccatcccagcaaacattcggatttatgacagtgtgaagaagatggtagaaatcaactttctttgtgttcataagaagttgagatcgaaacgggtagccccagtgctaatccgagagatcactagaagagtgaacctggaagggatcttccaggctgtgtacaccgcgggagtggttcttcctaagcccatagccacatgcagatactggcatcgatcactaaaccccagaaaattggtagaagtgaaattttctcacttgagtagaaatatgactttacagagaacaatgaagctatacagacttccagatgttacaaagacttcaggtttgagaccaatggaaccaaaagatatcaaatcagttcgagaattaatcaacacttacctgaagcagtttcatctggctccagtgatggatgaagaggaagtagcccactggttcctcccccgggagcacattattgacacgtttgtagtggagagccccaacggtaaactgactgatttcctgagcttctatacgctcccctccacggtgatgcaccaccctgctcacaagagcctcaaagccgcctactcattctacaacatccacacagagacgcccctgctggacctcatgagcgacgcgctcatcctggctaaatcgaaaggatttgatgtattcaatgcactggatttgatggaaaataagacattcttggaaaaactcaagtttggtataggagatggcaatttgcagtattacctgtacaattggaggtgtccaggtacagattctgaaaaggttggactagtactacaatagatggatatttttatttctagaactctgacatcatcatttgttaatatttaatgatttctggaactgccattccaaagaagaataaaagcacaactcaagtgaaattgaagtagtcgataatcagaaaagatgacaaaagtccacatgtgacatttgtacgtttctagctagaatgttaaacttcatcctttttttactgttgacctatttgtgggagggatgaaaggctacaaagagcacattcttgtaattttcaaatttttgcctgtctcttgaagaggtattttttcacccttagaaaagggactgtttttctatggactaagtagaagttacagagtcatgtaagaaaatctttgctattgtgtggagagaaattgctgcatttctgtttcttaagtgatggtacatttgtccatgtaacagaacaaaagatccatttggaaattttttttactggtatcaccttacatggtatcactgggaacatttatggaatcaacacttctgtagctcagtgacaggtggtggttgtttaagtgcagagcaatattaaaatgtactggtgactagtacatgtatttctccataagcagagttgccgaatcaataaacatgcaagtttgtactttgatctttaccaggtcagtggattgcttcaaaagcagagttttgtgcaagcactcactgtgctctctgaaagagcctgaggccgggcgtggtggctcacgcctgtaatcccagcactttgggaggccaaggtgggcagatcatgaggtcaggagatcgagaccattctggccaacatagtgaaaccccatctctactaaaaatacaaaaattagccgggcgtggtggcgtgtgcctgtagtcccagctgcttgggaggctgaggcaggagaatcgcttgaacctgagaggtgaggttgcagtgagccgagatcgagccactgcactccagcctgggtgacagagcgtgagactccgtctcaaaaaaaaaaaaaaagaaagagcctgtacccgcgactaactagacttttctgctgttgtgcaaagttcagtttcttctcagcaacatcaaggatatatgaagaaaaggaaataaaaaactgtaaagtcaaaagagatgcctggtggaacttattcgtgctatcagggcattgatagtttgaatgtttttattacttatgcaaaattgcacatactcctctatgctgattttatcatgaaaactgtcatgtgtcatgctaatggaaaatgtcttatttgtaaataagtattcataattttg

SEQ ID NO: 149953 - DNA, 1554 bp, Artificial Sequence
  derived and/or modified sequence
agcgccgccgcgatggcggaggacagcgagtctgcggccagccagcagagcctggaactggacgaccaggacacgtgcgggatagacggggacaatgaggaggagacggagcacgccaaaggaagtcctggagggtatttgggagccaaaaagaaaaagaagaaacagaagagaaaaaaggagaaaccaaattccggaggcaccaagtcagactcggcatctgattcccaggagattaaaattcagcagccttcgaaaaatcccagtgttccaatgcagaagttgcaggatatccagagagcaatggagctgctatccgcatgccagggcccagccaggaacattgatgaggctgcaaagcacagataccagttttgggacacacaaccggtaccaaaactagatgaagtcataacatctcatggtgcaattgaaccagataaagacaacgtacgccaagaaccgtattctttgccacagggttttatgtgggacactttagacttgagtgatgccgaagtgctcaaggagttatacacgttgttaaatgagaattacgtagaagatgatgacaatatgttccgatttgactattcacccgagttcctgttgtgggctctgcgtccaccaggctggctcctgcagtggcactgtggggtcagagtgtcttcaaataaaaaactggtcgggttcataagtgccatcccagcaaacattcggatttatgacagtgtgaagaagatggtagaaatcaactttctttgtgttcataagaagttgagatcgaaacgggtagccccagtgctaatccgagagatcactagaagagtgaacctggaagggatcttccaggctgtgtacaccgcgggagtggttcttcctaagcccatagccacatgcagatactggcatcgatcactaaaccccagaaaattggtagaagtgaaattttctcacttgagtagaaatatgactttacagagaacaatgaagctatacagacttccagatgttacaaagacttcaggtttgagaccaatggaaccaaaagatatcaaatcagttcgagaattaatcaacacttacctgaagcagtttcatctggctccagtgatggatgaagaggaagtagcccactggttcctcccccgggagcacattattgacacgtttgtagtggagagccccaacggtaaactgactgatttcctgagcttctatacgctcccctccacggtgatgcaccaccctgctcacaagagcctcaaagccgcctactcattctacaacatccacacagagacgcccctgctggacctcatgagcgacgcgctcatcctggctaaatcgaaaggatttgatgtattcaatgcactggatttgatggaaaataagacattcttggaaaaactcaagtttggtataggagatggcaatttgcagtattacctgtacaattggaggtgtccaggtacagattctgaaaagggctctggtaacttcgttaacgccaatggcaagctgcttcctgacgtgtgcaggcgtccaccctga

SEQ ID NO: 149954 - DNA, 1832 bp, Artificial Sequence
  derived and/or modified sequence
gaatttgttactgctcacgcctttctgtgggtcatggcttcctctgcttctgagagtgtctcctgatctttcttctcctcttctctaagttcaagttgctctcacctcatctccccagccctctgctcgggaagaccctcattctcctgccccaagctgtggctcctagagaagtcctggagggtatttgggagccaaaaagaaaaagaagaaacagaagagaaaaaaggagaaaccaaattccggaggcaccaagtcagactcggcatctgattcccaggagattaaaattcagcagccttcgaaaaatcccagtgttccaatgcagaagttgcaggatatccagagagcaatggagctgctatccgcatgccagggcccagccaggaacattgatgaggctgcaaagcacagataccagttttgggacacacaaccggtaccaaaactagatgaagtcataacatctcatggtgcaattgaaccagataaagacaacgtacgccaagaaccgtattctttgccacagggttttatgtgggacactttagacttgagtgatgccgaagtggtgagtgagtaaaaacctcttaaattcaactcctgcattcacacattgcttctaagttgattctgagcaccatggataggacacttgttttatcttatagctcaaggagttatacacgttgttaaatgagaattacgtagaagatgatgacaatatgttccgatttgactattcacccgagttcctgttgtgggctctgcgtccaccaggctggctcctgcagtggcactgtggggtcagagtgtcttcaaataaaaaactggtcgggttcataagtgccatcccagcaaacattcggatttatgacagtgtgaagaagatggtagaaatcaactttctttgtgttcataagaagttgagatcgaaacgggtagccccagtgctaatccgagagatcactagaagagtgaacctggaagggatcttccaggctgtgtacaccgcgggagtggttcttcctaagcccatagccacatgcagatactggcatcgatcactaaaccccagaaaattggtagaagtgaaattttctcacttgagtagaaatatgactttacagagaacaatgaagctatacagacttccagatgttacaaagacttcaggtttgagaccaatggaaccaaaagatatcaaatcagttcgagaattaatcaacacttacctgaagcagtttcatctggctccagtgatggatgaagaggaagtagcccactggttcctcccccgggagcacattattgacacgtttgtagtggagagccccaacggtaaactgactgatttcctgagcttctatacgctcccctccacggtgatgcaccaccctgctcacaagagcctcaaagccgcctactcattctacaacatccacacagagacgcccctgctggacctcatgagcgacgcgctcatcctggctaaatcgaaaggatttgatgtattcaatgcactggatttgatggaaaataagacattcttggaaaaactcaagtttggtataggagatggcaatttgcagtattacctgtacaattggaggtgtccaggtacagattctgaaaaggttggactagtactacaatagatggatatttttatttctagaactctgacatcatcatttgttaatatttaatgatttctggaactgccattccaaagaagaataaaagcacaactcaagtgaaattgaagtagtcgataatcagaaaagatgacaaaagtccacatgtgacatttgtacgtttctagctagaat

SEQ ID NO: 149955 - DNA, 1590 bp, Artificial Sequence
  derived and/or modified sequence
atggctgaagattccgagtctgcagcaagtcaacagtctctggaacttgacgatcaggatacctgcgggatcgacggcgacaatgaggaggaaactgagcacgccaaaggtagtcctggagggtacttaggcgctaaaaagaagaagaaaaagcagaagcggaaaaaagagaagccaaattccggaggtaccaaaagcgactcagcatcagattctcaggagattaagatccaacaaccaagcaaacacaacacgatctggcagcagataagcgcaggcgctgcaatgggtagcgccacaatggaaggcgaatggaccgggatgaggaacgaccataagaatcctagcgtgcctatgcagaaactacaggacattcagagggccatggaactgttgtctgcctgccaaggcccagccagaaacatcgacgaggccgctaaacaccgttatcagttttgggacacccagccggtaccgaaactcgatgaggttataacatcccatggggctattgaacctgataaagataatgtcaggcaggaaccttactctttgcctcagggctttatgtgggacaccctggacttgagtgatgccgaggtgctgaaagaactgtatactcttctcaacgaaaactacgttgaagacgatgataatatgttccggttcgactattctccagagtttttgctgtgggcactgcggccacccggatggctgcttcaatggcactgcggagtccgcgtaagcagtaataagaaactcgtaggctttatctcagctataccagctaatataaggatctacgactctgttaaaaaaatggtggaaattaactttctgtgcgtgcacaagaagctgcgcagtaagagggtggcacccgttctcattagagagataacccgtcgcgttaacctggagggcatcttccaggcggtgtacacagcaggcgtcgttttgcccaagccgattgctacatgcagatattggcacaggtcacttaaccctcgcaagctcgtggaggtgaagttctcccatctttcacgaaatatgaccctgcaacggaccatgaaactctaccgactgcccgacgtcaccaaaacatccgggctcaggcccatggaaccgaaggacatcaagtccgtccgtgaactcattaacacatatcttaagcagttccatctggcccctgtgatggacgaagaagaggttgcccattggttcctaccccgagagcacatcattgacacctttgtggttgagagcccgaacgggaagctcactgattttcttagcttttacactctccccagcacggttatgcatcaccccgctcataagtcccttaaggcagcgtattcattttacaatatccacactgagactcccctgttggatctgatgtctgacgcactgattctggcgaagtccaaaggtttcgacgtcttcaatgctctggacttgatggagaacaaaacatttctggaaaagctgaaattcggaatcggcgatggaaaccttcaatactatctttacaactggaggtgcccaggcacagatagcgagaaggtcgggcttgtgctacagtag

SEQ ID NO: 149956 - DNA, 1497 bp, Artificial Sequence
  derived and/or modified sequence
atggccgaggacagcgagtcggctgcctcacaacagtcactggagttggatgaccaggatacttgtgggatagacggcgacaatgaggaggagacagaacatgccaaggggagtccagggggttacctcggagccaagaaaaagaaaaaaaagcagaaaaggaaaaaagaaaagcccaacagtggtggtaccaagtctgatagcgccagcgacagtcaggagattaaaatccagcagccatcgaaaaacccgtctgtgcccatgcagaagcttcaggatatccaacgcgctatggagcttcttagtgcctgccaggggccagcccgtaatatcgacgaagctgccaaacaccgctaccagttctgggacacacaaccagtgcccaaacttgatgaagttatcaccagtcacggcgcaattgagccagataaggacaatgtgcgccaagaaccttattccctgcctcaggggttcatgtgggacactctggatttgagtgacgctgaggtcctcaaagagctgtacaccctgctcaatgaaaattacgtcgaggacgacgacaacatgttcaggtttgactatagtcctgaattcctgctctgggctctgcgtccaccaggatggttactgcagtggcattgcggtgtgcgcgtgtccagcaacaagaagctggtcgggtttatcagcgcaatcccggcaaatattcgcatctatgatagcgtaaaaaagatggtggagataaattttctctgcgtccataaaaagcttcgcagcaaacgggtcgctccagtacttataagagagattacaaggagagtgaatctcgagggcatcttccaggccgtgtacactgctggggtggtgcttccaaagcccattgccacttgtaggtattggcacagatcccttaacccacggaagctcgtggaggtgaagttctctcacctgtcacggaacatgaccctgcagcgaactatgaaactgtaccggctgccggacgtgacgaaaacctctggactgaggcccatggagcccaaagatattaaaagtgttagagaactgatcaacacttacctgaaacaattccacctagcacccgtcatggacgaggaggaagtggcgcattggtttctcccccgtgagcatatcatcgacacctttgtcgtagaaagtcccaacggcaagctaactgacttcctttctttttatacgcttcccagcacggttatgcaccatcccgctcacaagagcttaaaagccgcatactcattttataatatccatactgaaaccccattgttagatctcatgagcgatgctctgatactggcgaaaagtaagggctttgacgttttcaatgcattggatctgatggaaaacaagactttcttggagaagctcaagttcggcatcggcgacggcaatctacaatactacctgtacaattggagatgtcccggtactgacagtgaaaaggtggggctggtgctacagtag

SEQ ID NO: 149957 - DNA, 1590 bp, Artificial Sequence
  derived and/or modified sequence
atggccgaggacagcgagagcgccgccagccagcagagcctggagctggacgaccaggacacctgcggcatcgacggcgacaacgaggaggagaccgagcacgccaagggcagccccggcggctacctgggcgccaagaagaagaagaagaagcagaagagaaagaaggagaagcccaacagcggcggcaccaagagcgacagcgccagcgacagccaggagatcaagatccagcagcccagcaagcacaacaccatctggcagcagatcagcgccggcgccgccatgggcagcgccaccatggagggcgagtggaccggcatgagaaacgaccacaagaaccccagcgtgcccatgcagaagctgcaggacatccagagagccatggagctgctgagcgcctgccagggccccgccagaaacatcgacgaggccgccaagcacagataccagttctgggacacccagcccgtgcccaagctggacgaggtgatcaccagccacggcgccatcgagcccgacaaggacaacgtgagacaggagccctacagcctgccccagggcttcatgtgggacaccctggacctgagcgacgccgaggtgctgaaggagctgtacaccctgctgaacgagaactacgtggaggacgacgacaacatgttcagattcgactacagccccgagttcctgctgtgggccctgagaccccccggctggctgctgcagtggcactgcggcgtgagagtgagcagcaacaagaagctggtgggcttcatcagcgccatccccgccaacatcagaatctacgacagcgtgaagaagatggtggagatcaacttcctgtgcgtgcacaagaagctgagaagcaagagagtggcccccgtgctgatcagagagatcaccagaagagtgaacctggagggcatcttccaggccgtgtacaccgccggcgtggtgctgcccaagcccatcgccacctgcagatactggcacagaagcctgaaccccagaaagctggtggaggtgaagttcagccacctgagcagaaacatgaccctgcagagaaccatgaagctgtacagactgcccgacgtgaccaagaccagcggcctgagacccatggagcccaaggacatcaagagcgtgagagagctgatcaacacctacctgaagcagttccacctggcccccgtgatggacgaggaggaggtggcccactggttcctgcccagagagcacatcatcgacaccttcgtggtggagagccccaacggcaagctgaccgacttcctgagcttctacaccctgcccagcaccgtgatgcaccaccccgcccacaagagcctgaaggccgcctacagcttctacaacatccacaccgagacccccctgctggacctgatgagcgacgccctgatcctggccaagagcaagggcttcgacgtgttcaacgccctggacctgatggagaacaagaccttcctggagaagctgaagttcggcatcggcgacggcaacctgcagtactacctgtacaactggagatgccccggcaccgacagcgagaaggtgggcctggtgctgcagtag

SEQ ID NO: 149958 - DNA, 1497 bp, Artificial Sequence
  derived and/or modified sequence
atggccgaggacagcgagagcgccgccagccagcagagcctggagctggacgaccaggacacctgcggcatcgacggcgacaacgaggaggagaccgagcacgccaagggcagccccggcggctacctgggcgccaagaagaagaagaagaagcagaagagaaagaaggagaagcccaacagcggcggcaccaagagcgacagcgccagcgacagccaggagatcaagatccagcagcccagcaagaaccccagcgtgcccatgcagaagctgcaggacatccagagagccatggagctgctgagcgcctgccagggccccgccagaaacatcgacgaggccgccaagcacagataccagttctgggacacccagcccgtgcccaagctggacgaggtgatcaccagccacggcgccatcgagcccgacaaggacaacgtgagacaggagccctacagcctgccccagggcttcatgtgggacaccctggacctgagcgacgccgaggtgctgaaggagctgtacaccctgctgaacgagaactacgtggaggacgacgacaacatgttcagattcgactacagccccgagttcctgctgtgggccctgagaccccccggctggctgctgcagtggcactgcggcgtgagagtgagcagcaacaagaagctggtgggcttcatcagcgccatccccgccaacatcagaatctacgacagcgtgaagaagatggtggagatcaacttcctgtgcgtgcacaagaagctgagaagcaagagagtggcccccgtgctgatcagagagatcaccagaagagtgaacctggagggcatcttccaggccgtgtacaccgccggcgtggtgctgcccaagcccatcgccacctgcagatactggcacagaagcctgaaccccagaaagctggtggaggtgaagttcagccacctgagcagaaacatgaccctgcagagaaccatgaagctgtacagactgcccgacgtgaccaagaccagcggcctgagacccatggagcccaaggacatcaagagcgtgagagagctgatcaacacctacctgaagcagttccacctggcccccgtgatggacgaggaggaggtggcccactggttcctgcccagagagcacatcatcgacaccttcgtggtggagagccccaacggcaagctgaccgacttcctgagcttctacaccctgcccagcaccgtgatgcaccaccccgcccacaagagcctgaaggccgcctacagcttctacaacatccacaccgagacccccctgctggacctgatgagcgacgccctgatcctggccaagagcaagggcttcgacgtgttcaacgccctggacctgatggagaacaagaccttcctggagaagctgaagttcggcatcggcgacggcaacctgcagtactacctgtacaactggagatgccccggcaccgacagcgagaaggtgggcctggtgctgcagtag

SEQ ID NO: 149959 - protein, 398 aa, Artificial Sequence
  derived and/or modified sequence
MLGRSGYRALPLGDFDRFQQSSFGFLGSQKGCLSPERGGVGTGADVPQSWPSCLCHGLISFLGFLLLLVTFPISGWFALKIVPTYERMIVFRLGRIRTPQGPGMVLLLPFIDSFQRVDLRTRAFNVPPCKLASKDGAVLSVGADVQFRIWDPVLSVMTVKDLNTATRMTAQNAMTKALLKRPLREIQMEKLKISDQLLLEINDVTRAWGLEVDRVELAVEAVLQPPQDSPAGPNLDSTLQQLALHFLGGSMNSMAGGAPSPGPADTVEMVSEVEPPAPQVGARSSPKQPLAEGLLTALQPFLSEALVSQVGACYQFNVVLPSGTQSAYFLDLTTGRGRVGHGVPDGIPDVVVEMAEADLRALLCRELRPLGAYMSGRLKVKGDLAMAMKLEAVLRALK

SEQ ID NO: 149960 - DNA, 1197 bp, Artificial Sequence
  derived and/or modified sequence
atgctgggcagaagcggctacagagccctgcccctgggcgacttcgacagattccagcagagcagcttcggcttcctgggcagccagaagggctgcctgagccccgagagaggcggcgtgggcaccggcgccgacgtgccccagagctggcccagctgcctgtgccacggcctgatcagcttcctgggcttcctgctgctgctggtgaccttccccatcagcggctggttcgccctgaagatcgtgcccacctacgagagaatgatcgtgttcagactgggcagaatcagaaccccccagggccccggcatggtgctgctgctgcccttcatcgacagcttccagagagtggacctgagaaccagagccttcaacgtgcccccctgcaagctggccagcaaggacggcgccgtgctgagcgtgggcgccgacgtgcagttcagaatctgggaccccgtgctgagcgtgatgaccgtgaaggacctgaacaccgccaccagaatgaccgcccagaacgccatgaccaaggccctgctgaagagacccctgagagagatccagatggagaagctgaagatcagcgaccagctgctgctggagatcaacgacgtgaccagagcctggggcctggaggtggacagagtggagctggccgtggaggccgtgctgcagcccccccaggacagccccgccggccccaacctggacagcaccctgcagcagctggccctgcacttcctgggcggcagcatgaacagcatggccggcggcgcccccagccccggccccgccgacaccgtggagatggtgagcgaggtggagccccccgccccccaggtgggcgccagaagcagccccaagcagcccctggccgagggcctgctgaccgccctgcagcccttcctgagcgaggccctggtgagccaggtgggcgcctgctaccagttcaacgtggtgctgcccagcggcacccagagcgcctacttcctggacctgaccaccggcagaggcagagtgggccacggcgtgcccgacggcatccccgacgtggtggtggagatggccgaggccgacctgagagccctgctgtgcagagagctgagacccctgggcgcctacatgagcggcagactgaaggtgaagggcgacctggccatggccatgaagctggaggccgtgctgagagccctgaagtag

SEQ ID NO: 149961 - DNA, 1197 bp, Artificial Sequence
  derived and/or modified sequence
atgctcgggcgctctggttaccgtgccctgcccctgggggattttgatcgatttcagcagtcgtcctttggtttcctgggatcgcagaaaggctgtctgagtcctgagcgcggcggcgttggtaccggtgcagatgtgcctcagtcttggcctagttgtttgtgtcatggattgatatctttcctgggatttctgcttctgttagtgaccttccctatctccggctggtttgcattgaagatagtgccaacatacgaaaggatgatcgtttttaggttgggtaggataagaaccccgcaggggcccgggatggtgctgctcttgccattcattgatagctttcagcgcgtcgacctgagaacacgggctttcaatgtgcccccatgtaaactggcctctaaggacggagcagtgctgtccgtgggcgctgacgttcaatttagaatatgggaccccgtcctgagcgtcatgacagtgaaggatctgaacacggccacaaggatgaccgcccagaatgctatgaccaaagctttactcaagcgccctttgcgtgagatccagatggaaaagctgaaaatctcagaccaacttctcctggaaatcaatgatgtcacgagagcttggggccttgaagtggacagagttgagctcgccgtcgaggccgtgctacagcctccacaggattcaccagccgggcccaatcttgattctaccttacagcagctagccctccacttcctcggggggagtatgaacagcatggctggcggcgctccaagtcccggaccagccgatacagttgagatggtgtctgaagtcgagccccctgcgcctcaagttggggcccgcagctcccctaagcaaccactggcagaaggtctgttgactgccttgcagccctttctgtcagaagccctcgtgtcacaagtaggagcttgctatcaatttaatgtcgttctcccatccgggactcagtctgcttattttttggacctcacaaccgggcgggggcgggtgggccacggagtcccagatggaattcccgacgttgtggtcgaaatggcagaggcagacctgcgggccttgctttgccgcgagttaagacctctcggggcctacatgagtggcaggctgaaggtgaagggagacttggctatggcaatgaaactggaagcagttctgcgggccctcaagtag

SEQ ID NO: 149962 - DNA, 1197 bp, Artificial Sequence
  derived and/or modified sequence
atgctgggccgcagcggctaccgggccctgcccctgggggactttgaccgcttccagcagagcagctttggcttcctgggcagccagaagggctgcctgagccctgagcggggcggcgtgggcaccggggctgatgtgccccagagctggcccagctgcctgtgccacggcctcatctccttcctgggcttcctgctgctgctggtgaccttccccatcagcggctggtttgccctgaagatcgtgcccacctatgaaagaatgattgtgttccggctgggccgcatccgcaccccccagggccctggcatggtgctgctgctgcccttcatcgacagcttccagagggtggacctgcggacccgggccttcaacgtgcccccctgcaagctggccagcaaggatggagctgtgctgtctgtgggcgcagatgtgcagttccgcatctgggaccctgtgctgtctgtgatgacagtgaaggacctgaacacagccaccaggatgacagcccagaatgccatgaccaaggccctgctgaagaggcccctgcgggagatccagatggagaagctgaagatcagtgaccagctgctgctggagatcaatgatgtgacccgggcctggggcctggaggtggacagagtggagctggccgtggaggccgtgctgcagcccccccaggacagccctgctggccccaacctggacagcaccctgcagcagctggccctgcacttcctgggcggctccatgaacagcatggccggcggggcccccagccctggccctgctgacacagtggagatggtgtctgaggtggagcccccagccccccaggtgggcgcccggagcagccccaagcagcccctggccgagggcctgctgacagccctgcagcccttcctgtctgaggccctggtgtcccaggtgggcgcctgctaccagttcaacgtggtgctgcccagcggcacccagagcgcctacttcctggacctgaccaccggccggggccgggtgggccatggagtgcctgatggcatcccagatgtggtggtggagatggccgaggccgacctgcgggccctgctgtgccgggagctgcggcccctgggcgcctacatgagcggccgcctgaaggtgaagggggacctggccatggccatgaagctggaggccgtgctgcgggccctgaagtag

SEQ ID NO: 149963 - DNA, 1197 bp, Artificial Sequence
  derived and/or modified sequence
atgctgggccggagcggctaccgggccctgcccctgggcgacttcgatagattccaacagagttcctttgggtttctcggatcacaaaaaggctgcctctccccagagcgcgggggagtgggtaccggtgcagacgtcccacaaagctggcccagttgtctctgtcatggattgatttcctttctcggcttcttgctattattagtgacattcccaatttctgggtggttcgccctgaaaattgttcccacttacgaacgaatgattgttttcagactaggccggatccgcaccccgcaggggcccggcatggtgctgctgctgcccttcattgactccttccagcgcgtggacctccgtactagagcttttaacgtgcctccttgtaaactagccagcaaagatggggcagtgctctcagtgggagcggatgtccaattccgcatctgggatcccgtgctgtctgtcatgacagtcaaagacctcaacaccgccacccgcatgaccgctcagaatgccatgaccaaagctttactaaaacgtcccctccgcgaaattcagatggagaaacttaagatcagtgaccagctcctactcgaaattaacgacgtaacaagggcctggggtctggaagttgatcgagttgaactggccgttgaggctgttcttcagccaccacaggactcccctgctgggccaaacctcgactccacactgcagcagctcgcgcttcatttcctcggagggtccatgaatagcatggccggaggagccccctcccctggccccgctgatacagtcgaaatggtcagcgaagtggagcctcctgctccccaagtgggggcccgcagctcaccaaagcagccactggcagagggactactgaccgcgctgcaacccttcctgtccgaggctctggtgagccaggttggcgcgtgttaccagtttaatgtggtgttaccttctggaacccagagcgcttactttttggatctgaccacagggaggggtagggtgggacacggcgtcccggatggaattcctgacgttgtggtggaaatggccgaagctgatctcagagccctgctgtgtagggagctgaggccactgggggcatacatgagcggccggctcaaagtaaaaggtgatctggcaatggccatgaagttagaagccgtcctgcgcgctctgaagtag

SEQ ID NO: 149964 - DNA, 1197 bp, Artificial Sequence
  derived and/or modified sequence
atgttaggacggagcggctaccgggctctgccgctcggcgacttcgaccgttttcagcaaagcagctttggcttcctgggatcccagaagggctgtttatctcccgagcggggtggagttggtaccggcgcagacgtgccacagtcatggccatcctgtctctgtcatggattaattagcttcctgggattcttactgcttttggtgacctttcctatcagcggctggtttgcgctgaaaatcgtgcccacttatgagcgaatgatcgtctttcggctgggcagaatccgcacaccacagggcccagggatggtattacttctgccctttattgatagttttcagagagtcgatctgagaacccgcgcattcaacgttcctccctgcaaactagcctccaaggatggggctgtgctttcggtcggcgctgacgtgcagtttcggatttgggatcccgtcctgagcgtcatgaccgtgaaagacctgaatacagccacaagaatgacagcccagaatgctatgactaaggctttgttaaaaagacccttacgggagatccaaatggagaagctcaagatatccgaccaactgctgctggagatcaatgatgtcacacgggcatggggacttgaagtcgatagagtggaattggccgtggaggctgtcctccaacccccacaggactcaccagccggacctaacctagactctacactccagcagcttgcactccatttcctgggcggatccatgaatagtatggctggaggggcaccctccccaggtcctgccgataccgtggagatggtttctgaggtggagcccccagcacctcaggttggtgcaagatcctctccaaaacagcctttggccgaggggctgttgacagccctccaaccatttttgtcagaggcgctggttagccaggttggtgcatgctatcagttcaacgtagtactgccatctggaactcagtctgcttactttttggatctcactactgggcgaggtcgggtggggcacggcgttccagacgggattcccgatgttgtggttgaaatggctgaggctgacctgagggcactgctgtgccgcgagctcaggcccctgggcgcatatatgagtggcagactcaaagtgaagggcgacctcgctatggctatgaagctggaagcggtcctgagagctctcaagtag

SEQ ID NO: 149965 - DNA, 2053 bp, Artificial Sequence
  derived and/or modified sequence
gcgccgccgcgggtggccgcgcgggtgaagccggaagcagcagccaggagggcggggccgcgtagggcccactggccagggagggcgccgcgcggaggcgcggggcgtgtctcctgtcaaaagccatgctcggcaggtctgggtaccgggcgctgcccctgggtgattttgaccgcttccagcagtcgagcttcggctttctgggctcgcagaagggctgcttgtccccggagcggggcggcgtggggacaggggccgatgtaccccagagctggccctcctgcctctgtcatggcctcatcagtttcctggggttcttgctgctgttggtcaccttccccatttctggctggtttgccctgaagattgtgcccacctacgagcggatgattgtgttccgcctgggccggatccgcaccccccagggacctggcatggttctgctcttgcccttcattgactcctttcagagggtggatctgaggacacgagccttcaacgtccctccctgcaagctggcctctaaggacggggctgtgctgtccgtgggagccgatgtccagtttcgcatctgggacccggtgctgtcggtgatgactgtgaaagacctgaacacagccacacgcatgacagcccagaacgccatgaccaaggccctgctcaagaggccgctgcgggagatccagatggagaagctcaagatcagcgaccagcttctgctggagatcaacgatgtgaccagggcctgggggctggaggtagaccgcgtggagctggcagtggaggccgtgctccagccgccccaggacagcccagctgggcccaacctggacagcaccctccagcagctggccctgcacttcctgggaggaagcatgaactcaatggcaggaggtgccccgtccccggggccagcagacaccgtggagatggtgagtgaagttgagccacctgcccctcaagttggtgccaggtccagtccgaagcagcctctggcggaggggctactgactgctctacagcccttcctgtctgaggccctggtcagccaagtcggggcctgctaccagttcaatgtcgtcctgcccagcggcacccaaagcgcctacttcctggacctcactacaggacgaggaagagtgggacacggggtgcctgatggcatccctgatgtggtggtggagatggccgaggcagacctgcgggccctgctatgcagagagctgcggcccctgggggcctacatgagtggacggctgaaggtgaagggcgacctggctatggccatgaagctggaggctgtcctcagggccttgaagtagcagccttggctgactttccagagcccagtcccaagcctggcaccaagcctgaggggcctcttggaggaggaggtgttcatctgcaccacagagagttgaggccctaacaaatttcaggcccagccaagagcccatgaatggaggctgcaggaggctgagtccggctgccatgcacgtctcccctacagtggttctctggacaaggctttgtccatcccggtccccagctgagtgcccagcgctgagctgggtgcacggtgtgattccaggaggagagccaggcctgccctgccctgctggcttcctgactggagagacaggacccacagaaacagcctgacagcagctggtttggtccttgtgtgagggaccaagcatgtggcccaggctctaagctctgcggggattggagagggatggggagggaagggaaggcagctccaagaagaggtccctgtggcgaagttacctggggatcctggctggcccaccttcctggctgcagtccaggcccgtgctggcgggattgggcatgggaaggagcagggcctgctgcttccctggcgctgctcccaaagatttctgactcatctgccagctctgtcctgcatgcctggcgagctggggcccagggcagcatgaaggagagccctgcgttctgtgcttcttaccagaggtttgcaagcctcagacaaataaatgtggtgtttacaatgtataaaagagaagaa

SEQ ID NO: 149966 - protein, 386 aa, Artificial Sequence
  derived and/or modified sequence
MEELDALLEELERSTLQDSDEYSNPAPLPLDQHSRKETNLDETSEILSIQDNTSPLPAQLVYTTNIQELNVYSEAQEPKESPPPSKTSAAAQLDELMAHLTEMQAKVAVRADAGKKHLPDKQDHKASLDSMLGGLEQELQDLGIATVPKGHCASCQKPIAGKVIHALGQSWHPEHFVCTHCKEEIGSSPFFERSGLAYCPNDYHQLFSPRCAYCAAPILDKVLTAMNQTWHPEHFFCSHCGEVFGAEGFHEKDKKPYCRKDFLAMFSPKCGGCNRPVLENYLSAMDTVWHPECFVCGDCFTSFSTGSFFELDGRPFCELHYHHRRGTLCHGCGQPITGRCISAMGYKFHPEHFVCAFCLTQLSKGIFREQNDKTYCQPCFNKLFPL

SEQ ID NO: 149967 - DNA, 1161 bp, Artificial Sequence
  derived and/or modified sequence
atggaagagctggatgccctgctggaagaactcgaaaggtctactttacaggatagcgacgaatattctaaccctgcacctctcccgctggatcaacatagccggaaagagacgaacctggacgaaacatctgaaatcctgagcatccaagacaatacctcccccctcccagcccaactggtttacacgacgaatattcaggaattgaatgtgtacagtgaagctcaggaacccaaagaatccccacctccttccaagactagcgccgcagcacagctagatgagctgatggctcatttaactgaaatgcaggcaaaagtggccgttagagccgacgccggaaagaaacacctcccagacaaacaggatcataaagcttcattggattctatgcttggagggctggaacaggaactgcaggatctgggcatcgccactgtgcccaagggacactgtgcaagctgtcagaagcctatagccggaaaagtgattcatgcccttgggcagtcctggcacccggagcacttcgtatgcacccactgcaaggaggagatcggttcatctcctttttttgagaggagtggtctcgcctactgccccaatgattatcaccagttattttccccgaggtgtgcttactgcgcggctcctatactagacaaggtgctgacagctatgaatcagacctggcatcctgagcattttttttgctctcattgtggggaggtgttcggagccgaggggttccatgagaaggacaagaagccctattgtagaaaagacttcctggcaatgtttagtccaaagtgtggagggtgtaatcggcctgttctggaaaattacctctcagctatggacaccgtgtggcaccctgaatgtttcgtttgtggcgactgtttcacatctttttctactgggtcttttttcgaactcgacggcagaccgttctgtgagcttcattaccatcatcgccgagggaccctgtgccatggctgcgggcagccgattacaggccgatgcatttccgccatgggatataagtttcatccagagcactttgtgtgcgcattctgtctgacacagttaagcaaaggcatattcagagagcagaatgataagacctactgtcagccatgtttcaataagctctttccactgtag

SEQ ID NO: 149968 - DNA, 1161 bp, Artificial Sequence
  derived and/or modified sequence
atggaggagctggatgccctgctggaggagctggagaggagcaccctgcaggacagtgatgagtacagcaacccagcccccctgcccctggaccagcacagcaggaaggagaccaacctggatgagaccagcgagatcctgagcatccaggacaacaccagccccctgcctgcccagctggtgtacaccaccaacatccaggagctgaatgtgtacagcgaggcccaggagcccaaggagagccccccacccagcaagaccagcgctgctgcccagctggatgagctgatggcccacctgacagagatgcaggccaaggtggccgtgcgggcagatgctgggaagaagcacctgcctgacaagcaggaccacaaggccagcctggacagcatgctgggcggcctggagcaggagctgcaggacctgggcatcgccaccgtgcccaagggccactgtgccagctgccagaagcccatcgccggcaaggtgattcatgccctgggccagagctggcaccctgagcactttgtgtgcacccactgcaaggaggagatcggcagcagccccttctttgagaggagcggcctggcctactgccccaatgactaccaccagctgttcagcccccgctgtgcctactgtgccgcccccatcctggacaaggtgctgacagccatgaaccagacctggcaccctgagcacttcttctgcagccactgtggggaggtgtttggagctgagggcttccacgagaaggacaagaagccctactgcaggaaggacttcctggccatgttcagccccaagtgtggcggctgcaacagacctgtgctggagaactacctgagcgccatggacacagtgtggcaccctgagtgctttgtgtgtggggactgcttcaccagcttcagcacaggcagcttctttgagctggatggccggcccttctgtgagctgcactaccaccaccggcggggcaccctgtgccacggctgcggccagcccatcaccggccgctgcatcagcgccatgggctacaagttccaccctgagcactttgtgtgtgccttctgcctgacccagctgagcaagggcatcttccgggagcagaatgacaagacctactgccagccctgcttcaacaagctgttccccctgtag

SEQ ID NO: 149969 - DNA, 1833 bp, Artificial Sequence
  derived and/or modified sequence
catccagttcctttgcggtcctcttcttcagcacatgccaaagctgttcctcacggcctgtgagacaagagcatcttggatgtaggacaatggaagagttagatgccttattggaggaactggaacgctccacccttcaggacagtgatgaatattccaacccagctcctcttcccctggatcagcattccagaaaggagactaaccttgatgagacttcggagatcctttctattcaggataacacaagtcccttgccggcgcagctcgtgtatactaccaatatccaggagctcaatgtctacagtgaagcccaagagccaaaggaatcaccaccaccttctaaaacgtcagcagctgctcagttggatgagctcatggctcacctgactgagatgcaggccaaggttgcagtgagagcagatgctggcaagaagcacttaccagacaagcaggatcacaaggcctccctggactcaatgcttgggggtctggagcaggaattgcaggaccttggcattgccacagtgcccaagggccattgtgcatcctgccagaaaccgattgctgggaaggtgatccatgctctagggcaatcatggcatcctgagcattttgtctgtactcattgcaaagaagagattggctccagtcccttctttgagcggagtggcttggcctactgccccaacgactaccaccaacttttttctccacgctgtgcttactgcgctgctcccatcctggataaagtgctgacagcaatgaaccagacctggcacccagagcacttcttctgctctcactgcggagaggtgtttggtgcagaaggctttcatgagaaggacaagaagccatattgccgaaaggatttcttagccatgttctcacccaagtgtggtggctgcaatcgcccagtgttggaaaactacctttcagccatggacactgtctggcacccagagtgctttgtttgtggggactgcttcaccagtttttctactggctccttctttgaactggatggacgtccattctgtgagctccattaccatcaccgccggggaacgctctgccatgggtgtgggcagcccatcactggccgttgtatcagtgccatggggtacaagttccatcctgagcactttgtgtgtgctttctgcctgacacagttgtcgaagggcattttcagggagcagaatgacaagacctattgtcaaccttgcttcaataagctcttcccactgtaatgccaactgatccatagcctcttcagattccttataaaatttaaaccaagagaggagaggaaagggtaaattttctgttactgaccttctgcttaatagtcttatagaaaaaggaaaggtgatgagcaaataaaggaacttctagactttacatgactaggctgataatcttattttttaggcttctatacagttaattctataaattctctttctccctctcttctccaatcaagcacttggagttagatctaggtccttctatctcgtccctctacagatgtattttccacttgcataattcatgccaacactggttttcttaggtttctccattttcacctctagtgatggccctactcatatcttctctaatttggtcctgatacttgtttcttttcacgttttcccatttccctgtggctcactgtcttacaatcactgctgtggaatcatgataccacttttagctctttgcatcttccttcagtgtatttttgtttttcaagaggaagtagattttaactggacaactttgagtactgacatcattgataaataaactggcttgtggtttcaataa

SEQ ID NO: 149970 - DNA, 1161 bp, Artificial Sequence
  derived and/or modified sequence
atggaggagctggacgccctgctggaggagctggagcggagcaccttgcaagattcagacgagtactccaatcccgcccccctccctctggaccagcattcccgaaaggagacgaacctggacgaaacctccgagatattgagcatccaagataatacatcccctctgcctgctcagctggtctatactacaaatatccaggagcttaatgtctactccgaagcacaagaaccaaaggagagccctccaccgagtaagacttctgcagctgcccagcttgacgaactgatggctcacctaacagagatgcaggctaaagtggctgtgcgtgcagacgcgggaaagaagcaccttccagataaacaggatcacaaggcttctttggattctatgctgggaggcctggagcaagagcttcaagacctagggatagccactgtgcctaagggccactgtgctagctgtcaaaaacccatcgctggcaaggtcatacacgccctcggccagtcctggcatcccgagcattttgtgtgcacccactgtaaagaggaaattgggagctccccctttttcgaacggtctggactcgcttattgtcccaacgattatcaccagttgttttctcctcgatgtgcatactgcgcggccccgatcctcgacaaagtgctgactgccatgaatcagacatggcaccctgagcacttcttctgttctcattgcggcgaggtgttcggggccgagggcttccacgagaaggacaagaagccgtattgcaggaaagatttcctggcaatgttctcacctaagtgcggcggctgtaaccgaccagtcctggagaattatctgtcggcaatggacacagtgtggcatccagaatgttttgtctgcggtgactgtttcacaagttttagcactggaagcttctttgagctggacggacgtccgttttgtgagctgcattaccaccacaggagagggacattgtgtcacgggtgtggccagccaattacaggtaggtgtatttccgctatgggctacaagtttcacccagagcacttcgtgtgtgctttctgcttaacacagttaagtaagggcattttccgtgaacaaaacgacaaaacatactgccagccctgctttaacaaattgtttcccctgtag

SEQ ID NO: 149971 - DNA, 1161 bp, Artificial Sequence
  derived and/or modified sequence
atggaagaactcgacgccctgctagaagagctggagcggagtactctccaggactcggatgaatattcgaacccagccccattacctttggatcagcatagcaggaaagagaccaacctggatgaaacatcagagatccttagtattcaagacaatacttctcccttacccgctcagctggtatacacaaccaacattcaggaactgaacgtatattcagaggcacaggagcccaaggagtctccacctccgtctaaaacttctgccgctgcacagctggatgagcttatggcccatctgactgagatgcaggctaaggttgccgtccgagccgatgcgggtaaaaagcacctgcccgacaagcaagaccataaggcctcgttagattccatgctcggcggactcgagcaggaactgcaagacctgggaatcgctaccgtgcccaaggggcattgcgccagctgccagaaacccatcgctggcaaagttatccacgctttggggcagagctggcatcccgagcatttcgtgtgcacacactgcaaggaggagattggctccagcccgttcttcgagagaagcgggctggcctactgccctaatgactaccatcagctgttctctccaagatgcgcttactgtgccgcacctattctggacaaggtgctaaccgccatgaatcagacctggcatccggagcacttcttttgcagccactgcggtgaggtgtttggagctgaaggatttcatgaaaaggacaagaaaccgtattgtcgcaaggattttctcgccatgttctcccctaagtgtggcggttgtaaccgccctgtgctcgaaaactacctgagcgccatggacaccgtgtggcatcctgaatgcttcgtgtgcggggactgcttcaccagcttttctaccggctcatttttcgaactcgatggtagacctttctgtgaactccactatcaccaccggagagggaccctgtgccatggctgtgggcagcccatcacaggacggtgtatttcagccatgggttacaagttccatccagaacacttcgtctgtgctttctgccttactcaactgtccaaagggatcttccgggaacagaatgacaaaacctactgtcagccttgcttcaacaagctgtttccactgtag

SEQ ID NO: 149972 - DNA, 1161 bp, Artificial Sequence
  derived and/or modified sequence
atggaggagctggacgccctgctggaggagctggagagaagcaccctgcaggacagcgacgagtacagcaaccccgcccccctgcccctggaccagcacagcagaaaggagaccaacctggacgagaccagcgagatcctgagcatccaggacaacaccagccccctgcccgcccagctggtgtacaccaccaacatccaggagctgaacgtgtacagcgaggcccaggagcccaaggagagccccccccccagcaagaccagcgccgccgcccagctggacgagctgatggcccacctgaccgagatgcaggccaaggtggccgtgagagccgacgccggcaagaagcacctgcccgacaagcaggaccacaaggccagcctggacagcatgctgggcggcctggagcaggagctgcaggacctgggcatcgccaccgtgcccaagggccactgcgccagctgccagaagcccatcgccggcaaggtgatccacgccctgggccagagctggcaccccgagcacttcgtgtgcacccactgcaaggaggagatcggcagcagccccttcttcgagagaagcggcctggcctactgccccaacgactaccaccagctgttcagccccagatgcgcctactgcgccgcccccatcctggacaaggtgctgaccgccatgaaccagacctggcaccccgagcacttcttctgcagccactgcggcgaggtgttcggcgccgagggcttccacgagaaggacaagaagccctactgcagaaaggacttcctggccatgttcagccccaagtgcggcggctgcaacagacccgtgctggagaactacctgagcgccatggacaccgtgtggcaccccgagtgcttcgtgtgcggcgactgcttcaccagcttcagcaccggcagcttcttcgagctggacggcagacccttctgcgagctgcactaccaccacagaagaggcaccctgtgccacggctgcggccagcccatcaccggcagatgcatcagcgccatgggctacaagttccaccccgagcacttcgtgtgcgccttctgcctgacccagctgagcaagggcatcttcagagagcagaacgacaagacctactgccagccctgcttcaacaagctgttccccctgtag

SEQ ID NO: 149973 - protein, 336 aa, Artificial Sequence
  derived and/or modified sequence
MEKLRLLGLRYQEYVTRHPAATAQLETAVRGFSYLLAGRFADSHELSELVYSASNLLVLLNDGILRKELRKKLPVSLSQQKLLTWLSVLECVEVFMEMGAAKVWGEVGRWLVIALVQLAKAVLRMLLLLWFKAGLQTSPPIVPLDRETQAQPPDGDHSPGNHEQSYVGKRSNRVVRTLQNTPSLHSRHWGAPQQREGRQQQHHEELSATPTPLGLQETIAEFLYIARPLLHLLSLGLWGQRSWKPWLLAGVVDVTSLSLLSDRKGLTRRERRELRRRTILLLYYLLRSPFYDRFSEARILFLLQLLADHVPGVGLVTRPLMDYLPTWQKIYFYSWG

SEQ ID NO: 149974 - DNA, 1011 bp, Artificial Sequence
  derived and/or modified sequence
atggagaaactgcggctgctgggcctgaggtatcaggagtatgtcacacgccacccagccgccactgcccagctcgagaccgccgtgcgcgggttttcctacctactggccggaaggttcgccgatagccatgagctgtccgaactcgtatacagcgcaagtaacctcttggtgttactaaacgacggcatcttacgcaaggaactgaggaagaaactcccagtctccctgagtcagcagaagctgctcacttggctgtccgtcttagagtgtgtggaagtgttcatggagatgggagcagccaaggtctggggtgaagtgggccgctggctcgttattgccctggtacaacttgccaaggccgtgctacgtatgctgctgctgttatggtttaaagcgggcctgcagacctctccccccatcgtcccactagaccgcgagacacaggcccagccacccgacggggaccactcccctggcaatcacgaacagtcctacgtgggaaagcggagtaatagggtagttcgaactctccagaatactccaagcctccattcacggcactggggggccccacagcagcgcgaaggtaggcaacagcaacatcacgaggagctttcagctacgcctacacctctagggcttcaagagaccattgccgagttcctttatatcgcacgtccactacttcatttgttgagtttgggcttgtggggacagcgcagttggaaaccttggttgttggctggagtggtggatgtcaccagcttgtctcttctgtccgacagaaaaggacttacacgccgggaaagaagagagctgaggcgccggaccatcctgctgctttattatctgctgaggtccccattctatgaccgtttttccgaggcccggattctgtttctgctgcagctgctggctgatcatgtgcccggggtggggctcgtgactaggccgctgatggattatcttcccacttggcagaagatttacttctacagctgggggtag

SEQ ID NO: 149975 - DNA, 1011 bp, Artificial Sequence
  derived and/or modified sequence
atggagaagctgcggctgctgggcctgcgctaccaggagtatgtgaccaggcaccctgctgccacagcccagctggagacagctgtgcggggcttctcctacctgctggccggccgctttgctgacagccatgagctgtctgagctggtgtacagcgccagcaacctgctggtgctgctgaatgatggcatcctgaggaaggagctgaggaagaagctgcctgtgtccctgagccagcagaagctgctgacctggctgtctgtgctggagtgtgtggaggtgttcatggagatgggcgccgccaaggtgtggggcgaggtgggccgctggctggtgattgccctggtgcagctggccaaggctgtgctgaggatgctgctgctgctgtggttcaaggccggcctgcagaccagcccccccatcgtgcccctggaccgggagacccaggcccagcccccagatggagaccacagccctggcaaccacgagcagagctatgtgggcaagaggagcaacagagtggtgaggaccctgcagaacacccccagcctgcacagccgccactggggcgccccccagcagcgggagggccggcagcagcagcaccacgaggagctgagcgccacccccacccccctgggcctgcaggagaccatcgccgagttcctgtacatcgcccggcccctgctgcacctgctgagcctgggcctgtggggccagaggtcctggaagccctggctgctggccggcgtggtggatgtgaccagcctgagcctgctgagtgacaggaagggcctgacccggcgggagcggcgggagctgcggcggaggaccatcctgctgctgtactacctgctgcggagccccttctatgaccgcttcagcgaggcccgcatcctcttcctgctgcagctgctggccgaccacgtgcctggggtgggcctggtgacccggcccctgatggactacctgcccacctggcagaagatctacttctacagctggggctag

SEQ ID NO: 149976 - DNA, 1011 bp, Artificial Sequence
  derived and/or modified sequence
atggagaagctgcggctgctgggcctgcggtaccaggagtacgtgacaagacacccggcagctaccgcccagcttgagaccgctgtgagagggttctcataccttctggccggcagattcgcggactctcatgaattgagtgagctggtttactccgcctccaacctgctggtgctcctgaacgatgggatccttagaaaagagctgaggaagaagctgcccgtttccctctcacagcaaaaactgctcacctggctcagcgttctggagtgcgtcgaggtcttcatggagatgggagccgccaaggtctggggtgaggtgggacgctggctggtgatagcacttgtgcaattagccaaagccgtgctgaggatgttgctactcttgtggtttaaggcaggactccagacctccccgccaatagtccctttggatcgcgagacgcaggcacagccccccgatggggaccacagccctggcaaccatgaacagagttatgtgggcaagaggtccaacagagtagtgaggacactccaaaataccccctccctccattctagacattggggggctccgcagcagcgcgagggcagacagcaacaacaccatgaggaactaagtgcaacccccactcccctggggctgcaggaaaccatagccgagttcctatacattgccagacctcttcttcatttgttaagccttggcctgtggggccagcgctcatggaagccttggcttctggcaggagttgtggacgtgacctccttgagccttttatctgaccggaaaggcctcacgaggcgagagagacgcgagttaaggcggagaactatcctgctattatattatctcctgcgctcgcccttctacgaccgttttagcgaggctcgcattttatttcttctacaactcctggctgaccacgtcccaggagttggtctggtcactcgcccgctcatggattatctgcctacgtggcagaaaatttacttctactcgtggggctag

SEQ ID NO: 149977 - DNA, 1335 bp, Artificial Sequence
  derived and/or modified sequence
acttgagggagtagggggccgggtttgggccctcagttgctaagggctacccgagtgggaagcggttcaagagatggggtgaagggtggttcaccggttcttcaagtcctcagccttctggcccgcggaagttaagcaaccaagaggcgggcctaagaccggaagcaggaaggagggcgcaggaagcagggcgccgcagcctgtcgtacggtccttctgtgggtctgtcggtgccgagggcaggatggagaagctgcggctcctgggcctccgctaccaggagtacgtgactcgtcacccggccgccacggcccagctggagacagcagtgcggggcttcagttacctgctggcaggtcgattcgccgattcgcacgagctgtcagagctggtgtactctgcctctaacctgcttgtgctgctcaatgacgggatcctacggaaggagcttcggaaaaagttgcctgtgtcgctgtcccagcagaagctgctgacatggctgagcgtgctggagtgcgtggaggtgttcatggagatgggagctgccaaggtgtggggtgaagtgggccgctggcttgtcatcgccctcgtccagctggccaaggctgtactgcggatgctcctgctgctctggttcaaggctggcctccagacttcaccccctatcgttccactggacagagagacccaggcacagcccccggatggtgaccacagccctggcaaccatgagcagtcctacgtggggaagcggtcaaaccgggtggtgcgaaccctccagaacacgccgtccctgcactccaggcactggggagctccccagcagcgggagggacggcagcagcagcatcacgaggagctgagtgcgacccccacccccctggggctgcaggagaccatcgcagagtttttgtacattgcccggccgctgctgcacttgctcagcctgggcctgtggggtcagaggtcgtggaaaccctggctcttggctggtgttgtggacgtgaccagcctgagcctcctgagtgacagaaagggcctgacccggagggagcggcgggagctgcggcgccggaccatcctgctgctctactacctgctgcgctctcctttctatgaccgcttctccgaggccaggatcctcttcctgctccagttgctggccgaccacgtccctggcgttggcctggtcacaaggccgctcatggattacttgcccacctggcagaaaatctacttctacagttggggctgacagacctcccggaaggagggtgtggggaggggtggggcagggagcccctcttccctaataaaactgactccggcagcgtc

SEQ ID NO: 149978 - DNA, 1011 bp, Artificial Sequence
  derived and/or modified sequence
atggaaaaactgcggttactgggcctgcggtatcaggagtatgtgacacggcaccccgctgctacagcccagctcgaaactgccgtgcggggattctcctacttattggccggacgcttcgctgattcccacgagctgagtgaattagtctattcggctagtaacctgcttgtcctgctcaacgatggaatcctaagaaaagaactgcggaagaaactgcccgtttcactcagccagcagaaattacttacctggctgagtgttctcgagtgtgttgaagtgtttatggagatgggggcagccaaagtttggggtgaggtgggcaggtggttggtgatcgctttagtccaactggccaaggcagtgctaagaatgctccttctgctttggtttaaggctgggctccagaccagccccccaattgtccccctggacagggagacacaggcacagccacctgatggagatcattcccctgggaatcatgaacaatcatatgtaggcaaaaggagtaatagagtggttagaaccctgcagaatacccctagccttcatagcagacactggggggcaccccaacaacgcgagggcagacagcagcagcatcatgaggaattgagcgctacgccaacgcccctcggacttcaagagacaatcgcagagtttctttatatagccagaccactgttgcacctcctgagccttggtctctggggtcaaaggagctggaaaccttggttgctggccggtgtggtggacgtgacatccctgagtttgctttcagataggaaagggctgacacggagggagcggagagaattgcgaagacgcacaatcctgctactctactacctgttgagatcccccttctatgacaggttctccgaggcacgtatccttttcctgctccaactcctggctgatcatgtgcccggagttggcctggtcacacgacccctgatggactatctaccaacatggcaaaaaatctatttttattcctgggggtag

SEQ ID NO: 149979 - DNA, 1011 bp, Artificial Sequence
  derived and/or modified sequence
atggagaagctgagactgctgggcctgagataccaggagtacgtgaccagacaccccgccgccaccgcccagctggagaccgccgtgagaggcttcagctacctgctggccggcagattcgccgacagccacgagctgagcgagctggtgtacagcgccagcaacctgctggtgctgctgaacgacggcatcctgagaaaggagctgagaaagaagctgcccgtgagcctgagccagcagaagctgctgacctggctgagcgtgctggagtgcgtggaggtgttcatggagatgggcgccgccaaggtgtggggcgaggtgggcagatggctggtgatcgccctggtgcagctggccaaggccgtgctgagaatgctgctgctgctgtggttcaaggccggcctgcagaccagcccccccatcgtgcccctggacagagagacccaggcccagccccccgacggcgaccacagccccggcaaccacgagcagagctacgtgggcaagagaagcaacagagtggtgagaaccctgcagaacacccccagcctgcacagcagacactggggcgccccccagcagagagagggcagacagcagcagcaccacgaggagctgagcgccacccccacccccctgggcctgcaggagaccatcgccgagttcctgtacatcgccagacccctgctgcacctgctgagcctgggcctgtggggccagagaagctggaagccctggctgctggccggcgtggtggacgtgaccagcctgagcctgctgagcgacagaaagggcctgaccagaagagagagaagagagctgagaagaagaaccatcctgctgctgtactacctgctgagaagccccttctacgacagattcagcgaggccagaatcctgttcctgctgcagctgctggccgaccacgtgcccggcgtgggcctggtgaccagacccctgatggactacctgcccacctggcagaagatctacttctacagctggggctag

SEQ ID NO: 149980 - protein, 1190 aa, Artificial Sequence
  derived and/or modified sequence
MPVRGDRGFPPRRELSGWLRAPGMEELIWEQYTVTLQKDSKRGFGIAVSGGRDNPHFENGETSIVISDVLPGGPADGLLQENDRVVMVNGTPMEDVLHSFAVQQLRKSGKVAAIVVKRPRKVQVAALQASPPLDQDDRAFEVMDEFDGRSFRSGYSERSRLNSHGGRSRSWEDSPERGRPHERARSRERDLSRDRSRGRSLERGLDQDHARTRDRSRGRSLERGLDHDFGPSRDRDRDRSRGRSIDQDYERAYHRAYDPDYERAYSPEYRRGARHDARSRGPRSRSREHPHSRSPSPEPRGRPGPIGVLLMKSRANEEYGLRLGSQIFVKEMTRTGLATKDGNLHEGDIILKINGTVTENMSLTDARKLIEKSRGKLQLVVLRDSQQTLINIPSLNDSDSEIEDISEIESNRSFSPEERRHQYSDYDYHSSSEKLKERPSSREDTPSRLSRMGATPTPFKSTGDIAGTVVPETNKEPRYQEDPPAPQPKAAPRTFLRPSPEDEAIYGPNTKMVRFKKGDSVGLRLAGGNDVGIFVAGIQEGTSAEQEGLQEGDQILKVNTQDFRGLVREDAVLYLLEIPKGEMVTILAQSRADVYRDILACGRGDSFFIRSHFECEKETPQSLAFTRGEVFRVVDTLYDGKLGNWLAVRIGNELEKGLIPNKSRAEQMASVQNAQRDNAGDRADFWRMRGQRSGVKKNLRKSREDLTAVVSVSTKFPAYERVLLREAGFKRPVVLFGPIADIAMEKLANELPDWFQTAKTEPKDAGSEKSTGVVRLNTVRQIIEQDKHALLDVTPKAVDLLNYTQWFPIVIFFNPDSRQGVKTMRQRLNPTSNKSSRKLFDQANKLKKTCAHLFTATINLNSANDSWFGSLKDTIQHQQGEAVWVSEGKMEGMDDDPEDRMSYLTAMGADYLSCDSRLISDFEDTDGEGGAYTDNELDEPAEEPLVSSITRSSEPVQHEESIRKPSPEPRAQMRRAASSDQLRDNSPPPAFKPEPPKAKTQNKEESYDFSKSYEYKSNPSAVAGNETPGASTKGYPPPVAAKPTFGRSILKPSTPIPPQEGEEVGESSEEQDNAPKSVLGKVKIFEKMDHKARLQRMQELQEAQNARIEIAQKHPDIYAVPIKTHKPDPGTPQHTSSRPPEPQKAPSRPYQDTRGSYGSDAEEEEYRQQLSEHSKRGYYGQSARYRDTEL

SEQ ID NO: 149981 - DNA, 3573 bp, Artificial Sequence
  derived and/or modified sequence
atgcccgtgagaggcgacagaggcttcccccccagaagagagctgagcggctggctgagagcccccggcatggaggagctgatctgggagcagtacaccgtgaccctgcagaaggacagcaagagaggcttcggcatcgccgtgagcggcggcagagacaacccccacttcgagaacggcgagaccagcatcgtgatcagcgacgtgctgcccggcggccccgccgacggcctgctgcaggagaacgacagagtggtgatggtgaacggcacccccatggaggacgtgctgcacagcttcgccgtgcagcagctgagaaagagcggcaaggtggccgccatcgtggtgaagagacccagaaaggtgcaggtggccgccctgcaggccagcccccccctggaccaggacgacagagccttcgaggtgatggacgagttcgacggcagaagcttcagaagcggctacagcgagagaagcagactgaacagccacggcggcagaagcagaagctgggaggacagccccgagagaggcagaccccacgagagagccagaagcagagagagagacctgagcagagacagaagcagaggcagaagcctggagagaggcctggaccaggaccacgccagaaccagagacagaagcagaggcagaagcctggagagaggcctggaccacgacttcggccccagcagagacagagacagagacagaagcagaggcagaagcatcgaccaggactacgagagagcctaccacagagcctacgaccccgactacgagagagcctacagccccgagtacagaagaggcgccagacacgacgccagaagcagaggccccagaagcagaagcagagagcacccccacagcagaagccccagccccgagcccagaggcagacccggccccatcggcgtgctgctgatgaagagcagagccaacgaggagtacggcctgagactgggcagccagatcttcgtgaaggagatgaccagaaccggcctggccaccaaggacggcaacctgcacgagggcgacatcatcctgaagatcaacggcaccgtgaccgagaacatgagcctgaccgacgccagaaagctgatcgagaagagcagaggcaagctgcagctggtggtgctgagagacagccagcagaccctgatcaacatccccagcctgaacgacagcgacagcgagatcgaggacatcagcgagatcgagagcaacagaagcttcagccccgaggagagaagacaccagtacagcgactacgactaccacagcagcagcgagaagctgaaggagagacccagcagcagagaggacacccccagcagactgagcagaatgggcgccacccccacccccttcaagagcaccggcgacatcgccggcaccgtggtgcccgagaccaacaaggagcccagataccaggaggacccccccgccccccagcccaaggccgcccccagaaccttcctgagacccagccccgaggacgaggccatctacggccccaacaccaagatggtgagattcaagaagggcgacagcgtgggcctgagactggccggcggcaacgacgtgggcatcttcgtggccggcatccaggagggcaccagcgccgagcaggagggcctgcaggagggcgaccagatcctgaaggtgaacacccaggacttcagaggcctggtgagagaggacgccgtgctgtacctgctggagatccccaagggcgagatggtgaccatcctggcccagagcagagccgacgtgtacagagacatcctggcctgcggcagaggcgacagcttcttcatcagaagccacttcgagtgcgagaaggagaccccccagagcctggccttcaccagaggcgaggtgttcagagtggtggacaccctgtacgacggcaagctgggcaactggctggccgtgagaatcggcaacgagctggagaagggcctgatccccaacaagagcagagccgagcagatggccagcgtgcagaacgcccagagagacaacgccggcgacagagccgacttctggagaatgagaggccagagaagcggcgtgaagaagaacctgagaaagagcagagaggacctgaccgccgtggtgagcgtgagcaccaagttccccgcctacgagagagtgctgctgagagaggccggcttcaagagacccgtggtgctgttcggccccatcgccgacatcgccatggagaagctggccaacgagctgcccgactggttccagaccgccaagaccgagcccaaggacgccggcagcgagaagagcaccggcgtggtgagactgaacaccgtgagacagatcatcgagcaggacaagcacgccctgctggacgtgacccccaaggccgtggacctgctgaactacacccagtggttccccatcgtgatcttcttcaaccccgacagcagacagggcgtgaagaccatgagacagagactgaaccccaccagcaacaagagcagcagaaagctgttcgaccaggccaacaagctgaagaagacctgcgcccacctgttcaccgccaccatcaacctgaacagcgccaacgacagctggttcggcagcctgaaggacaccatccagcaccagcagggcgaggccgtgtgggtgagcgagggcaagatggagggcatggacgacgaccccgaggacagaatgagctacctgaccgccatgggcgccgactacctgagctgcgacagcagactgatcagcgacttcgaggacaccgacggcgagggcggcgcctacaccgacaacgagctggacgagcccgccgaggagcccctggtgagcagcatcaccagaagcagcgagcccgtgcagcacgaggagagcatcagaaagcccagccccgagcccagagcccagatgagaagagccgccagcagcgaccagctgagagacaacagccccccccccgccttcaagcccgagccccccaaggccaagacccagaacaaggaggagagctacgacttcagcaagagctacgagtacaagagcaaccccagcgccgtggccggcaacgagacccccggcgccagcaccaagggctaccccccccccgtggccgccaagcccaccttcggcagaagcatcctgaagcccagcacccccatccccccccaggagggcgaggaggtgggcgagagcagcgaggagcaggacaacgcccccaagagcgtgctgggcaaggtgaagatcttcgagaagatggaccacaaggccagactgcagagaatgcaggagctgcaggaggcccagaacgccagaatcgagatcgcccagaagcaccccgacatctacgccgtgcccatcaagacccacaagcccgaccccggcaccccccagcacaccagcagcagaccccccgagccccagaaggcccccagcagaccctaccaggacaccagaggcagctacggcagcgacgccgaggaggaggagtacagacagcagctgagcgagcacagcaagagaggctactacggccagagcgccagatacagagacaccgagctgtag

SEQ ID NO: 149982 - DNA, 3573 bp, Artificial Sequence
  derived and/or modified sequence
atgccagtgcgtggtgatagaggatttccccctagacgagagctgtcaggttggctgagggcccccgggatggaggaacttatatgggaacagtacactgtgactctccaaaaagactctaagaggggattcggaattgccgtcagcggagggagagacaaccctcacttcgagaacggtgaaaccagcatcgttatttcagatgtactgcctggtggacccgctgacggcctcctgcaggaaaatgacagagtggtcatggttaacgggacacccatggaagacgtacttcactctttcgccgtgcagcagttgaggaaaagcggaaaagtggccgcaattgtggtgaagcgacctcgcaaggtgcaagtcgccgcccttcaggcctctcctcccttggaccaggatgaccgcgccttcgaagtgatggatgaatttgatggccggtcgtttaggagcggctacagtgaaaggtcccggttgaattcgcatggaggaagaagcaggtcttgggaggacagcccagaacgaggcaggccgcacgagcgtgctagatcaagggaacgggacctctcccgggaccggtcccggggccgctctctcgaaaggggactggatcaggaccacgcccgaacaagagacaggtctcgaggacgtagcctcgagcgtggactcgatcatgattttggcccaagcagagacagggacagagaccgcagccggggcaggtccatcgaccaggattacgaacgggcgtaccacagagcatatgaccctgactacgaaagggcctactctccggagtatcggagaggtgctaggcatgacgcccgcagtcgtggcccacgctccaggagccgagaacacccacactcaagatcaccttcacctgagcccagggggcgacccgggcctattggggtgttgctaatgaagtctcgggccaacgaagaatacggactgcgcctggggtctcagattttcgtcaaggaaatgactcggactggtctggcaacgaaggacggcaaccttcacgaaggcgatatcattttgaaaataaatggtaccgtcacagaaaacatgagcttgaccgatgctcgcaaattgatagaaaaaagccgaggcaagttgcaactggtggtgctgagggatagtcaacagacactgatcaacattccatccttaaacgactctgactccgagatcgaggacattagcgagatcgaaagtaatcggtctttctcaccagaagagagacggcaccagtactcagattacgactatcattcgtcatctgagaagctgaaagaaagaccatcatcccgtgaggacacaccatcccgcctgtcaaggatgggtgccaccccaaccccttttaagtctaccggagacatagcaggcaccgttgtaccagagaccaataaagaacccagataccaggaagaccccccggctcctcagcctaaggcagctccccgcaccttcctgcggccatcacctgaggacgaagcgatctacgggcccaataccaaaatggtgagatttaagaagggtgattctgttgggctgaggctcgccggcggaaacgatgtaggcatattcgttgcgggaattcaggaggggactagcgcagagcaggaggggctgcaggagggagatcagatcttgaaagtcaacacgcaagacttcaggggcctcgtccgggaagacgctgtcctctacttattggagattcctaagggtgagatggtgacaatcctggcacaaagcagagctgatgtatatagagacattctggcgtgcgggagaggagattctttcttcattcgttcccacttcgagtgtgagaaggaaacaccacagagtcttgcctttacaagaggcgaggttttcagagtcgtggatacactctatgatggcaaactgggaaattggctcgcggttcggatcggaaacgagctagagaaagggctcatccccaacaagtcccgcgcagagcagatggcaagtgttcagaacgcccaacgtgataatgccggtgatcgcgcagatttctggcgcatgcgtggacaaagatctggtgtgaagaagaacctgcggaaaagccgagaggatctgaccgctgtggtcagtgtttcaactaaattccctgcttacgagcgggtactgctacgggaagccggcttcaagcggcccgtcgtgttgtttggccctattgcggacatcgcaatggagaagctcgccaacgagttgccggattggtttcagactgctaaaactgagcccaaggatgctggtagcgagaaatctactggggtggttagactgaacactgtgcgccagatcatcgaacaggataagcacgccctgcttgacgtcacacccaaagccgtggacctcttgaactatacgcagtggttcccgatagtcatttttttcaacccggatagtcgccagggcgtaaaaaccatgagacagcggctcaatccaacctccaacaagagttctagaaagctgtttgatcaagccaacaaacttaagaagacctgcgcccacctgttcaccgccaccattaacttgaatagcgccaacgactcttggtttggatccttaaaagacacaatacagcaccagcagggagaagctgtgtgggtctcagagggcaaaatggaggggatggacgatgaccctgaagatagaatgtcctacctaactgccatgggggctgattacctgtcctgtgattccagactgatttctgattttgaggacaccgacggtgaaggcggggcttacaccgacaacgaactggacgaaccggcggaggagccactggttagctccattacaagatcttctgagccagtccagcatgaggaaagtatcaggaagccttctccagagccacgggcccagatgagacgcgccgcgtcaagcgaccagctgagggacaattcgccaccacctgcgttcaagcctgagcccccaaaggccaagacccaaaacaaggaggagtcatacgacttctctaagtcatatgagtataaatccaaccccagtgccgtggcaggcaacgaaactcctggcgcctccaccaaaggttatcccccacctgtagctgccaagcctacatttggaagatccatcctaaaaccgtcgacccccattccacctcaggaaggagaggaagtaggggagagctctgaggagcaagacaatgcccctaaatcagtgttgggaaaggtcaagatctttgaaaagatggaccacaaagctaggctgcagagaatgcaggagctgcaggaagcacagaatgcgcgcattgagatcgctcaaaagcaccctgacatctatgccgttccaattaaaactcacaagcccgacccaggcacaccgcagcacacctcctcccgacccccagaacctcagaaagcaccaagccgcccatatcaagacacacgcggcagctacggatccgatgctgaggaagaagagtaccggcaacaactgtccgagcatagcaaacgaggctactacggtcaatccgcgcgttaccgagataccgaactatag

SEQ ID NO: 149983 - DNA, 3573 bp, Artificial Sequence
  derived and/or modified sequence
atgcctgtgcggggggaccggggcttccccccccggcgggagctgagcggctggctgcgggcccctggcatggaggagctgatctgggagcagtacacagtgaccctgcagaaggacagcaagaggggcttcggcattgctgtgtctgggggccgggacaacccccactttgaaaatggagagaccagcatcgtcatcagtgatgtgctgcccggcggccctgcagatggcctgctgcaggagaatgacagagtggtgatggtgaatggcacccccatggaggatgtgctgcacagctttgctgtgcagcagctgaggaagagcggcaaggtggccgccatcgtggtgaagaggcccaggaaggtgcaggtggccgccctgcaggccagcccccccctggaccaggatgaccgggcctttgaggtgatggatgaatttgatggccgctccttccgcagcggctacagcgagaggagccggctgaacagccacggcggccgcagccgctcctgggaggacagccctgagcggggccggccccatgagcgggcccggagccgggagcgggacctgagccgggacaggagccggggccgcagcctggagcggggcctggaccaggaccacgcccggacccgggacaggagccggggccgcagcctggagcggggcctggaccatgactttggccccagccgggaccgggaccgggacaggagccggggccgcagcattgaccaggactatgagcgggcctaccaccgggcctatgaccctgactatgagcgggcctacagccctgagtaccgccgcggggcccggcatgatgcccggagccggggccccaggagccgcagccgggagcacccccacagccgcagccccagccctgagccccggggccggcccggccccatcggcgtgctgctgatgaagagccgggccaatgaggagtatggcctgcggctgggcagccagatctttgtgaaggagatgaccaggacaggcctggccaccaaggatggcaacctgcatgaaggagacatcatcctgaagatcaatggcaccgtgacagagaacatgagcctgacagatgccaggaagctgattgagaagagccggggcaagctgcagctggtggtgctgcgggacagccagcagaccctcatcaacatccccagcctgaatgacagcgacagcgagattgaggacatcagcgagattgagagcaacagaagcttcagccctgaggagaggaggcaccagtacagcgactatgactaccacagcagcagcgagaagctgaaggagcggcccagcagccgggaggacacccccagccggctgagcaggatgggcgccacccccacccccttcaagagcactggagacattgctggcaccgtggtgcctgagaccaacaaggagccccgctaccaggaggaccccccagccccccagcccaaggccgcccccaggaccttcctgcggcccagcccagaagatgaggccatctacggccccaacaccaagatggtgcgcttcaagaagggggacagcgtgggcctgcggctggccggcggcaatgatgtgggcatctttgtggccggcatccaggagggcaccagcgctgagcaggagggcctgcaggagggggaccagatcctgaaggtgaacacccaggacttccggggcctggtgagagaagatgctgtgctgtacctgctggagatccccaagggggagatggtgaccatcctggcccagagcagagcagatgtgtacagagacatcctggcctgtggccgcggggacagcttcttcatccgcagccactttgaatgtgagaaggagaccccccagagcctggccttcaccagaggagaggtgttccgggtggtggacaccctgtatgatggcaagctgggcaactggctggccgtgagaattggaaatgagctggagaagggcctcatccccaacaagagcagagctgagcagatggcctctgtgcagaatgcccagagggacaatgctggggacagagctgacttctggaggatgaggggccagaggtctggagtgaagaagaacctgaggaagagccgggaggacctgacagctgtggtgtctgtgtccaccaagtttcctgcctatgagcgggtgctgctgcgggaggccggcttcaagaggcctgtggtgctgtttggccccatcgctgacatcgccatggagaagctggccaatgagctgcctgactggttccagacagccaagacagagcccaaggatgctggcagcgagaagagcactggagtggtgcggctgaacacagtgcggcagatcatcgagcaggacaagcacgccctgctggatgtgacccccaaggctgtggacctgctgaactacacccagtggttccccatcgtcatcttcttcaacccagacagccggcagggcgtgaagaccatgaggcagaggctgaaccccaccagcaacaagagcagcaggaagctgtttgaccaggccaacaagctgaagaagacctgtgcccacctgttcaccgccaccatcaacctgaacagcgccaatgacagctggtttggcagcctgaaggacaccatccagcaccagcagggcgaggccgtgtgggtgtctgagggcaagatggagggcatggatgatgatcctgaggacaggatgagctacctgacagccatgggcgctgactacctgagctgtgacagccgcctcatcagtgactttgaggacacagatggagagggcggggcctacacagacaatgagctggatgagcctgctgaggagcccctggtgagcagcatcaccaggagcagcgagcctgtgcagcacgaggagagcatcaggaagcccagccctgagccccgggcccagatgaggcgggccgccagcagtgaccagctgcgggacaacagccccccaccagccttcaagccagagccccccaaggccaagacccagaacaaggaggagagctatgacttcagcaagagctatgagtacaagagcaaccccagcgctgtggccggaaatgagacccctggggccagcaccaagggctacccacctcctgtggccgccaagcccaccttcggccgcagcatcctgaagcccagcacccccatccccccccaggagggggaggaggtgggggagagcagcgaggagcaggacaatgcccccaagtctgtgctgggcaaggtgaagatctttgagaagatggaccacaaggcccggctgcagaggatgcaggagctgcaggaggcccagaatgcccgcatcgagatcgcccagaagcacccagacatctatgctgtgcccatcaagacccacaagccagaccccggcaccccccagcacaccagcagcaggcctcctgagccccagaaggcccccagccggccctaccaggacacccggggcagctatggcagtgatgctgaggaggaggagtaccggcagcagctgtctgagcacagcaagaggggctactacggccagagcgcccgctacagagacacagagctgtag

SEQ ID NO: 149984 - DNA, 3573 bp, Artificial Sequence
  derived and/or modified sequence
atgcccgtgcggggcgaccggggcttccccccccggcgggagctgagcggatggctccgcgccccaggaatggaggagttgatctgggagcagtacactgtgactcttcagaaggactctaaaaggggcttcggaattgcggtttcgggaggtcgcgacaaccctcactttgaaaacggcgagacttccatcgtgataagcgacgtgttacctggcggccctgctgatgggctgttgcaagagaacgacagggtagtgatggtgaacgggacccccatggaggacgtcctccactccttcgcagtccagcagcttagaaaaagcgggaaggtcgccgctatcgtggtgaagcgacctaggaaagtgcaggtcgcagccctgcaggcatccccacctctggatcaggacgacagggcttttgaggtcatggatgagttcgacggacggtcctttaggagcggttactccgaaagatcacggctgaactcacacgggggacgaagcagatcttgggaagattcacctgaaagaggacgtccacacgagcgggcccgcagccgtgaacgggacctgtctcgcgatagatcaagagggcgctcattggagagagggcttgatcaggaccatgcaagaacaagggatcggtctcggggccgcagccttgagagaggactggatcatgatttcgggccctctagggatagagatcgggatcggagtcggggacggtccatcgaccaggattatgaacgggcataccaccgagcctatgaccccgactacgaacgggcttatagcccggagtacagacgtggggccaggcacgatgccaggtcacgaggtccccgatctcggagcagagaacacccccattctcggagcccctcacctgaacccaggggacggccggggcctattggcgtgctgctcatgaaatcccgggccaatgaggaatatggtctacgcttgggttcacaaatttttgtcaaggagatgacaagaactggcctcgctaccaaggacggcaatctgcatgaaggggatataatcctaaagattaacggaactgtgacagagaatatgtctttgactgacgcaagaaagttgattgagaagtcaaggggaaagctgcaactggtggtgttgcgggactcccagcagacgctgattaatatcccctcactgaacgattcagactcagaaattgaagacatctcagagattgagtcgaatcgttcttttagcccagaggaaaggagacaccagtatagtgattacgattatcacagctctagcgagaagctgaaagaacggccatcgagccgggaagacactcctagtcgcctgtcaaggatgggcgccacacctactcccttcaagagtactggggatattgccgggaccgtcgttcctgagacaaacaaagagcccaggtatcaggaggaccctcctgcccctcaaccaaaggccgcccccagaacttttttgaggccctctcccgaagatgaggccatctatggaccaaacactaaaatggtgcgattcaagaagggagacagtgtaggacttagactggccggcgggaatgacgtcggcatctttgtggccggaatccaggaaggcacaagcgcagagcaggagggtctccaggagggggatcagatattgaaagtcaacactcaggatttccgcggtcttgtgcgagaggatgcagtcttgtacctgttggagatccccaagggtgagatggtgaccatattggcccagagcagagcagacgtgtaccgggacatactagcctgcggcaggggggatagttttttcatccgctctcacttcgaatgtgagaaggaaacaccccagtcgctggctttcactaggggcgaggttttccgcgtggtggacacgctgtatgacgggaagctggggaactggctggccgtcaggattgggaacgagttagaaaaaggcctaatcccaaataaatccagggcagagcagatggcctcggtccagaacgcccagcgggataacgccggagatcgcgcagacttctggaggatgcgcggccaaagatcaggagttaaaaaaaatctcaggaagagcagagaggacctgactgccgtggtttccgtctccaccaaattccctgcttacgaacgagttctgcttagagaggcaggattcaagaggcccgtggttttattcgggcccattgctgatattgctatggaaaagctggccaatgagctccctgactggttccagacggccaagactgagccaaaagatgccggcagcgagaaaagcacaggggtcgtgcgattgaacaccgtccgtcagattatcgagcaggacaaacacgcactgctggacgtcacacctaaagccgtagatctgctgaattacactcagtggtttcccatcgtcatttttttcaatccagacagccgccagggggtgaagactatgaggcagcgcctgaatcccacaagcaacaaatctagtcgtaagctcttcgatcaggccaacaagctcaagaagacatgcgcacacttattcaccgccacaattaacctcaattccgcaaacgactcctggttcggaagcctcaaggataccatacagcatcaacagggggaggctgtttgggtctccgaaggcaagatggaaggtatggatgatgacccggaggatcggatgtcatatctaaccgctatgggggcggattatctctcctgcgactctcggctgattagcgatttcgaagataccgatggggagggtggggcatacacagacaatgagcttgatgagcctgccgaggaaccgctggtgtcctccattactaggagctccgaacccgtccagcatgaagagagcattagaaagccaagtccagagccaagggcacagatgaggcgggcagctagttctgaccagcttcgggacaacagcccccctccagcattcaagcctgaaccaccaaaggccaaaacccagaacaaagaggaaagctatgatttctccaagagctacgagtataaatccaacccctccgccgtggcaggcaatgaaacacccggggcttccacaaagggttatcccccaccagtggctgcaaagcctacttttggtcgcagcatcctgaaacctagcaccccaattcctccacaggagggggaggaagtgggagaaagttcagaggaacaggacaacgcacctaagagcgtgctcggaaaagtgaagattttcgaaaaaatggaccataaagcgcgtctgcagaggatgcaggaacttcaggaagcacagaacgcccgcatcgagattgcccagaaacatccagacatctacgctgttcccattaagactcacaagcctgacccaggaacaccccagcacaccagtagccgccccccagagcctcaaaaggcaccatcaagaccctatcaagacactcgcgggtcctatggcagcgatgccgaggaagaggaatatcgtcaacagctctctgaacatagtaaacgaggatattatggccagagtgccagataccgtgacactgaactttag

SEQ ID NO: 149985 - DNA, 3573 bp, Artificial Sequence
  derived and/or modified sequence
atgccagtgaggggcgataggggtttcccaccgagacgcgaactttctggctggctacgagccccaggaatggaggaattgatttgggaacagtatacagtcacattgcaaaaagactccaagagagggttcggcatcgccgttagcgggggacgcgacaatccgcactttgaaaacggggaaacttccatcgtgatatctgacgtgctgcccggtggcccagccgatgggctgctccaggaaaacgacagagtggttatggttaacggcaccccaatggaggacgtgctgcacagcttcgctgtgcaacagttaaggaagtcaggaaaagtggccgctatcgtggtcaaacgtcccagaaaagttcaagtcgccgcactacaggctagtccgccacttgaccaggatgaccgtgccttcgaagtgatggacgaatttgacggcaggtcttttcgctccggctacagcgaaaggtcaaggttgaattcccacgggggtcggtccagaagctgggaggactctccagaaaggggccgtccccatgagagggctagaagcagagaaagagatttgagccgcgaccgctctcgaggcagatcactggaaagggggctggatcaggatcacgcacggacgcgggacaggtcgcgcggaaggtcacttgagaggggccttgaccacgacttcgggccatcccgcgacagggatcgggatcgttcgcggggtcgttcaatcgatcaggactatgaacgggcatatcatagggcctacgatcctgactacgaaagggcctatagccctgaataccggagaggtgcgaggcacgatgcgaggtcccgtggccctaggagcaggtcccgtgaacacccgcactcaaggagcccctctcccgagcccagaggaaggcccggacccattggtgtgctgctcatgaagtccagggcgaacgaggagtatggcctgaggctcgggagccaaattttcgtgaaggaaatgactcgcaccgggctcgcaacgaaggacggcaacctccacgaaggagacattatccttaaaatcaacggtactgtcaccgagaacatgagtttgaccgatgctcgtaagctcattgagaaatcacgcggaaagctgcagctagtcgtgctccgagatagtcagcaaaccctgattaacattcccagtctgaatgactccgacagtgaaatagaggatatcagcgaaattgaaagcaatcgatccttcagccctgaagagcgaagacatcagtacagcgactacgactaccactcttcttccgagaagcttaaggagagaccgagcagcagggaagataccccatccagattgtcccgcatgggggctacccctaccccctttaaatctaccggagatattgccggtacagtggtccctgagaccaacaaggaaccacgatatcaggaggacccaccagcccctcaacctaaggctgctccaagaaccttccttcgaccctccccagaagatgaagcaatttacggcccaaacacgaaaatggtgcgcttcaaaaaaggagacagcgtgggactccgattggcaggcggaaacgacgttgggatcttcgtagctggtatccaggaagggacatcagcagagcaagagggcttacaggaaggcgaccagattctgaaggtgaacactcaggattttagaggccttgttagggaagacgccgtcttgtacctgctggaaatccctaagggggaaatggtcactattctagcgcaatctcgagcggacgtgtaccgtgatattttagcttgcggaagaggggattccttcttcattcggtctcacttcgaatgcgagaaagaaactccacaatccctggcattcacgaggggagaggtattcagagttgtcgacacactgtacgacgggaaactcgggaattggttagctgttcgcattggcaacgaattggagaagggtctgattcccaacaagagtagggccgagcagatggcaagtgtccagaatgcacaacgcgataatgctggagacagagccgatttttggagaatgcgagggcagaggtctggcgtgaaaaagaacttacgtaaaagcagggaagatttgaccgctgttgtctcggtctccaccaagtttcctgcgtatgaaagagtgctcctacgcgaggctggtttcaagagaccagtggttttatttggccctatcgccgatatcgcgatggaaaaactggccaacgagcttcctgactggttccagacagcgaagactgagccaaaggacgcaggtagcgaaaaatcaacaggtgtggtaagattgaacacagtgcgccagatcattgagcaggataaacatgccctgctagacgtaacaccaaaggcggtagatttactgaactacacccaatggttcccgattgtcatattcttcaacccggactcacgccagggcgtgaagacaatgaggcagagactcaatcctacctcaaacaaatcatctcgcaagctctttgatcaagccaacaagcttaaaaaaacctgtgcacacctgttcacagccaccattaacctcaatagtgccaacgattcctggttcggctcactgaaggatacaattcagcatcagcagggagaggccgtctgggtatccgagggcaagatggagggcatggatgacgaccctgaggacagaatgtcgtacctgacagcaatgggcgctgattacctgagctgtgatagccgcctgatcagcgattttgaagatacggacggcgagggcggagcctacacagacaatgaattggacgaaccagctgaggagccgctcgtctcatccataacaagatctagcgaaccagtacagcacgaagaatcgatccgcaagccttctcccgagccaagagcacagatgcgcagagcagcctcatctgatcagttaagggacaatagcccccctcccgctttcaaacctgaacctccaaaggccaaaacacagaataaagaggagtcttatgatttctctaaatcatatgaatataagtcgaatccttcagccgtcgctggtaacgaaacgccgggagcatccactaaagggtatcctccccctgtcgctgccaagcccacattcgggcgttctatcctgaagccatctacccctattcctccccaagagggcgaagaggtgggagagtccagtgaggaacaggacaacgcccctaaatctgtgcttgggaaggtcaagattttcgagaagatggaccacaaggctaggctccagagaatgcaggagttacaggaggcccaaaacgccaggatcgagatagcccagaaacaccccgatatctatgccgttcctattaagacacacaaacccgaccctggcacgccacagcatacaagctcaaggccccctgagccgcagaaagcaccgagtcggccatatcaagacacccgaggtagctacggatcggacgccgaagaggaggaataccgtcagcagttgtccgaacactctaaacgagggtactatggccagtctgcacgttatagagacaccgaactctag

SEQ ID NO: 149986 - DNA, 4611 bp, Artificial Sequence
  derived and/or modified sequence
gcggaggcgccacgctcgggtcgggggcgggctgacgccgccgccgccgcgggaggagggacaaaggggtgggtccccgcgggtcggcaccccggcggttgggctgcgggtcagagcactgtccggtggtgcccaggaggagtaggagcaggagcagaagcagaagcggggtccggagctgcgcgcctacgcgggacctgtgtccgaaatgccggtgcgaggagaccgcgggtttccaccccggcgggagctgtcaggttggctccgcgccccaggcatggaagagctgatatgggaacagtacactgtgaccctacaaaaggattccaaaagaggatttggaattgcagtgtccggaggcagagacaacccccactttgaaaatggagaaacgtcaattgtcatttctgatgtgctcccgggtgggcctgctgatgggctgctccaagaaaatgacagagtggtcatggtcaatggcacccccatggaggatgtgcttcattcgtttgcagttcagcagctcagaaaaagtgggaaggtcgctgctattgtggtcaagaggccccggaaggtccaggtggccgcacttcaggccagccctcccctggatcaggatgaccgggcttttgaggtgatggacgagtttgatggcagaagtttccggagtggctacagcgagaggagccggctgaacagccatggggggcgcagccgcagctgggaggacagcccggaaagggggcgtccccatgagcgggcccggagccgggagcgggacctcagccgggaccggagccgtggccggagcctggagcggggcctggaccaagaccatgcgcgcacccgagaccgcagccgtggccggagcctggagcggggcctggaccacgactttgggccatcccgggaccgggaccgtgaccgcagccgcggccggagcattgaccaggactacgagcgagcctatcaccgggcctacgacccagactacgagcgggcctacagcccggagtacaggcgcggggcccgccacgatgcccgctctcggggaccccgaagccgcagccgcgagcacccgcactcacggagccccagccccgagcctagggggcggccggggcccatcggggtcctcctgatgaaaagcagagcgaacgaagagtatggtctccggcttgggagtcagatcttcgtaaaggaaatgacccgaacgggtctggcaactaaagatggcaaccttcacgaaggagacataattctcaagatcaatgggactgtaactgagaacatgtctttaacggatgctcgaaaattgatagaaaagtcaagaggaaaactacagctagtggtgttgagagacagccagcagaccctcatcaacatcccgtcattaaatgacagtgactcagaaatagaagatatttcagaaatagagtcaaaccgatcattttctccagaggagagacgtcatcagtattctgattatgattatcattcctcaagtgagaagctgaaggaaaggccaagttccagagaggacacgccgagcagattgtccaggatgggtgcgacacccactccctttaagtccacaggggatattgcaggcacagttgtcccagagaccaacaaggaacccagataccaagaggaccccccagctcctcaaccaaaagcagccccgagaacttttcttcgtcctagtcctgaagatgaagcaatatatggccctaataccaaaatggtaaggttcaagaagggagacagcgtgggcctccggttggctggtggcaatgatgtcgggatatttgttgctggcattcaagaagggacctcggcggagcaggagggccttcaagaaggagaccagattctgaaggtgaacacacaggatttcagaggattagtgcgggaggatgccgttctctacctgttagaaatccctaaaggtgaaatggtgaccattttagctcagagccgagccgatgtgtatagagacatcctggcttgtggcagaggggattcgttttttataagaagccactttgaatgtgagaaggaaactccacagagcctggccttcaccagaggggaggtcttccgagtggtagacacactgtatgacggcaagctgggcaactggctggctgtgaggattgggaacgagttggagaaaggcttaatccccaacaagagcagagctgaacaaatggccagtgttcaaaatgcccagagagacaacgctggggaccgggcagatttctggagaatgcgtggccagaggtctggggtgaagaagaacctgaggaaaagtcgggaagacctcacagctgttgtgtctgtcagcaccaagttcccagcttatgagagggttttgctgcgagaagctggtttcaagagacctgtggtcttattcggccccatagctgatatagcaatggaaaaattggctaatgagttacctgactggtttcaaactgctaaaacggaaccaaaagatgcaggatctgagaaatccactggagtggtccggttaaataccgtgaggcaaattattgaacaggataagcatgcactactggatgtgactccgaaagctgtggacctgttgaattacacccagtggttcccaattgtgatttttttcaacccagactccagacaaggtgtcaaaaccatgagacaaaggttaaatccaacgtccaacaaaagttctcgaaagttatttgatcaagccaacaagcttaaaaaaacgtgtgcacacctttttacagctacaatcaacctaaattcagccaatgatagctggtttggcagcttaaaggacactattcagcatcagcaaggagaagcggtttgggtctctgaaggaaagatggaagggatggatgatgaccccgaagaccgcatgtcctacttaaccgccatgggcgcggactatctgagttgcgacagccgcctcatcagtgactttgaagacacggacggtgaaggaggcgcctacactgacaatgagctggatgagccagccgaggagccgctggtgtcgtccatcacccgctcctcggagccggtgcagcacgaggagagcataaggaaacccagcccagagccacgagctcagatgaggagggctgctagcagcgatcaacttagggacaatagcccgcccccagcattcaagccagagccgcccaaggccaaaacccagaacaaagaagaatcctatgacttctccaaatcctatgaatataagtcaaacccctctgccgttgctggtaatgaaactcctggggcatctaccaaaggttatcctcctcctgttgcagcaaaacctacctttgggcggtctatactgaagccctccactcccatccctcctcaagagggtgaggaggtgggagagagcagtgaggagcaagataatgctcccaaatcagtcctgggcaaagtcaaaatatttgagaagatggatcacaaggccaggttacagagaatgcaggagctccaggaagcacagaatgcaaggatcgaaattgcccagaagcatcctgatatctatgcagttccaatcaaaacgcacaagccagaccctggcacgccccagcacacgagttccagaccccctgagccacagaaagctccttccagaccttatcaggataccagaggaagttatggcagtgatgccgaggaggaggagtaccgccagcagctgtcagaacactccaagcgcggttactatggccagtctgcccgataccgggacacagaattatagatgtctgagcacggactctcccaggcctgcctgcatggcatcagactagccactcctgccaggccgccgggatggttcttctccagttagaatgcaccatggagacgtggtgggactccagctcgtgtgtcctcatggagaacccaggggacagctggtgcaaattcagaactgagggctctgtttgtgggactgggttagaggagtctgtggctttttgttcagaattaagcagaacactgcagtcagatcctgttacttgcttcagtggaccgaaatctgtattctgtttgcgtacttgtaatatgtatattaagaagcaataactatttttcctcattaatagctgccttcaaggactgtttcagtgtgagtcagaatgtgaaaaaggaataaaaaatactgttgggctcaaactaaattcaaagaagtactttattgcaactcttttaagtgccttggatgagaagtgtcttaaattttcttcctttgaagctttaggcagagccataatggactaaaacattttgactaagtttttataccagcttaatagctgtagttttccctgcactgtgtcatcttttcaaggcatttgtctttgtaatattttccataaatttggactgtctatatcataactatacttgatagtttggctataagtgctcaatagcttgaagcccaagaagttggtatcgaaatttgttgtttgtttaaacccaagtgctgcacaaaagcagatacttgaggaaaacactatttccaaaagcacatgtattgacaacagttttataatttaataaaaaggaatacattgcaatccgtaa

SEQ ID NO: 149987 - protein, 506 aa, Artificial Sequence
  derived and/or modified sequence
MAGEVSAATGRFSLERLGLPGLALAAALLLLALCLLVRRTRRPGEPPLIKGWLPYLGVVLNLRKDPLRFMKTLQKQHGDTFTVLLGGKYITFILDPFQYQLVIKNHKQLSFRVFSNKLLEKAFSISQLQKNHDMNDELHLCYQFLQGKSLDILLESMMQNLKQVFEPQLLKTTSWDTAELYPFCSSIIFEITFTTIYGKVIVCDNNKFISELRDDFLKFDDKFAYLVSNIPIELLGNVKSIREKIIKCFSSEKLAKMQGWSEVFQSRQDVLEKYYVHEDLEIGAHHLGFLWASVANTIPTMFWAMYYLLRHPEAMAAVRDEIDRLLQSTGQKKGSGFPIHLTREQLDSLICLESSIFEALRLSSYSTTIRFVEEDLTLSSETGDYCVRKGDLVAIFPPVLHGDPEIFEAPEEFRYDRFIEDGKKKTTFFKRGKKLKCYLMPFGTGTSKCPGRFFALMEIKQLLVILLTYFDLEIIDDKPIGLNYSRLLFGIQYPDSDVLFRYKVKS

SEQ ID NO: 149988 - DNA, 1521 bp, Artificial Sequence
  derived and/or modified sequence
atggcaggcgaagtgagtgcggctactggtagattctccctcgagcgcctgggcctgcctggcctcgctctggctgcggcattattgctattggctctttgtctcctggtccgccggactagacgaccaggcgagcctcctcttataaagggctggctgccatacctgggcgtggttctcaatctgcgaaaagatccgttaaggtttatgaagacattacagaaacagcacggcgatacattcactgtgcttttagggggcaaatacatcacctttattttggacccattccagtaccagctcgtaattaagaaccataagcagctctccttcagagttttcagtaacaagttacttgaaaaagcattttctatctcacagttacaaaaaaatcacgacatgaatgatgaactgcatttgtgttaccagttcctgcagggcaagtccctggacatcctgcttgagtccatgatgcagaatctgaaacaggtcttcgagccccagttactcaaaactacttcttgggatactgcagagttgtatcccttttgcagctccatcattttcgaaatcacattcaccacaatctacggaaaggtgattgtctgtgacaacaataagtttatttcagaactccgggacgatttcctgaagtttgacgataagttcgcctacctagtgagcaacattcccatagaactgcttggcaatgtcaaaagtataagggagaagattatcaaatgcttttccagcgaaaagctggctaagatgcagggatggagcgaggtctttcagagtcgccaggatgtccttgagaagtattatgtgcacgaggatctggaaatcggggcccatcacctgggcttcttatgggcgtcagtcgccaataccatcccaaccatgttttgggctatgtattatctgttgcggcaccccgaggcaatggccgccgtgcgggatgaaatcgataggctgctacaatcaaccgggcaaaagaaggggtctgggtttcctatccatctgacacgggaacaattggatagtctgatctgtcttgaaagcagcatcttcgaggcgctgcgcttgtctagctatagtacaactattaggtttgtcgaagaggacttgacacttagctcagagactggtgattactgtgtccggaaaggggacttggttgcgatcttccctcccgtattacacggcgatcctgagattttcgaggcaccggaagagtttcgctacgataggtttatagaggatggaaagaaaaagaccacattttttaagcgcgggaaaaaacttaagtgttatttaatgccgttcgggacaggcacttcgaaatgtccaggtcggttcttcgcacttatggagatcaaacaattgcttgtgatcttgctgacttacttcgacctcgagatcatcgacgataagcctattggactgaattatagtcggttgctgttcggcatccagtaccccgactctgatgtgctctttcggtataaggtgaagtcctag

SEQ ID NO: 149989 - DNA, 1521 bp, Artificial Sequence
  derived and/or modified sequence
atggccggggaggtgtctgctgccaccggccgcttcagcctggagcggctgggcctgcccggcctggccctggccgccgccctgctgctgctggccctgtgcctgctggtgcggaggaccaggaggcctggagagcccccactcatcaagggctggctgccctacctgggcgtggtgctgaacctgaggaaggaccccctgcgcttcatgaagaccctgcagaagcagcacggggacaccttcaccgtgctgctgggcggcaagtacatcaccttcatcctggaccccttccagtaccagctggtgatcaagaaccacaagcagctgtccttccgggtcttcagcaacaagctgctggagaaggccttcagcatcagccagctgcagaagaaccacgacatgaatgatgagctgcacctgtgctaccagttcctgcagggcaagagcctggacatcctgctggagagcatgatgcagaacctgaagcaggtgtttgagccccagctgctgaagaccacctcctgggacacagctgagctgtaccccttctgcagcagcatcatctttgagatcaccttcaccaccatctacggcaaggtgattgtgtgtgacaacaacaagttcatcagcgagctgagagatgacttcctgaagtttgatgacaagtttgcctacctggtgagcaacatccccatcgagctgctgggcaatgtgaagagcatccgggagaagatcatcaagtgcttcagcagcgagaagctggccaagatgcagggctggagcgaggtgttccagagccggcaggatgtgctggagaagtactacgtgcatgaggacctggagatcggggcccaccacctgggcttcctgtgggcctctgtggccaacaccatccccaccatgttctgggccatgtactacctgctgcggcaccctgaggccatggctgctgtgagagatgaaattgaccggctgctgcagagcacaggccagaagaagggcagcggcttccccatccacctgacccgggagcagctggacagcctcatctgcctggagagcagcatctttgaggccctgcggctgagcagctacagcaccaccatccgctttgtggaggaggacctgaccctgagcagcgagaccggggactactgtgtgaggaaaggagacctggtggccatcttcccccctgtgctgcatggagaccctgagatctttgaggcccctgaggagttccgctatgaccgcttcattgaagatggcaagaagaagaccaccttcttcaagaggggcaagaagctgaagtgctacctgatgcccttcggcaccggcaccagcaagtgccccggccgcttctttgccctgatggagatcaagcagctgctggtgatcctgctgacctactttgacctggagatcattgatgacaagcccatcggcctgaactacagccggctgctgtttggcatccagtacccagacagtgatgtgctcttccgctacaaggtgaagagctag

SEQ ID NO: 149990 - DNA, 1521 bp, Artificial Sequence
  derived and/or modified sequence
atggccggcgaggtgagcgccgccaccggccggttcagcctggagcgtctcggattgccagggcttgctctcgccgcagcccttctgctgctggcattatgtctcctggtacgcaggaccaggagacccggagagcccccactgattaaggggtggctaccctatttgggcgtggttctcaacttgcgcaaagatcctctacgttttatgaagactctgcaaaagcagcacggcgacaccttcacagttctcctcggtggtaagtacattaccttcattctcgaccctttccagtatcagctagttatcaaaaatcataagcagctgagtttccgcgtcttcagtaataagctcctggagaaagctttttcaatttctcaactgcagaagaaccatgacatgaacgacgagttgcatctgtgctatcagtttttgcaggggaagtccctggatatattactggagtccatgatgcagaatttgaagcaagtgtttgagccccagctgctcaaaactacgagttgggatacagcagagctatatccgttctgctcgagtataatcttcgagataacttttaccacaatctacggaaaagtcatcgtttgtgataataacaagtttataagtgagttacgggatgattttctgaaatttgacgacaaattcgcgtatctggtgtccaacattcccatagagctgttgggaaacgtgaagtcgattcgcgagaagataattaagtgcttttccagcgagaagcttgccaagatgcagggctggtccgaagtgtttcaaagtcgccaggacgtgctcgagaagtactatgtgcacgaggacctcgagattggcgctcatcatctcggctttttatgggcttctgtcgcgaatacgatccctactatgttctgggccatgtattacctgcttaggcatccagaagctatggcggctgtgcgggatgagatagataggttgctgcagtctacaggccaaaagaaagggtctggtttccccattcacctgaccagggagcagttggactctttgatatgtctggagtccagcattttcgaagcactcaggctgtctagctattccacaacaattcggtttgtggaagaggatctaactctgagttctgagactggggattattgcgtgcggaagggggacctggtcgccatcttcccaccggtcctgcacggagaccctgagatcttcgaggctcctgaggagttcagatacgatcgttttatagaggatggcaaaaagaagacaaccttctttaaaagaggaaagaagctgaaatgctatcttatgccgtttggcactggcacatccaaatgtcctgggcgattctttgccctaatggaaattaaacagctgctggtcattcttttgacatacttcgatttggaaatcatcgacgacaaacctattggcctgaactattcacgtttgctattcggtatccaatacccagattccgacgtgctctttcggtacaaagtcaaatcatag

SEQ ID NO: 149991 - DNA, 1521 bp, Artificial Sequence
  derived and/or modified sequence
atggctggcgaggtttccgcagccacgggtaggttcagcttggaaaggctgggcttaccaggtcttgccctggcagcagcactcctcctcctggccctctgcttattagtgcgcagaactcgacgaccaggagagcctcccctcatcaagggatggctgccatatctcggagtggtcttgaatcttaggaaggatcctctgagattcatgaaaacactgcagaaacagcacggtgacacgtttaccgtgctcctgggcggaaaatacattaccttcatcttggatcccttccagtatcagctggtgatcaaaaaccacaagcaactaagcttccgcgtgttcagcaataagctgttggaaaaggctttctccatttcccaacttcagaaaaatcacgacatgaatgacgagctgcatttgtgctaccagttcctgcaaggtaagtccctggacatcttattggagagcatgatgcagaacctgaaacaagttttcgaaccccagctgctgaagaccaccagctgggacacagctgaactgtatccattctgctccagtattattttcgagattacattcacgaccatttacggaaaagttattgtatgcgataataataagtttatttcggagcttcgcgacgatttccttaaatttgacgacaagttcgcgtacctggtcagcaacattcctatagaacttttggggaacgtgaaaagtattagagagaagatcatcaagtgtttttcaagcgagaagctggcgaaaatgcagggctggagcgaggtgttccagagccgccaagatgttttggagaaatactacgtacacgaagacttggaaattggtgcgcaccacctgggctttttgtgggcgtctgttgcaaacactatacccaccatgttctgggccatgtattatctcctacgtcatcccgaggctatggccgctgtacgcgacgaaatagataggctcttgcaaagcactgggcaaaaaaaaggaagtggtttccctattcacctaacaagagagcagctcgactccctaatttgcctggagagcagcatctttgaggcacttaggctgtcttcatacagcaccacgatccgctttgtcgaggaagatctcacattatcatctgagacaggggactactgcgtcagaaagggcgatttggtcgccatcttcccccctgtgttgcacggggaccctgaaatctttgaggcacccgaagagttcagatacgatcggtttattgaagatggcaaaaagaaaactactttctttaagagagggaaaaaactgaaatgctacctgatgccattcggaaccggcacatctaaatgtcctgggcgattcttcgcactcatggaaattaaacagctgctggtgattctgttgacatattttgacctcgagattattgacgacaagcctataggtctgaattattccaggttactctttgggatacaatatcctgattccgatgtcctcttccggtacaaggtcaaatcatag

SEQ ID NO: 149992 - DNA, 2202 bp, Artificial Sequence
  derived and/or modified sequence
tcattcagcctgggagaccacggtgacattcctgtctgcgctgcgggcaggccagcctctccggccctggactagggggcgccgccgagagaagccgccgcaggctgcagagtcgccgaccgcgctgttcgcaggcagaccccgggctgcccaccgcggcctagcgcgcgccggatggcaggagaagtgtccgcggccacgggccgcttttcgctggagcggttgggcctcccgggcctggccctcgccgcggccctgctgctcctggccctctgcttgcttgtccggcgcaccaggagacccggtgagcctccattgataaaaggttggcttccttatcttggagtggtcctgaacttacgaaaagaccccttaaggttcatgaaaacacttcaaaagcaacatggtgacactttcacagttcttcttggtggaaagtacataacatttatcctggaccccttccagtaccagctagtgataaaaaatcataaacaattaagctttcgagtattttctaataaattattagagaaagcatttagcatcagtcagttgcaaaaaaatcatgacatgaatgatgagcttcacctctgctatcaatttttgcaaggcaaatctttggacatactcttggaaagcatgatgcagaatctaaaacaagtttttgaaccccagctgttaaaaaccacaagttgggacacggcagaactgtatccattctgcagctcaataatatttgagatcacatttacaactatatatggaaaagttattgtttgtgacaacaacaaatttattagtgagctaagagatgattttttaaaatttgatgacaagtttgcatatttagtatccaacatacccattgagcttctaggaaatgtcaagtctattagagagaaaattataaaatgcttctcatcagaaaagttagccaagatgcaaggatggtcagaagtttttcaaagcaggcaagatgtcctggagaaatattatgtgcacgaggaccttgaaataggagcacatcatttaggctttctctgggcctctgtggcaaacactattccaactatgttctgggcaatgtattatcttctgcggcacccagaagctatggcagcagtgcgtgacgaaattgaccgtttgctgcagtcaacaggtcaaaagaaagggtctggatttcccatccacctcaccagagaacaattggacagcctaatctgcctagaaagcagcatttttgaagctttacgactgtcctcatattcaaccaccattcgttttgttgaggaggatttgactctcagttcagagaccggggactactgtgtgcgaaagggagacttggtagccatctttcctccagtcctacatggtgaccctgaaatctttgaagctccagaggagtttagatatgatcgttttatagaagatggtaagaagaaaaccacctttttcaaaagagggaaaaagctgaagtgttacctaatgccgtttggaactggaaccagcaaatgtccaggccgattttttgcacttatggaaataaaacaattgttggttatacttttaacttattttgatttagaaataattgatgataagcccataggactaaactacagccgcttgttgtttggtattcagtatccagattctgatgttttatttagatacaaagtgaaatcttagagaagctaaaaggaaagaaaataaatctatcaaaattaccctaaacatcctaagctcatctatttctttttaatttctgcaaatgtaattgatttatttgtttaaaaagcgctaatttctatttgatctgatatcagtccagtttgtccttagtcacaaagcccatcataatataaaacaggatggtggcaggaaaatggacatcaaaatcaacttaagggtaggctcaaaacagggttgttgttgtttttttagtttctccttgttgtgattttcacctgttataataaatgtaccttcacaccaatagattgggcactgtggaatttaaatcactcaaattgttctctaatatgtaaaattacactttgaactactagaaaattgtgctggaaatggacacagtctaacaaattccaaattctcacagaagaaggaaattgaatttccatgagttacactggatgaaaatgttcccttcaagtataatattaataatacctatat

SEQ ID NO: 149993 - DNA, 1521 bp, Artificial Sequence
  derived and/or modified sequence
atggccggcgaggtgagcgccgccaccggcagattcagcctggagagactgggcctgcccggcctggccctggccgccgccctgctgctgctggccctgtgcctgctggtgagaagaaccagaagacccggcgagccccccctgatcaagggctggctgccctacctgggcgtggtgctgaacctgagaaaggaccccctgagattcatgaagaccctgcagaagcagcacggcgacaccttcaccgtgctgctgggcggcaagtacatcaccttcatcctggaccccttccagtaccagctggtgatcaagaaccacaagcagctgagcttcagagtgttcagcaacaagctgctggagaaggccttcagcatcagccagctgcagaagaaccacgacatgaacgacgagctgcacctgtgctaccagttcctgcagggcaagagcctggacatcctgctggagagcatgatgcagaacctgaagcaggtgttcgagccccagctgctgaagaccaccagctgggacaccgccgagctgtaccccttctgcagcagcatcatcttcgagatcaccttcaccaccatctacggcaaggtgatcgtgtgcgacaacaacaagttcatcagcgagctgagagacgacttcctgaagttcgacgacaagttcgcctacctggtgagcaacatccccatcgagctgctgggcaacgtgaagagcatcagagagaagatcatcaagtgcttcagcagcgagaagctggccaagatgcagggctggagcgaggtgttccagagcagacaggacgtgctggagaagtactacgtgcacgaggacctggagatcggcgcccaccacctgggcttcctgtgggccagcgtggccaacaccatccccaccatgttctgggccatgtactacctgctgagacaccccgaggccatggccgccgtgagagacgagatcgacagactgctgcagagcaccggccagaagaagggcagcggcttccccatccacctgaccagagagcagctggacagcctgatctgcctggagagcagcatcttcgaggccctgagactgagcagctacagcaccaccatcagattcgtggaggaggacctgaccctgagcagcgagaccggcgactactgcgtgagaaagggcgacctggtggccatcttcccccccgtgctgcacggcgaccccgagatcttcgaggcccccgaggagttcagatacgacagattcatcgaggacggcaagaagaagaccaccttcttcaagagaggcaagaagctgaagtgctacctgatgcccttcggcaccggcaccagcaagtgccccggcagattcttcgccctgatggagatcaagcagctgctggtgatcctgctgacctacttcgacctggagatcatcgacgacaagcccatcggcctgaactacagcagactgctgttcggcatccagtaccccgacagcgacgtgctgttcagatacaaggtgaagagctag

SEQ ID NO: 149994 - protein, 215 aa, Artificial Sequence
  derived and/or modified sequence
MNLVGSYAHHHHHHHPHPAHPMLHEPFLFGPASRCHQERPYFQSWLLSPADAAPDFPAGGPPPAAAAAATAYGPDARPGQSPGRLEALGGRLGRRKGSGPKKERRRTESINSAFAELRECIPNVPADTKLSKIKTLRLATSYIAYLMDVLAKDAQSGDPEAFKAELKKADGGRESKRKRELQQHEGFPPALGPVEKRIKGRTGWPQQVWALELNQ

SEQ ID NO: 149995 - DNA, 1749 bp, Artificial Sequence
  derived and/or modified sequence
gcggtcttatataagccagatccgcaggggagtccgcagaagggttaaacaggtctttgggcttcggcgacctcgcccgcggcagaaaccggtaagaagacagtgggctgcgcgtctcattttcagccttgcccggactctcccaaagccggcgcccagtagtggctccagagcccacaggtggcccccggcagtctctggggcgcatggagcggcgttaatagggctggcggcgcaggccagtagccgctccaacatgaacctcgtgggcagctacgcacaccatcaccaccatcaccacccgcaccctgcgcaccccatgctccacgaacccttcctcttcggtccggcctcgcgctgtcatcaggaaaggccctacttccagagctggctgctgagcccggctgacgctgccccggacttccctgcgggcgggccgccgcccgcggccgctgcagccgccaccgcctatggtcctgacgccaggcctgggcagagccccgggcggctggaggcgcttggcggccgtcttggccggcggaaaggctcaggacccaagaaggagcggagacgcactgagagcattaacagcgcattcgcggagttgcgcgagtgcatccccaacgtgccggccgacaccaagctctccaagatcaagactctgcgcctagccaccagctacatcgcctacctgatggacgtgctggccaaggatgcacagtctggcgatcccgaggccttcaaggctgaactcaagaaggcggatggcggccgtgagagcaagcggaaaagggagctgcagcagcacgaaggttttcctcctgccctgggcccagtcgagaagaggattaaaggacgcaccggctggccgcagcaagtctgggcgctggagttaaaccagtgagccgaggcccgcgccgaggacctggccaggccagccactcctgaagccccgggaggagaggaaggcagcggcgaacgccaggctctgggctccggcgactggtgctacgcatcccgcggagcttctgctgagcgccggcaggtcgtcggctgcaaccacacacttggatcgcacgtgcaatgtcctttgattttttttaatacattaagagaaagagaaatatatatatatccacccccagcccaaccgagggcggcccttggcggcaacatgcaagaaggagggactgtcgaacccaagggctcaaagacgcactcttccacccttttggagcgaatttagaacctcagccctatctccatttccctatctggctctttctctcttgtccctccatatgatccgccccgacgccgtcttctctaattaaaatgcaataaggaatcaattcttttctgcctgagaaagagaaccagacgcaggaagatgaaaggctgccctttgttcttcgaatcgtggtggttttattttatttttctttttgtcgctgcacttcctgtttagttccaagggaaacactttctctctttctctgtctctctcttttcttccttcttttccttcctttttgtttctatctaaataaaagctttccctgtgttggaaagtttttatgtatttaaactacctaccatgcctgttgtgctcaggtgtttgttcatcctgccatccccaacccttttctacctcaagtctgtgtgaccactcacagcccccctcccttcgccaaagcagtgtctatgctcttgattaataaaacattttctgaaatcaaaaaaaaaaaa

SEQ ID NO: 149996 - DNA, 1738 bp, Artificial Sequence
  derived and/or modified sequence
gcggtcttatataagccagatccgcaggggagtccgcagaagggttaaacaggtctttgggcttcggcgacctcgcccgcggcagaaaccggtaagaagacagtgggctgcgcgtctcattttcagccttgcccggactctcccaaagccggcgcccagtagtggctccagagcccacaggtggcccccggcagtctctggggcgcatggagcggcgttaatagggctggcggcgcaggccagtagccgctccaacatgaacctcgtgggcagctacgcacaccatcaccaccatcaccacccgcaccctgcgcaccccatgctccacgaacccttcctcttcggtccggcctcgcgctgtcatcaggaaaggccctacttccagagctggctgctgagcccggctgacgctgccccggacttccctgcgggcgggccgccgcccgcggccgctgcagccgccaccgcctatggtcctgacgccaggcctgggcagagccccgggcggctggaggcgcttggcggccgtcttggccggcggaaaggctcaggacccaagaaggagcggagacgcactgagagcattaacagcgcattcgcggagttgcgcgagtgcatccccaacgtgccggccgacaccaagctctccaagatcaagactctgcgcctagccaccagctacatcgcctacctgatggacgtgctggccaaggatgcacagtctggcgatcccgaggccttcaaggctgaactcaagaaggcggatggcggccgtgagagcaagcggaaaagggagctgcagcagcacgaaggttttcctcctgccctgggcccagtcgagaagaggattaaaggacgcaccggctggccgcagcaagtctgggcgctggagttaaaccagtgagccgaggcccgcgccgaggacctggccaggccagccactcctgaagccccgggaggagaggaaggcagcggcgaacgccaggctctgggctccggcgactggtgctacgcatcccgcggagcttctgctgagcgccggcaggtcgtcggctgcaaccacacacttggatcgcacgtgcaatgtcctttgattttttttaatacattaagagaaagagaaatatatatatatccacccccagcccaaccgagggcggcccttggcggcaacatgcaagaaggagggactgtcgaacccaagggctcaaagacgcactcttccacccttttggagcgaatttagaacctcagccctatctccatttccctatctggctctttctctcttgtccctccatatgatccgccccgacgccgtcttctctaattaaaatgcaataaggaatcaattcttttctgcctgagaaagagaaccagacgcaggaagatgaaaggctgccctttgttcttcgaatcgtggtggttttattttatttttctttttgtcgctgcacttcctgtttagttccaagggaaacactttctctctttctctgtctctctcttttcttccttcttttccttcctttttgtttctatctaaataaaagctttccctgtgttggaaagtttttatgtatttaaactacctaccatgcctgttgtgctcaggtgtttgttcatcctgccatccccaacccttttctacctcaagtctgtgtgaccactcacagcccccctcccttcgccaaagcagtgtctatgctcttgattaataaaacattttctgaaatca

SEQ ID NO: 149997 - DNA, 648 bp, Artificial Sequence
  derived and/or modified sequence
atgaacctggtgggtagttatgcgcaccaccaccatcaccaccacccacaccctgcgcacccaatgctgcacgaaccctttctgtttggccccgcttctagatgtcaccaggaacggccgtactttcagtcatggctgctgtctccagccgacgcagctcccgacttccccgcaggcggccccccgccggcagcagcagccgcagccacggcgtatggcccagacgctcgacctggccaatcacccggtaggctggaagcattggggggacgtcttgggcggcgcaagggttcaggccctaaaaaagagaggcgccgcactgagtcgatcaattctgcctttgccgagctacgagagtgcatcccgaacgtcccagccgacacgaaattgtcaaagatcaaaacccttcgcctcgccacctcatacatcgcgtatctaatggacgtactcgctaaggacgcacaaagcggcgaccccgaggcattcaaggctgaattaaaaaaggctgatggagggagggagtccaaacggaaaagggaactgcagcaacacgaaggctttccacctgctctcggcccagtggagaagcggataaaaggcagaactgggtggccacagcaagtgtgggcgttggaactgaaccagtag

SEQ ID NO: 149998 - DNA, 648 bp, Artificial Sequence
  derived and/or modified sequence
atgaacctggtgggcagctatgcccaccaccaccaccaccaccacccccacccagcccaccccatgctgcacgagcccttcctgtttggacctgccagccgctgccaccaggagcggccctacttccagagctggctgctgagccctgcagatgctgccccagacttccctgctgggggccccccacctgctgctgctgctgctgccacagcctacggcccagatgcccggcccggccagagccctggccgcctggaggccctgggcggccgcctgggccgcaggaagggcagcggccccaagaaggagaggagaagaacagagagcatcaacagcgcctttgctgagctgcgggagtgcatccccaacgtgcctgctgacaccaagctgagcaagatcaagaccctgcggctggccaccagctacatcgcctacctgatggatgtgctggccaaggatgcccagagcggggaccctgaggccttcaaggccgagctgaagaaggcagatggcggccgggagagcaagaggaagcgggagctgcagcagcacgagggcttccccccagccctgggccctgtggagaagaggatcaagggccgcacaggctggccccagcaggtgtgggccctggagctgaaccagtag

SEQ ID NO: 149999 - DNA, 648 bp, Artificial Sequence
  derived and/or modified sequence
atgaacctggtgggcagctacgcccaccaccaccaccaccaccacccacacccagcacaccctatgctccatgaaccattcctgttcggccccgcctccaggtgccaccaggagaggccatacttccagtcctggctgctgagtccagccgacgctgctcccgacttccctgccggaggaccgcctcctgccgccgccgctgccgctacagcttacggccctgatgctcggcccggacagagtcccgggagacttgaggcactgggtgggagacttggtaggcgcaagggcagcggcccaaaaaaagagcggagaaggactgaaagcattaacagcgctttcgcagagctgagggagtgtatacctaacgtgccggctgatactaaactctcgaagatcaaaacccttagactagctacctcttatatcgcctacctgatggacgtactagccaaggatgctcagtccggagatcccgaagcattcaaggctgagcttaagaaagcagacggaggccgcgagagcaaaaggaaacgggaactccagcagcacgagggcttccctcctgccctgggtccagtggaaaagagaataaagggtcggactgggtggcctcagcaggtttgggcactagagctgaaccaatag

SEQ ID NO: 150000 - DNA, 648 bp, Artificial Sequence
  derived and/or modified sequence
atgaatttagtggggtcatatgcccatcaccatcaccaccaccacccacatccagctcatcctatgttacatgagccttttttattcggtccagcatcacggtgtcaccaggaacgaccttattttcagtcttggctgctcagtcctgccgatgccgcaccggacttccccgcaggaggacctccacccgctgccgctgctgcagcaaccgcttacggtcccgacgcaaggcccggacagtcaccaggacggctggaagccttgggcggaagactaggtcgcagaaagggatccgggccaaagaaggagcgtcgcaggactgagtccatcaacagtgcgttcgccgaactcagggaatgcattcctaatgttccagccgacaccaagctgtctaaaatcaagaccctccggttagccacctcatatattgcctacctgatggacgtcctggctaaagacgcccaatcgggggatccggaagcatttaaagcagaattgaagaaggcggatggtgggagagagtccaaaaggaaacgtgagctgcagcaacacgaaggatttcccccagcccttgggccagtcgagaagagaatcaagggcagaacagggtggccacagcaagtgtgggctctggagctcaaccagtag

SEQ ID NO: 150001 - DNA, 648 bp, Artificial Sequence
  derived and/or modified sequence
atgaacctggtgggcagctacgcccaccaccaccaccaccaccacccccaccccgcccaccccatgctgcacgagcccttcctgttcggccccgccagcagatgccaccaggagagaccctacttccagagctggctgctgagccccgccgacgccgcccccgacttccccgccggcggccccccccccgccgccgccgccgccgccaccgcctacggccccgacgccagacccggccagagccccggcagactggaggccctgggcggcagactgggcagaagaaagggcagcggccccaagaaggagagaagaagaaccgagagcatcaacagcgccttcgccgagctgagagagtgcatccccaacgtgcccgccgacaccaagctgagcaagatcaagaccctgagactggccaccagctacatcgcctacctgatggacgtgctggccaaggacgcccagagcggcgaccccgaggccttcaaggccgagctgaagaaggccgacggcggcagagagagcaagagaaagagagagctgcagcagcacgagggcttcccccccgccctgggccccgtggagaagagaatcaagggcagaaccggctggccccagcaggtgtgggccctggagctgaaccagtag

SEQ ID NO: 150002 - protein, 313 aa, Artificial Sequence
  derived and/or modified sequence
MRRGALLAGALAAYAAYLVLGALLVARLEGPHEARLRAELETLRAQLLQRSPCVAAPALDAFVERVLAAGRLGRVVLANASGSANASDPAWDFASALFFASTLITTVGYGYTTPLTDAGKAFSIAFALLGVPTTMLLLTASAQRLSLLLTHVPLSWLSMRWGWDPRRAACWHLVALLGVVVTVCFLVPAVIFAHLEEAWSFLDAFYFCFISLSTIGLGDYVPGEAPGQPYRALYKVLVTVYLFLGLVAMVLVLQTFRHVSDLHGLTELILLPPPCPASFNADEDDRVDILGPQPESHQQLSASSHTDYASIPR

SEQ ID NO: 150003 - DNA, 942 bp, Artificial Sequence
  derived and/or modified sequence
atgagacggggcgcgctgttggcaggtgccctagcagcctacgccgcctacttggtgctcggagctctgttagtggccaggctggaggggccccatgaggcaaggctgcgcgccgaattagagaccctgcgagcccaacttctccaaagatccccttgtgtcgccgcaccggccctcgatgcttttgtcgagagggtgctggctgccggccgcctgggtcgcgtagtcctggcgaatgctagcggatctgcaaacgccagcgaccctgcttgggactttgcttctgctctgtttttcgcctccaccctgattaccacagtagggtatgggtacaccactccactgaccgatgcaggaaaggccttctcaattgcattcgcattgcttggagtccctactactatgttgctgctgactgccagtgcacagagactgagtctcctgctgacgcatgtgcctctgtcctggctcagcatgaggtggggttgggatccaaggagagcggcctgctggcatctggtggcgcttttaggcgtggtcgtgactgtgtgtttcctggtgcctgccgtgattttcgcacatctggaagaggcatggtcttttttagacgcattttacttttgtttcatttccctgagcacaatcggcctgggcgattatgtgcctggcgaagccccaggccagccttaccgcgctctttataaggtactcgttaccgtgtatctatttcttgggttagtcgcaatggtgttggtcctgcagaccttcagacatgtgagcgatctgcacggccttacagagttgatattactccctcctccatgccccgcgtcctttaacgccgatgaagacgatcgtgtcgacattctgggtcctcaacctgagtcacaccagcaactctctgccagcagccacactgattacgctagcataccgcgttag

SEQ ID NO: 150004 - DNA, 942 bp, Artificial Sequence
  derived and/or modified sequence
atgagaagaggagccctgctggccggggccctggccgcctatgctgcctacctggtgctgggcgccctgctggtggcccggctggagggcccccatgaggcccggctgcgggcagagctggagaccctgcgggcccagctgctgcagaggagcccctgtgtggccgccccagccctggatgcctttgtggagcgggtgctggccgccggccgcctgggccgggtggtgctggccaatgccagcggcagcgccaatgccagtgaccctgcctgggactttgccagcgccctcttctttgccagcaccctcatcaccaccgtgggctacggctacaccacccccctgacagatgctgggaaggccttcagcatcgcctttgccctgctgggcgtgcccaccaccatgctgctgctgacagccagcgcccagaggctgagcctgctgctgacccacgtgcccctgtcctggctgtccatgcgctggggctgggacccccggcgggccgcctgctggcacctggtggccctgctgggcgtggtggtgacagtgtgcttcctggtgcctgctgtgatctttgcccacctggaggaggcctggagcttcctggatgccttctacttctgcttcatcagcctgagcaccatcggcctgggggactatgtgcctggagaggcccctggccagccctaccgggccctgtacaaggtgctggtgacagtgtacctgttcctgggcctggtggccatggtgctggtgctgcagaccttccgccacgtgtctgacctgcacggcctgacagagctgatcctgctgcccccaccctgcccagccagcttcaatgctgatgaagatgacagagtggacatcctgggcccccagcctgagagccaccagcagctgagcgccagcagccacacagattatgccagcatccccaggtag

SEQ ID NO: 150005 - DNA, 942 bp, Artificial Sequence
  derived and/or modified sequence
atgcggcggggcgccctgctggccggcgccctggccgcctacgccgcttaccttgtcttgggtgccctcctggttgccagactggagggaccacacgaagcccgactaagggccgaactcgagacccttagagctcagctcttacagcgaagcccatgcgtggcagccccggctttagatgccttcgtggaacgggtgctggctgccggccgcctgggaagggtcgtgttggccaatgcaagcgggagtgccaacgcgtccgaccccgcttgggacttcgctagtgctctattctttgcttcaacgctgattactacggttggctacgggtataccacaccactgaccgatgccgggaaagcattcagcatcgcctttgccctgctgggagtgcctactaccatgctgctcctcactgcttctgcacagcgtctatccctgttactcacacatgtgccattgtcttggctgagcatgagatggggttgggaccccaggcgggctgcttgttggcatcttgtggccttgctaggggtggtggtcaccgtttgcttcctggtccctgctgtgatattcgcccacctggaagaggcttggtcttttttggacgcgttttatttttgcttcatttccctgagtactattgggctcggggattatgttcccggagaggcacctggccagccataccgggcattatataaggtactggtcacagtttacctctttctcggccttgttgcaatggttttagtgcttcaaacttttcgccatgtttccgacctccacggcctgactgagctgatcttgttacctccaccttgcccagcttcgtttaatgcagacgaagatgatcgggtagacatattaggacctcaacctgaatctcaccagcaactgagcgcctcatcacacacagattatgcctccattcctaggtag

SEQ ID NO: 150006 - DNA, 2648 bp, Artificial Sequence
  derived and/or modified sequence
gctgccgcgcctgtagcactcccggaactggaactaggtgccagacggtccggaggcgggggccacgtcagcggggccacccagggctcgcggggtcccggtgggtgccatgcggaggggcgcgcttctggcgggcgccttggccgcgtacgccgcgtacctggtgctgggcgcgctgttggtggcgcggctggaggggccgcacgaagccaggctccgagccgagctggagacgctgcgggcgcagctgcttcagcgcagcccgtgtgtggctgcccccgccctggacgccttcgtggagcgagtgctggcggccggacggctggggcgggtcgtgcttgctaacgcttcggggtccgccaacgcctcggaccccgcctgggacttcgcctctgctctcttcttcgccagcacgctgatcaccaccgtgggctatgggtacacaacgccactgactgatgcgggcaaggccttctccatcgcctttgcgctcctgggcgtgccgaccaccatgctgctgctgaccgcctcagcccagcgcctgtcactgctgctgactcacgtgcccctgtcttggctgagcatgcgttggggctgggacccccggcgggcggcctgctggcacttggtggccctgttgggggtcgtagtgaccgtctgctttctggtgccggctgtgatctttgcccacctcgaggaggcctggagcttcttggatgccttctacttctgctttatctctctgtccaccatcggcctgggcgactacgtgcccggggaggcccctggccagccctaccgggccctctacaaggtgctggtcacagtctacctcttcctgggcctggtggccatggtgctggtgctgcagaccttccgccacgtgtccgacctccacggcctcacggagctcatcctgctgccccctccgtgccctgccagtttcaatgcggatgaggacgatcgggtggacatcctgggcccccagccggagtcgcaccagcaactctctgccagctcccacaccgactacgcttccatccccaggtagctggggcagcctctgccaggcttgggtgtgcctggcctgggactgaggggtccaggcgaccagagctggctgtacaggaatgtccacgagcacagcaggtgatcttgaggccttgccgtccaccgtctctcctttgtttcccagcatctggctgggatgtgaagggcagcactccctgtccccatgtcccgggctccactgggcaccaacataaccttgttctctgtcctttctctcatcctctttacactgtgtctctctggctctctggcattctcgctgcctctgtctttccctcttgctgtctctgtttctcattctctttcatgttccgtctgtgtctctcaattaaccactcgtcaactgctgattctactgggctgtgggctcagacctcatttcaggcaccagattggtcgctacaccctggacaagtgactgcccgtctctgagccttgatttcctcagctgccaaatgggaagaatagaagaatttgcccctaaacccctcctgtgtgctggccctgtgctagacagtgctggagacatagttgggggtggagaactgcccttatggagcttgcagtccagtgaggtggacagacctgtccccagacagtgatggcccaaaatggtcaggactttaatggaggaggtgaggtgttgaaagcacaggcagagtggtcagggctgaagtcggagaagcatagggactaggcccaatccagcctggaaagtcagggaggacttcctagaggaagggacatcgaactaagacctgaactatgagaaataggcaggaagaagttgtacctgactcatttttctcaggtgtctccagggagcaggacccatggagggacccctggtgtaggcctgggcgatagactcttcctcagcagcctggcaggcaggaaacagacataggaccccagcccagatctgaatggcatgggaggtgctgcccttaaccatgacaccattgtaagagctgtccacatttgtatgttgtgccctggaatcagcctggttgagctcaaatcccaacttagccacgtctggcctgtgtccttgggcagtcacactacctctctgattttgtttccttatctgtaaaatggtgatcatcataatacaacttcaaaaggatttcaggctgagtgtggtggctcacgcctatacacccagcactttggaaggctgaggaaggaggatcgcttgaggccaggagtttgagactagcctaggcaacacagtgaggccttatctcaacaacaaccacaaaatctaaaaattagctgggtgtggtggtgcatgcctgtgatcctggctacttcagaggctgaggtggaaggatcacttgaggccaggagtttgaggctgcagtgagttatgatggcactgctgcactccagcctgcgggacagagtgagaccctgtctgaaagaaagagagaaagaaagaaagaaagagagagaaagaaagaaagaaagaaagggaaagatggaaggaaggaaggaaaaagaaagagaaagagagagagagagaaagaaaaagaaagaaaagtaagaaagaaaaaagaaaaagaaagaaaagt

SEQ ID NO: 150007 - DNA, 942 bp, Artificial Sequence
  derived and/or modified sequence
atgcgcagaggggctctgctcgcgggtgctttggctgcatatgccgcttacctggtgctgggggcactgctggtggctcgactggaggggccacacgaggctagattgagggccgaacttgaaaccctgcgagctcaactgttgcagcggagcccttgcgtggcagcacccgcactcgacgcattcgttgagagggtactggccgcaggtcggctaggtcgcgtggtgcttgctaatgctagtggaagcgccaacgcgtcagacccagcctgggatttcgcctctgccctgtttttcgcaagtacactgattacaacggtgggatacggatacaccactcccttgactgatgcagggaaagctttcagtattgcctttgctttgctgggggtgccaacaaccatgttactgctcaccgctagcgcccagagactcagcctactgttaacccacgtccccctgtcatggttaagcatgagatggggatgggacccccgtcgagcggcttgctggcatcttgtggcactcctgggagtggtggtcacagtttgtttcctggttccagctgtaatatttgcccatctagaagaagcctggagttttctagacgctttctacttttgtttcatctcgctgagtactattggattgggggattatgtgccgggtgaagcgcctggtcagccgtaccgggctttatacaaggttttggttactgtctatttattcctcggtcttgtcgccatggtgctggtactgcagaccttccggcacgtgtccgacctgcacggcttgactgaactgatacttctgccccctccctgcccagctagtttcaacgcagatgaagacgacagggtagatatcctgggtccccagccagagtcgcatcaacagctcagtgcgtcctcccatactgactatgccagcatcccaaggtag

SEQ ID NO: 150008 - DNA, 942 bp, Artificial Sequence
  derived and/or modified sequence
atgagaagaggcgccctgctggccggcgccctggccgcctacgccgcctacctggtgctgggcgccctgctggtggccagactggagggcccccacgaggccagactgagagccgagctggagaccctgagagcccagctgctgcagagaagcccctgcgtggccgcccccgccctggacgccttcgtggagagagtgctggccgccggcagactgggcagagtggtgctggccaacgccagcggcagcgccaacgccagcgaccccgcctgggacttcgccagcgccctgttcttcgccagcaccctgatcaccaccgtgggctacggctacaccacccccctgaccgacgccggcaaggccttcagcatcgccttcgccctgctgggcgtgcccaccaccatgctgctgctgaccgccagcgcccagagactgagcctgctgctgacccacgtgcccctgagctggctgagcatgagatggggctgggaccccagaagagccgcctgctggcacctggtggccctgctgggcgtggtggtgaccgtgtgcttcctggtgcccgccgtgatcttcgcccacctggaggaggcctggagcttcctggacgccttctacttctgcttcatcagcctgagcaccatcggcctgggcgactacgtgcccggcgaggcccccggccagccctacagagccctgtacaaggtgctggtgaccgtgtacctgttcctgggcctggtggccatggtgctggtgctgcagaccttcagacacgtgagcgacctgcacggcctgaccgagctgatcctgctgccccccccctgccccgccagcttcaacgccgacgaggacgacagagtggacatcctgggcccccagcccgagagccaccagcagctgagcgccagcagccacaccgactacgccagcatccccagatag

SEQ ID NO: 150009 - protein, 598 aa, Artificial Sequence
  derived and/or modified sequence
MTFQASHRSAWGKSRKKNWQYEGPTQKLFLKRNNVSAPDGPSDPSISVSSEQSGAQQPPALQVERIVDKRKNKKGKTEYLVRWKGYDSEDDTWEPEQHLVNCEEYIHDFNRRHTEKQKESTLTRTNRTSPNNARKQISRSTNSNFSKTSPKALVIGKDHESKNSQLFAASQKFRKNTAPSLSSRKNMDLAKSGIKILVPKSPVKSRTAVDGFQSESPEKLDPVEQGQEDTVAPEVAAEKPVGALLGPGAERARMGSRPRIHPLVPQVPGPVTAAMATGLAVNGKGTSPFMDALTANGTTNIQTSVTGVTASKRKFIDDRRDQPFDKRLRFSVRQTESAYRYRDIVVRKQDGFTHILLSTKSSENNSLNPEVMREVQSALSTAAADDSKLVLLSAVGSVFCCGLDFIYFIRRLTDDRKRESTKMAEAIRNFVNTFIQFKKPIIVAVNGPAIGLGASILPLCDVVWANEKAWFQTPYTTFGQSPDGCSTVMFPKIMGGASANEMLLSGRKLTAQEACGKGLVSQVFWPGTFTQEVMVRIKELASCNPVVLEESKALVRCNMKMELEQANERECEVLKKIWGSAQGMDSMLKYLQRKIDEF

SEQ ID NO: 150010 - protein, 412 aa, Artificial Sequence
  derived and/or modified sequence
MDLAKSGIKILVPKSPVKSRTAVDGFQSESPEKLDPVEQGQEDTVAPEVAAEKPVGALLGPGAERARMGSRPRIHPLVPQVPGPVTAAMATGLAVNGKGTSPFMDALTANGTTNIQTSVTGVTASKRKFIDDRRDQPFDKRLRFSVRQTESAYRYRDIVVRKQDGFTHILLSTKSSENNSLNPEVMREVQSALSTAAADDSKLVLLSAVGSVFCCGLDFIYFIRRLTDDRKRESTKMAEAIRNFVNTFIQFKKPIIVAVNGPAIGLGASILPLCDVVWANEKAWFQTPYTTFGQSPDGCSTVMFPKIMGGASANEMLLSGRKLTAQEACGKGLVSQVFWPGTFTQEVMVRIKELASCNPVVLEESKALVRCNMKMELEQANERECEVLKKIWGSAQGMDSMLKYLQRKIDEF

SEQ ID NO: 150011 - protein, 544 aa, Artificial Sequence
  derived and/or modified sequence
MASEELYEVERIVDKRKNKKGKTEYLVRWKGYDSEDDTWEPEQHLVNCEEYIHDFNRRHTEKQKESTLTRTNRTSPNNARKQISRSTNSNFSKTSPKALVIGKDHESKNSQLFAASQKFRKNTAPSLSSRKNMDLAKSGIKILVPKSPVKSRTAVDGFQSESPEKLDPVEQGQEDTVAPEVAAEKPVGALLGPGAERARMGSRPRIHPLVPQVPGPVTAAMATGLAVNGKGTSPFMDALTANGTTNIQTSVTGVTASKRKFIDDRRDQPFDKRLRFSVRQTESAYRYRDIVVRKQDGFTHILLSTKSSENNSLNPEVMREVQSALSTAAADDSKLVLLSAVGSVFCCGLDFIYFIRRLTDDRKRESTKMAEAIRNFVNTFIQFKKPIIVAVNGPAIGLGASILPLCDVVWANEKAWFQTPYTTFGQSPDGCSTVMFPKIMGGASANEMLLSGRKLTAQEACGKGLVSQVFWPGTFTQEVMVRIKELASCNPVVLEESKALVRCNMKMELEQANERECEVLKKIWGSAQGMDSMLKYLQRKIDEF

SEQ ID NO: 150012 - DNA, 1797 bp, Artificial Sequence
  derived and/or modified sequence
atgacctttcaggcatcgcacaggtcagcttggggaaagtctcgaaagaaaaactggcaatacgaaggcccgactcagaagttgttcctcaagcggaacaatgtatcagcacccgacggccccagtgatccttctatcagtgtttcgtcagaacagtcgggggctcagcaacctcctgcactgcaggtcgaaaggattgtggacaagcggaagaacaagaagggcaagactgagtatctggtgcgttggaaaggctatgactctgaggatgatacctgggagcccgaacaacacctggtcaattgtgaggaatatatacatgatttcaaccggaggcatacggaaaaacagaaagaatcaactcttaccaggacgaatcgcacatcacccaataatgcccgcaaacaaatcagtaggtctactaactctaacttttccaagacttcacccaaggcgctcgtgatcgggaaagaccatgagtccaagaactcccaactgtttgcagcgtcacaaaagttccgaaagaacactgcaccgagcctctcatctaggaagaatatggacctagccaaaagtggcattaaaattctggtaccaaagtctccagtgaagagccgaaccgccgtggacggctttcagtctgagtccccggagaagctcgatcccgtggaacaaggacaagaggatacagttgcccccgaagtggctgccgagaagcctgtaggtgcacttctgggaccaggagccgagcgtgcccgcatgggtagtcgaccacggattcatccactcgtcccgcaagtccccgggccagtgaccgcagcgatggcaacggggctggccgtgaacggaaaaggaaccagtcccttcatggatgccttgacggctaatgggacaaccaatatacagactagtgtgaccggggtgactgcaagcaagagaaagtttatcgatgaccggcgcgaccagccttttgataagcgattgagattttctgtcaggcagaccgagagcgcctaccggtacagagatatcgtagtgagaaaacaggatggtttcacacacattctgctttccacaaaaagcagcgagaataattccctgaacccggaagtgatgagagaggtgcagtctgcattgtcaaccgccgccgcagacgactccaagctcgtgctgctcagcgcggttggcagcgtattctgctgcggcctggactttatttactttattcgaagactaactgacgacaggaaacgtgagtccactaaaatggccgaagctatccggaattttgtcaatacatttattcaatttaagaaaccaataatcgtcgccgtcaatggaccggcaattggactgggggcctctattcttcccctgtgcgacgtggtgtgggcaaacgagaaggcttggttccagactccgtatacaacgttcggacagagcccggatggatgctccaccgtaatgttccccaaaatcatgggaggcgctagcgccaatgaaatgcttctgtctgggagaaagctcactgcacaagaggcatgcggaaaggggcttgtctctcaggtgttttggccaggaactttcactcaggaagtgatggttcgcataaaggagctggcatcctgcaaccctgtcgtgttagaagagtcaaaagcattagtgcgctgcaatatgaaaatggagctggagcaggctaatgaacgtgagtgcgaagtactaaaaaaaatttggggctcggcccaggggatggacagcatgctcaaatatctgcagagaaaaattgacgaattttag

SEQ ID NO: 150013 - DNA, 1635 bp, Artificial Sequence
  derived and/or modified sequence
atggcaagcgaggaattatatgaggtggaacggatagtggacaagcgaaagaacaagaaaggaaaaacggagtatctagttcgctggaagggctatgactccgaggacgacacttgggaacctgaacaacacctggttaactgtgaggagtatatccacgatttcaatcgccggcacacggaaaaacaaaaggagagcactctcaccagaactaaccgaacttcacctaacaatgctcggaagcagattagccgctccactaattcaaactttagcaaaacgtctccaaaggccttagtcatcgggaaggaccacgaatccaagaatagccaactattcgcggcgagtcagaaattcagaaaaaacactgctccttcactctcgagccgtaagaacatggacttggctaagagcgggatcaagatcttggtgcccaaatcccccgtgaaatctaggaccgcagttgatggatttcaatcggaaagcccagaaaaattagaccctgtcgagcaaggccaagaagatactgtcgcacctgaagttgctgcagagaagcccgtcggggccctcctgggcccgggcgcggaacgggcacgaatgggatcccgccctagaattcatcctctagtccctcaagtacctggccctgtaactgccgctatggccacgggtctcgctgtgaacggtaaaggcacttcaccctttatggatgctctaacagcaaatggcaccacgaacatccagacaagcgtgacaggggtgactgcctccaagcgaaaatttattgacgatcggagggaccagccattcgacaagagactgaggttctccgtccggcagaccgaatctgcttaccggtatagggatatagtggtgagaaagcaagacgggtttacccatatattgttgagtacgaagagcagcgagaataatagcctgaatccagaggttatgcgggaggtgcaaagcgctctttcaactgctgccgccgacgattctaaactcgtcttgctctcagccgtgggaagtgttttctgctgcggactcgacttcatttacttcatcagaagacttactgacgacagaaaacgggagtccacaaagatggccgaagccatccgaaattttgtgaataccttcattcagttcaagaaacctataatcgttgctgtgaacggtcctgccattggcctgggggcatccatactgcctctgtgcgatgtggtgtgggctaacgaaaaggcgtggttccagactccgtatacaacttttgggcagagtcctgatggctgctccacggtcatgttccctaaaatcatgggtggggcgagtgcaaatgagatgctgctgagcggacgaaagctgacagcacaggaggcatgcggcaagggcttagtctcccaggtgttctggccaggcacatttacccaggaagtgatggtgcgcattaaagagcttgcttcatgtaacccagtcgttctcgaggagagtaaagcgctggtccgctgcaatatgaagatggagttggaacaagcaaatgaaagggaatgtgaagtgctgaaaaagatctggggaagcgcccaagggatggactccatgctcaaatatttgcagcgaaagatcgacgagttctag

SEQ ID NO: 150014 - DNA, 1797 bp, Artificial Sequence
  derived and/or modified sequence
atgaccttccaggccagccacaggtctgcctggggcaagagcaggaagaagaactggcagtatgagggccccacccagaagctgttcctgaagaggaacaacgtgtctgccccagatggccccagcgaccccagcatctctgtgagcagcgagcagagcggggcccagcagcccccagccctgcaggtggagcgcatcgtggacaagaggaagaacaagaagggcaagacagagtacctggtgcgctggaagggctatgacagtgaagatgacacctgggagcctgagcagcacctggtgaactgtgaggagtacatccatgacttcaacagaagacacacagagaagcagaaggagagcaccctgaccaggaccaacagaaccagccccaacaatgccaggaagcagatcagccgcagcaccaacagcaacttcagcaagaccagccccaaggccctggtgattggcaaggaccacgagagcaagaacagccagctgtttgctgccagccagaagttcaggaagaacacagcccccagcctgagcagcaggaagaacatggacctggccaagagcggcatcaagatcctggtgcccaagagccctgtgaagagcaggacagctgtggatggcttccagagcgagagccctgagaagctggaccctgtggagcagggccaggaggacacagtggcccctgaggtggccgctgagaagcctgtgggcgccctgctgggccctggagctgagcgggccaggatgggcagccggccccgcatccaccccctggtgccccaggtgcccggccctgtgacagctgccatggccaccggcctggccgtgaatggcaagggcaccagccccttcatggatgccctgacagccaacggcaccaccaacatccagacctctgtgactggagtgacagccagcaagaggaagttcattgatgacagaagagaccagccctttgacaagaggctgcgcttctctgtgcggcagacagaaagtgcctaccgctacagagacatcgtggtgaggaagcaggacggcttcacccacatcctgctgagcaccaagagcagcgagaacaacagcctgaaccctgaggtgatgagggaggtgcagagcgccctgagcacagctgctgctgatgacagcaagctggtgctgctgtctgctgtgggctctgtgttctgctgcggcctggacttcatctacttcatccggcggctgacagatgacaggaagcgggagagcaccaagatggccgaggccatccggaactttgtgaacaccttcatccagttcaagaagcccatcatcgtggccgtgaatggacctgccatcggcctgggcgccagcatcctgcccctgtgtgatgtggtgtgggccaatgagaaggcctggttccagaccccctacaccaccttcggccagagcccagatggctgcagcacagtgatgttccccaagatcatgggcggggccagcgccaatgagatgctgctgagcggcaggaagctgacagcccaggaggcctgtgggaagggcctggtgtcccaggtgttctggccaggcaccttcacccaggaggtgatggtgcgcatcaaggagctggccagctgcaaccctgtggtgctggaggagagcaaggccctggtgcgctgcaacatgaagatggagctggagcaggccaatgaaagagaatgtgaggtgctgaagaagatctggggcagcgcccagggcatggacagcatgctgaagtacctgcagaggaagattgatgagttctag

SEQ ID NO: 150015 - DNA, 1635 bp, Artificial Sequence
  derived and/or modified sequence
atggccagcgaggagctgtatgaggtggagcgcatcgtggacaagaggaagaacaagaagggcaagacagagtacctggtgcgctggaagggctatgacagtgaagatgacacctgggagcctgagcagcacctggtgaactgtgaggagtacatccatgacttcaacagaagacacacagagaagcagaaggagagcaccctgaccaggaccaacagaaccagccccaacaatgccaggaagcagatcagccgcagcaccaacagcaacttcagcaagaccagccccaaggccctggtgattggcaaggaccacgagagcaagaacagccagctgtttgctgccagccagaagttcaggaagaacacagcccccagcctgagcagcaggaagaacatggacctggccaagagcggcatcaagatcctggtgcccaagagccctgtgaagagcaggacagctgtggatggcttccagagcgagagccctgagaagctggaccctgtggagcagggccaggaggacacagtggcccctgaggtggccgctgagaagcctgtgggcgccctgctgggccctggagctgagcgggccaggatgggcagccggccccgcatccaccccctggtgccccaggtgcccggccctgtgacagctgccatggccaccggcctggccgtgaatggcaagggcaccagccccttcatggatgccctgacagccaacggcaccaccaacatccagacctctgtgactggagtgacagccagcaagaggaagttcattgatgacagaagagaccagccctttgacaagaggctgcgcttctctgtgcggcagacagaaagtgcctaccgctacagagacatcgtggtgaggaagcaggacggcttcacccacatcctgctgagcaccaagagcagcgagaacaacagcctgaaccctgaggtgatgagggaggtgcagagcgccctgagcacagctgctgctgatgacagcaagctggtgctgctgtctgctgtgggctctgtgttctgctgcggcctggacttcatctacttcatccggcggctgacagatgacaggaagcgggagagcaccaagatggccgaggccatccggaactttgtgaacaccttcatccagttcaagaagcccatcatcgtggccgtgaatggacctgccatcggcctgggcgccagcatcctgcccctgtgtgatgtggtgtgggccaatgagaaggcctggttccagaccccctacaccaccttcggccagagcccagatggctgcagcacagtgatgttccccaagatcatgggcggggccagcgccaatgagatgctgctgagcggcaggaagctgacagcccaggaggcctgtgggaagggcctggtgtcccaggtgttctggccaggcaccttcacccaggaggtgatggtgcgcatcaaggagctggccagctgcaaccctgtggtgctggaggagagcaaggccctggtgcgctgcaacatgaagatggagctggagcaggccaatgaaagagaatgtgaggtgctgaagaagatctggggcagcgcccagggcatggacagcatgctgaagtacctgcagaggaagattgatgagttctag

SEQ ID NO: 150016 - DNA, 1797 bp, Artificial Sequence
  derived and/or modified sequence
atgaccttccaggccagccaccggagcgcctggggcaagagccggaagaagaattggcagtatgaaggccctacccagaagctgttcctgaaaagaaacaacgtgtccgcgcccgatggcccatcagacccgtctatttctgtgtccagcgagcagtctggagctcagcagccccccgccttgcaggtggagaggatcgttgataagcgtaagaataagaaaggtaagacagagtatctcgtacggtggaaggggtatgactccgaagacgacacctgggagccagagcaacacctagttaactgtgaagaatatatccacgattttaacaggcggcacactgagaagcagaaggagagcactctgacgagaactaatagaaccagtccaaacaacgcacgcaagcaaatctctcgcagcacgaattcaaattttagcaaaacaagccccaaggcactagttatcggaaaagatcacgaaagcaagaatagccaactctttgcagcatctcagaagttcagaaaaaacacagctccaagtctctcgtctagaaagaatatggacctggcaaagtctggaataaagattttggtccctaagagccctgtcaaatcccgcacagctgttgatgggtttcaatccgaaagtccagaaaagctggatcccgtggagcagggccaggaagatactgtggcaccagaggtagccgcagaaaagcctgttggagccctgctgggccccggcgcagaacgcgcacggatgggctctcgcccaagaattcaccccctggtaccacaggtccccgggccagtaaccgcggctatggccaccggtctggcagtcaatgggaaagggaccagcccgttcatggatgcactaactgctaacggtaccaccaatatccagacctccgtgactggcgtcaccgccagcaaaagaaagttcatcgacgataggcgcgaccagcccttcgataagaggctacgtttttccgtcaggcaaacagagtcagcatacaggtacagagatatcgtggttaggaagcaggatggcttcactcacattctcttaagcactaaaagtagtgagaacaattctctcaaccctgaagtgatgagggaagtgcagtcagcactgagcacagctgctgcggatgattctaagctcgttctgctcagtgcagttgggtccgtgttttgttgcgggctggacttcatatatttcatccgccgtcttaccgatgaccggaaacgcgagtccactaagatggccgaggccatcaggaatttcgtgaatacatttattcagtttaaaaagcctattatcgtggctgtgaacgggcctgctattggcttgggggccagtattctgcccttgtgcgacgtggtgtgggccaacgagaaggcctggttccagactccatacaccaccttcgggcagtcaccggacggctgctcaaccgtaatgttcccaaagattatgggaggggcctccgccaatgagatgttactctccggtcgcaagctgaccgcccaggaggcctgcggcaaggggctagtcagccaggttttttggcccggaacctttacccaggaagtcatggttcgcattaaggaactcgcctcctgtaatccggtggtgcttgaggagagtaaggccctggttagatgcaacatgaagatggagttagagcaggccaacgaaagagagtgcgaggtcctcaagaagatctggggttctgctcaaggaatggactctatgctcaagtacttacaaaggaaaatcgacgagttctag

SEQ ID NO: 150017 - DNA, 1635 bp, Artificial Sequence
  derived and/or modified sequence
atggccagcgaggagctgtacgaggtggagcggatcgtggacaagaggaagaataaaaagggtaaaactgagtatcttgtccgctggaagggttacgactcagaggatgacacatgggagcccgagcagcacttggtaaattgtgaagaatacatccacgacttcaaccggcgccataccgagaaacagaaggagagcacactgacacggacaaacaggacttccccaaacaacgccagaaaacaaatcagtaggtcgacaaactctaacttttcaaagacatcacccaaggcacttgtgatcggcaaggaccatgagtctaaaaattctcagctgtttgccgctagccagaaatttcgtaaaaatacggcaccatcgctttcttctaggaaaaacatggatttagcgaagtccggcataaagattctggtccccaagtcccccgtgaaatcccgtactgcggtggacggattccaatcagagtctcccgaaaaactcgacccagttgagcaaggccaggaggacactgtggcccccgaggtagccgctgagaagcccgtgggcgcactccttgggccaggcgcagagagagctaggatggggtcaagacctagaatacacccactcgtgccacaggtgcctggaccagttacagcggctatggcaaccggtctggccgttaatggtaagggcacctccccgttcatggacgcgttaacggcgaacggcacaacaaatattcagaccagtgtgaccggggtaaccgcctccaagcggaaattcatcgacgatcgacgtgaccaaccgtttgacaagaggctccgcttctcggtgaggcagactgagagcgcctacaggtaccgggatatcgtggtgagaaaacaagatggtttcactcacatactgctgagtacaaaatcaagtgagaataattctctgaatccagaggttatgcgcgaagtgcaaagtgctctgagcaccgcggccgccgatgattccaaactagttctgctaagcgcagtgggatctgtgttctgctgtggactcgacttcatctacttcatcagacgattaaccgatgatagaaaacgcgagagtactaagatggctgaagctattaggaatttcgtcaacaccttcatccagtttaaaaagcccataatcgtggccgttaatgggcccgccattggattgggcgcttcaatcctaccgctctgtgacgtggtttgggcaaacgagaaggcttggtttcagaccccatacacgacatttggacagtctcctgacgggtgctctaccgttatgttcccaaagattatgggcggcgcctcggccaacgaaatgttgctctctggccgaaagctgacggcccaggaggcttgcggcaagggcttagttagccaggtgttttggcccggcactttcacccaggaggtgatggttaggatcaaggaattagcctcgtgcaaccctgtagtacttgaagagtccaaggcattggttcggtgcaacatgaaaatggagcttgagcaagccaatgagcgggagtgtgaggtcttaaaaaagatatggggttctgcacaagggatggattccatgctgaagtacctgcaacggaagattgacgagttttag

SEQ ID NO: 150018 - DNA, 1797 bp, Artificial Sequence
  derived and/or modified sequence
atgaccttccaagctagccaccgctcggcctggggcaaatcaaggaagaaaaattggcagtatgagggacccacacaaaagttattcctgaagcgcaataacgtatctgctccggatggtccatcagaccctagtatcagtgtgtcaagcgagcagtcgggcgctcagcagcctcctgcccttcaagtcgaacgaatagttgacaaacgcaaaaacaagaagggtaagacggaatacctggtgcggtggaaaggatacgactctgaggacgatacttgggaacccgaacagcatcttgtaaattgcgaagaatacattcacgactttaaccgtcgtcacactgagaaacagaaagagagtactctcacaagaaccaatagaacaagcccgaataatgcgagaaaacagatatcccgcagcacaaatagcaacttttctaagacttcaccaaaagccctggtaatcggaaaggatcatgagagtaagaacagtcagctgtttgctgcttctcagaagttcagaaagaacaccgcgccatccctctccagcaggaaaaacatggatctggccaaaagtggcataaagatacttgtgccgaagtcccccgtgaagagtagaaccgccgtcgacgggttccaatcagagtcacccgagaaactggatcccgtggaacaaggacaggaggataccgttgccccagaggtcgcggctgagaaaccagttggggctttgcttggaccaggggctgaaagagcccgtatgggcagccggcctagaattcatcctctggtgccgcaggttcccggaccggtaaccgctgcaatggccacaggactcgctgtcaatgggaagggaacatccccctttatggatgcattgactgccaatggtacaacgaacattcaaacaagcgtgaccggagtgacagcttccaagagaaagttcatcgacgaccggagagaccagccgtttgataaaaggttacggtttagcgtgcggcagactgagtccgcttacaggtatcgcgacatcgtggtccggaaacaagacggtttcacccacatcttattaagtaccaaatcaagcgagaataactccctcaatcctgaagtgatgcgcgaggtgcagagcgccctatccacagccgctgctgacgattctaaattagtcctcctatcagccgtggggtctgtgttttgttgcgggctagattttatctacttcatcaggagactgacggatgacaggaaaagggagagtaccaagatggctgaggcaattcgcaacttcgtaaacacatttatacagtttaagaaaccaattatcgtcgccgttaacggcccagcaatcggcctgggcgcatccatcctccctctctgcgacgtagtctgggcaaacgagaaagcatggtttcaaacgccatacactacattcgggcagtctccagacggttgtagcaccgttatgttccccaagatcatgggtggggctagtgctaacgaaatgctgctgagcggccgaaagctcacagcccaggaggcttgtggcaagggtctcgtcagccaggtgttctggccgggaacttttacacaggaggtgatggtccgcatcaaggagcttgccagttgtaatcctgtcgtgctggaagagagtaaggcactggtgaggtgcaacatgaagatggaactcgaacaggctaacgaacgcgaatgcgaggtgctgaagaaaatttggggaagcgcccagggaatggactccatgttgaagtatttgcaaagaaagattgacgagttttag

SEQ ID NO: 150019 - DNA, 1635 bp, Artificial Sequence
  derived and/or modified sequence
atggcctccgaggagttatacgaggtcgagagaatcgtggacaaacggaagaacaagaaagggaagacagaatacctggttcgttggaaggggtacgacagcgaggatgatacctgggagcctgagcaacacctcgtgaattgcgaggagtatattcatgacttcaaccgccgtcacaccgaaaagcagaaggaaagcacgctcacacgaactaacagaaccagtcctaacaatgcgaggaaacagataagtagaagtaccaattctaacttctctaagacatcacccaaagcactcgtaatcggaaaagatcacgagagtaagaatagccaattgttcgctgcaagtcaaaaattcaggaagaatactgcgccttccctgagctcccggaagaacatggatctggccaagtctggaataaaaattctggttcctaagtccccagtgaagtctaggaccgccgtggacgggtttcagagcgaaagtccagagaagttggatcctgttgagcagggtcaagaagatactgtcgcccctgaagttgccgctgagaagcccgtcggcgcactgctggggcctggcgctgaaagggcgagaatggggtcccgacctcggatacatccactcgtgccacaggtaccaggcccagtcacggccgcaatggccactggcttggctgttaatggaaaaggtacctccccttttatggacgcgttaactgcgaatggaacgaccaatattcaaacatctgtaacaggggtaactgccagtaagcggaagttcatagatgataggagggatcagcccttcgacaaacggctgcgtttttcagtgagacagacggagagtgcctaccggtaccgggacattgtggtccgcaagcaagatgggttcacacacattcttctcagcaccaaatcgtccgaaaacaactccctcaatcctgaagtgatgcgggaagtgcagagcgccctcagtaccgccgctgcggacgacagcaaactggtactgctgtcggcagtgggcagcgtattttgctgcggcttagacttcatttacttcatcagaagactcaccgatgaccggaaacgggagagcaccaaaatggccgaagcgataaggaactttgtgaataccttcatccaatttaagaaaccaattattgtggcagtgaatggacccgcaatcggtctcggtgccagcatattacccttgtgcgacgttgtgtgggccaatgaaaaggcttggttccaaactccctacactacgttcggccagagccctgacggctgctccacggtaatgttcccaaaaattatggggggagcatctgctaacgagatgctgctaagtggacgaaagctcaccgctcaggaagcatgtgggaaaggcctcgtaagccaggttttttggccgggaaccttcacgcaggaggtgatggtacgcattaaggaacttgcatcctgcaacccagtggtcctggaggagagcaaagccctggtgaggtgtaacatgaagatggagctggaacaggctaatgaaagagagtgcgaagtgcttaagaagatctggggcagcgcacagggaatggatagcatgttgaaatacctgcagaggaaaattgacgaattctag

SEQ ID NO: 150020 - DNA, 3419 bp, Artificial Sequence
  derived and/or modified sequence
ggagagaggacctatttctacctaaggacattcccggaaggcaatgggtttcaaacaatatcctgaagagactcatctcggggaactaagcaggtggtcatcagagaacacagagcccccggaagaattttatgacatttcaggcaagccacaggtcagcctggggaaaaagcaggaagaaaaactggcaatacgagggcccaacccaaaagttattcctgaagagaaacaacgtgtcagcaccagatgggccttcagaccccagcatctccgtgagcagtgagcaaagcggggcacagcagcctcccgctttacaggttgaaaggattgttgacaaaaggaaaaataaaaaagggaagacagagtatttggttcggtggaaaggctatgacagcgaggacgacacttgggagccggaacagcacctcgtgaactgtgaggaatacatccacgacttcaacagacgccacacggagaagcagaaggagagcacattgaccagaacaaacaggacctctcccaacaatgctaggaaacaaatctccagatccaccaacagcaacttttctaagacctctcctaaggcactcgtgattgggaaagaccacgaatccaaaaacagccagctgtttgctgccagccagaagttcaggaagaacacagctccatctctctccagccggaagaacatggacctagcgaagtcaggtatcaagatcctcgtgcctaaaagccccgttaagagcaggaccgcagtggacggctttcagagcgagagccctgagaaactggaccccgtcgagcagggtcaggaggacacagtggcacccgaagtggcagcggaaaagccggtcggagctttattgggccccggtgccgagagggccaggatggggagcaggcccaggatacacccactagtgcctcaggtgcccggccctgtgactgcagccatggccacaggcttagctgttaacgggaaaggtacatctccgttcatggatgcattaacagccaatgggacaaccaacatacagacatctgttacaggagtgactgccagcaaaaggaaatttattgacgacagaagagaccagccttttgacaagcgattgcgtttcagcgtgaggcaaacagaaagtgcctacagatacagagatattgtggtcaggaagcaggatggcttcacccacatcttgttatccacaaagtcctcagagaataactcactaaatccagaggtaatgagagaagtccagagtgctctgagcacggccgctgccgatgacagcaagctggtactgctcagcgccgttggcagcgtcttctgttgtggacttgactttatttattttatacgacgtctgacagatgacaggaaaagagaaagcactaaaatggcagaagctatcagaaacttcgtgaatactttcattcaatttaagaagcccattattgtagcagtcaatggcccagccattggtctaggagcatctatattgcctctttgcgatgtggtttgggctaatgaaaaggcttggtttcaaacaccctataccaccttcggacagagtccagatggctgttctaccgttatgtttcccaagataatgggaggagcatctgcaaacgagatgctgctcagtggacggaagctgacagcgcaggaggcgtgtggcaagggcctggtctcccaggtgttttggcccgggacgttcactcaggaagtgatggttcgcattaaggagcttgcctcgtgcaatccagttgtgcttgaggaatccaaagccctcgtgcgctgcaacatgaagatggagctggagcaggccaacgagagggagtgtgaggtgctgaagaaaatctggggctcggcccaggggatggactccatgttaaagtacttgcagaggaagatcgatgagttctgagtgtcgggctgcccactggtgacaccgggatcgggctgagcaggagaacatcaccggctccagttcccctgatccattctcacagcctgaaacaagctcacccgtagcttacgcttggaagcaggactgggaacatccacgctatttattatcgaggagttttaaagtactgtaactttaaaataaataactacaaagcttctttgtccaaacgtcattattttatacttatatacacgcaggtgtaaaagtataaaggtgagcactagactgctcttagaagctctaatttttgttttctttggctagtactgtataaaaaacagaattgtgttttattggttttggatgacagaaaagtctggaataatgtttgttttcctcatttcttccttctagaacacagaatctaaaggggtattagccagcctcgcctccctgccccacgtagagacacagagtgatgtgaggcgttggctttttctccaagaaggtacagatacctcagattcgggaaactcaaaatcaaaagacttagcttctaggataaatacttctgatgaaaaatccgctgaggagcataccccaaaccagacatatgcttaggattcatgctgagatatcaattggtttccccttctttttaaaatacgtccagttcttacccagttaacatgaagaaaccactgtctctagaagaaagcttgttttgcagtattagtgaatcactgaatagcttaagtatgactatctaagttataagttagtctttagtgggttttaaatagtttttctgacccttctgaaaaataactacataagtgcttcttgttgctgggtgagaaatactactttatagacagttttggttttctgtttgcagatatgattgatgtatttcaccaaaataaaatatttttatgtttataaagtgtaatttttaggttcacttagaatatattttatttaataagttaaaattcttttggcacactattaaatgcaaaaactcctttcaaaacaaaaaagaactaccttatattcaacatttaatgttcttggcctctgcttttatgtctatacaatatactgagttcagtatggtgtccaagagtgccctgtgtggatagacatgtgcactccttccaggagtgggtactgattccagactccagatgcctattattagttaggcttctgagcttgcaatcatattgaatgtatgaagagcgaaatcaaattcttatttttgtacagttttgaagtttatacttagaactgaccacctccccggccacgcggagagctgtacagtgtgtaaatctgcctttatcttggattgattggtacagtatttttgcatctgtgggacctaccttttcgttcagtagtttgaactatatataaactgtacaatctgtaaagtttttatagaataaatattcagctgtgaaaactggttaaataaaactaatatttcttaacacattt

SEQ ID NO: 150021 - DNA, 3241 bp, Artificial Sequence
  derived and/or modified sequence
ggttaaggagggaggggaaacaaaagcagtgtgctccaccaggctcctgcctcggctctaaggaaacagaggaaagcaaacgggaatactctggtttagtatactgcccgcttctggagtggacattgatttaaggttgaaaggattgttgacaaaaggaaaaataaaaaagggaagacagagtatttggttcggtggaaaggctatgacagcgaggacgacacttgggagccggaacagcacctcgtgaactgtgaggaatacatccacgacttcaacagacgccacacggagaagcagaaggagagcacattgaccagaacaaacaggacctctcccaacaatgctaggaaacaaatctccagatccaccaacagcaacttttctaagacctctcctaaggcactcgtgattgggaaagaccacgaatccaaaaacagccagctgtttgctgccagccagaagttcaggaagaacacagctccatctctctccagccggaagaacatggacctagcgaagtcaggtatcaagatcctcgtgcctaaaagccccgttaagagcaggaccgcagtggacggctttcagagcgagagccctgagaaactggaccccgtcgagcagggtcaggaggacacagtggcacccgaagtggcagcggaaaagccggtcggagctttattgggccccggtgccgagagggccaggatggggagcaggcccaggatacacccactagtgcctcaggtgcccggccctgtgactgcagccatggccacaggcttagctgttaacgggaaaggtacatctccgttcatggatgcattaacagccaatgggacaaccaacatacagacatctgttacaggagtgactgccagcaaaaggaaatttattgacgacagaagagaccagccttttgacaagcgattgcgtttcagcgtgaggcaaacagaaagtgcctacagatacagagatattgtggtcaggaagcaggatggcttcacccacatcttgttatccacaaagtcctcagagaataactcactaaatccagaggtaatgagagaagtccagagtgctctgagcacggccgctgccgatgacagcaagctggtactgctcagcgccgttggcagcgtcttctgttgtggacttgactttatttattttatacgacgtctgacagatgacaggaaaagagaaagcactaaaatggcagaagctatcagaaacttcgtgaatactttcattcaatttaagaagcccattattgtagcagtcaatggcccagccattggtctaggagcatctatattgcctctttgcgatgtggtttgggctaatgaaaaggcttggtttcaaacaccctataccaccttcggacagagtccagatggctgttctaccgttatgtttcccaagataatgggaggagcatctgcaaacgagatgctgctcagtggacggaagctgacagcgcaggaggcgtgtggcaagggcctggtctcccaggtgttttggcccgggacgttcactcaggaagtgatggttcgcattaaggagcttgcctcgtgcaatccagttgtgcttgaggaatccaaagccctcgtgcgctgcaacatgaagatggagctggagcaggccaacgagagggagtgtgaggtgctgaagaaaatctggggctcggcccaggggatggactccatgttaaagtacttgcagaggaagatcgatgagttctgagtgtcgggctgcccactggtgacaccgggatcgggctgagcaggagaacatcaccggctccagttcccctgatccattctcacagcctgaaacaagctcacccgtagcttacgcttggaagcaggactgggaacatccacgctatttattatcgaggagttttaaagtactgtaactttaaaataaataactacaaagcttctttgtccaaacgtcattattttatacttatatacacgcaggtgtaaaagtataaaggtgagcactagactgctcttagaagctctaatttttgttttctttggctagtactgtataaaaaacagaattgtgttttattggttttggatgacagaaaagtctggaataatgtttgttttcctcatttcttccttctagaacacagaatctaaaggggtattagccagcctcgcctccctgccccacgtagagacacagagtgatgtgaggcgttggctttttctccaagaaggtacagatacctcagattcgggaaactcaaaatcaaaagacttagcttctaggataaatacttctgatgaaaaatccgctgaggagcataccccaaaccagacatatgcttaggattcatgctgagatatcaattggtttccccttctttttaaaatacgtccagttcttacccagttaacatgaagaaaccactgtctctagaagaaagcttgttttgcagtattagtgaatcactgaatagcttaagtatgactatctaagttataagttagtctttagtgggttttaaatagtttttctgacccttctgaaaaataactacataagtgcttcttgttgctgggtgagaaatactactttatagacagttttggttttctgtttgcagatatgattgatgtatttcaccaaaataaaatatttttatgtttataaagtgtaatttttaggttcacttagaatatattttatttaataagttaaaattcttttggcacactattaaatgcaaaaactcctttcaaaacaaaaaagaactaccttatattcaacatttaatgttcttggcctctgcttttatgtctatacaatatactgagttcagtatggtgtccaagagtgccctgtgtggatagacatgtgcactccttccaggagtgggtactgattccagactccagatgcctattattagttaggcttctgagcttgcaatcatattgaatgtatgaagagcgaaatcaaattcttatttttgtacagttttgaagtttatacttagaactgaccacctccccggccacgcggagagctgtacagtgtgtaaatctgcctttatcttggattgattggtacagtatttttgcatctgtgggacctaccttttcgttcagtagtttgaactatatataaactgtacaatctgtaaagtttttatagaataaatattcagctgtgaaaactggttaaataaaactaatatttcttaacacatttgaaa

SEQ ID NO: 150022 - DNA, 2184 bp, Artificial Sequence
  derived and/or modified sequence
cggagaggggagccgcgatccggccgcgccgcccgcacgccgccgcgcccgccccagcccgcccggccccgcggcggggcgcgatgagcccgagcgcgagccggcccgccggggagtgagcgcggggcgcccagggcgcgttgcgtagctgctcctgcgcacaaccccgccgcgccgccggcccgcactggccgcggagtgcaagaggctcgtccgtgcccagcgcccggccggccgcgggagcaggaagcgcaggccacgcaggacccaactgaaacaaagtgtcggccgcccggcgccggcgcccgccccgaccctgcccctcccgcccgcaactccgccgcccaccatggcttccgaggagctgtacgaggttgaaaggattgttgacaaaaggaaaaataaaaaagggaagacagagtatttggttcggtggaaaggctatgacagcgaggacgacacttgggagccggaacagcacctcgtgaactgtgaggaatacatccacgacttcaacagacgccacacggagaagcagaaggagagcacattgaccagaacaaacaggacctctcccaacaatgctaggaaacaaatctccagatccaccaacagcaacttttctaagacctctcctaaggcactcgtgattgggaaagaccacgaatccaaaaacagccagctgtttgctgccagccagaagttcaggaagaacacagctccatctctctccagccggaagaacatggacctagcgaagtcaggtatcaagatcctcgtgcctaaaagccccgttaagagcaggaccgcagtggacggctttcagagcgagagccctgagaaactggaccccgtcgagcagggtcaggaggacacagtggcacccgaagtggcagcggaaaagccggtcggagctttattgggccccggtgccgagagggccaggatggggagcaggcccaggatacacccactagtgcctcaggtgcccggccctgtgactgcagccatggccacaggcttagctgttaacgggaaaggtacatctccgttcatggatgcattaacagccaatgggacaaccaacatacagacatctgttacaggagtgactgccagcaaaaggaaatttattgacgacagaagagaccagccttttgacaagcgattgcgtttcagcgtgaggcaaacagaaagtgcctacagatacagagatattgtggtcaggaagcaggatggcttcacccacatcttgttatccacaaagtcctcagagaataactcactaaatccagaggtaatgagagaagtccagagtgctctgagcacggccgctgccgatgacagcaagctggtactgctcagcgccgttggcagcgtcttctgttgtggacttgactttatttattttatacgacgtctgacagatgacaggaaaagagaaagcactaaaatggcagaagctatcagaaacttcgtgaatactttcattcaatttaagaagcccattattgtagcagtcaatggcccagccattggtctaggagcatctatattgcctctttgcgatgtggtttgggctaatgaaaaggcttggtttcaaacaccctataccaccttcggacagagtccagatggctgttctaccgttatgtttcccaagataatgggaggagcatctgcaaacgagatgctgctcagtggacggaagctgacagcgcaggaggcgtgtggcaagggcctggtctcccaggtgttttggcccgggacgttcactcaggaagtgatggttcgcattaaggagcttgcctcgtgcaatccagttgtgcttgaggaatccaaagccctcgtgcgctgcaacatgaagatggagctggagcaggccaacgagagggagtgtgaggtgctgaagaaaatctggggctcggcccaggggatggactccatgttaaagtacttgcagaggaagatcgatgagttctgagtgtcgggctgcccactggtgacaccgggatcgggctgagcaggagaacatcaccggctccagttcccctgatccattctcacagcctgaaacaagctcacccgtagcttacgcttggaagcaggactgggaacatccacgctatttattatcgaggagttttaaagtactgtaactttaaaataaataactacaaagct

SEQ ID NO: 150023 - DNA, 2139 bp, Artificial Sequence
  derived and/or modified sequence
actgtctggcactccctagtgagatgaacctggtacctcagatggaaatgctgaaatcacctgtcttctgcgtcgctcacgctgggagctgtagaccggagctgttcctattcggccatcttggctcctccccaaggcttaggtttctaagtcagccacaaatgctacccaaaactacataaagaagaaaaaagttgcatagaaccaaaaagttgaaaggattgttgacaaaaggaaaaataaaaaagggaagacagagtatttggttcggtggaaaggctatgacagcgaggacgacacttgggagccggaacagcacctcgtgaactgtgaggaatacatccacgacttcaacagacgccacacggagaagcagaaggagagcacattgaccagaacaaacaggacctctcccaacaatgctaggaaacaaatctccagatccaccaacagcaacttttctaagacctctcctaaggcactcgtgattgggaaagaccacgaatccaaaaacagccagctgtttgctgccagccagaagttcaggaagaacacagctccatctctctccagccggaagaacatggacctagcgaagtcaggtatcaagatcctcgtgcctaaaagccccgttaagagcaggaccgcagtggacggctttcagagcgagagccctgagaaactggaccccgtcgagcagggtcaggaggacacagtggcacccgaagtggcagcggaaaagccggtcggagctttattgggccccggtgccgagagggccaggatggggagcaggcccaggatacacccactagtgcctcaggtgcccggccctgtgactgcagccatggccacaggcttagctgttaacgggaaaggtacatctccgttcatggatgcattaacagccaatgggacaaccaacatacagacatctgttacaggagtgactgccagcaaaaggaaatttattgacgacagaagagaccagccttttgacaagcgattgcgtttcagcgtgaggcaaacagaaagtgcctacagatacagagatattgtggtcaggaagcaggatggcttcacccacatcttgttatccacaaagtcctcagagaataactcactaaatccagaggtaatgagagaagtccagagtgctctgagcacggccgctgccgatgacagcaagctggtactgctcagcgccgttggcagcgtcttctgttgtggacttgactttatttattttatacgacgtctgacagatgacaggaaaagagaaagcactaaaatggcagaagctatcagaaacttcgtgaatactttcattcaatttaagaagcccattattgtagcagtcaatggcccagccattggtctaggagcatctatattgcctctttgcgatgtggtttgggctaatgaaaaggcttggtttcaaacaccctataccaccttcggacagagtccagatggctgttctaccgttatgtttcccaagataatgggaggagcatctgcaaacgagatgctgctcagtggacggaagctgacagcgcaggaggcgtgtggcaagggcctggtctcccaggtgttttggcccgggacgttcactcaggaagtgatggttcgcattaaggagcttgcctcgtgcaatccagttgtgcttgaggaatccaaagccctcgtgcgctgcaacatgaagatggagctggagcaggccaacgagagggagtgtgaggtgctgaagaaaatctggggctcggcccaggggatggactccatgttaaagtacttgcagaggaagatcgatgagttctgagtgtcgggctgcccactggtgacaccgggatcgggctgagcaggagaacatcaccggctccagttcccctgatccattctcacagcctgaaacaagctcacccgtagcttacgcttggaagcaggactgggaacatccacgctatttattatcgaggagttttaaagtactgtaactttaaaataaataactacaaagcttctttgtccaaacgtcattattttatacttatatacacgcaggtgtaaaagtataaaggtgagcactagactgctcttagaagctctaatttttgttttctttggctagtactgtat

SEQ ID NO: 150024 - DNA, 1797 bp, Artificial Sequence
  derived and/or modified sequence
atgaccttccaggccagccacagaagcgcctggggcaagagcagaaagaagaactggcagtacgagggccccacccagaagctgttcctgaagagaaacaacgtgagcgcccccgacggccccagcgaccccagcatcagcgtgagcagcgagcagagcggcgcccagcagccccccgccctgcaggtggagagaatcgtggacaagagaaagaacaagaagggcaagaccgagtacctggtgagatggaagggctacgacagcgaggacgacacctgggagcccgagcagcacctggtgaactgcgaggagtacatccacgacttcaacagaagacacaccgagaagcagaaggagagcaccctgaccagaaccaacagaaccagccccaacaacgccagaaagcagatcagcagaagcaccaacagcaacttcagcaagaccagccccaaggccctggtgatcggcaaggaccacgagagcaagaacagccagctgttcgccgccagccagaagttcagaaagaacaccgcccccagcctgagcagcagaaagaacatggacctggccaagagcggcatcaagatcctggtgcccaagagccccgtgaagagcagaaccgccgtggacggcttccagagcgagagccccgagaagctggaccccgtggagcagggccaggaggacaccgtggcccccgaggtggccgccgagaagcccgtgggcgccctgctgggccccggcgccgagagagccagaatgggcagcagacccagaatccaccccctggtgccccaggtgcccggccccgtgaccgccgccatggccaccggcctggccgtgaacggcaagggcaccagccccttcatggacgccctgaccgccaacggcaccaccaacatccagaccagcgtgaccggcgtgaccgccagcaagagaaagttcatcgacgacagaagagaccagcccttcgacaagagactgagattcagcgtgagacagaccgagagcgcctacagatacagagacatcgtggtgagaaagcaggacggcttcacccacatcctgctgagcaccaagagcagcgagaacaacagcctgaaccccgaggtgatgagagaggtgcagagcgccctgagcaccgccgccgccgacgacagcaagctggtgctgctgagcgccgtgggcagcgtgttctgctgcggcctggacttcatctacttcatcagaagactgaccgacgacagaaagagagagagcaccaagatggccgaggccatcagaaacttcgtgaacaccttcatccagttcaagaagcccatcatcgtggccgtgaacggccccgccatcggcctgggcgccagcatcctgcccctgtgcgacgtggtgtgggccaacgagaaggcctggttccagaccccctacaccaccttcggccagagccccgacggctgcagcaccgtgatgttccccaagatcatgggcggcgccagcgccaacgagatgctgctgagcggcagaaagctgaccgcccaggaggcctgcggcaagggcctggtgagccaggtgttctggcccggcaccttcacccaggaggtgatggtgagaatcaaggagctggccagctgcaaccccgtggtgctggaggagagcaaggccctggtgagatgcaacatgaagatggagctggagcaggccaacgagagagagtgcgaggtgctgaagaagatctggggcagcgcccagggcatggacagcatgctgaagtacctgcagagaaagatcgacgagttctag

SEQ ID NO: 150025 - DNA, 1635 bp, Artificial Sequence
  derived and/or modified sequence
atggccagcgaggagctgtacgaggtggagagaatcgtggacaagagaaagaacaagaagggcaagaccgagtacctggtgagatggaagggctacgacagcgaggacgacacctgggagcccgagcagcacctggtgaactgcgaggagtacatccacgacttcaacagaagacacaccgagaagcagaaggagagcaccctgaccagaaccaacagaaccagccccaacaacgccagaaagcagatcagcagaagcaccaacagcaacttcagcaagaccagccccaaggccctggtgatcggcaaggaccacgagagcaagaacagccagctgttcgccgccagccagaagttcagaaagaacaccgcccccagcctgagcagcagaaagaacatggacctggccaagagcggcatcaagatcctggtgcccaagagccccgtgaagagcagaaccgccgtggacggcttccagagcgagagccccgagaagctggaccccgtggagcagggccaggaggacaccgtggcccccgaggtggccgccgagaagcccgtgggcgccctgctgggccccggcgccgagagagccagaatgggcagcagacccagaatccaccccctggtgccccaggtgcccggccccgtgaccgccgccatggccaccggcctggccgtgaacggcaagggcaccagccccttcatggacgccctgaccgccaacggcaccaccaacatccagaccagcgtgaccggcgtgaccgccagcaagagaaagttcatcgacgacagaagagaccagcccttcgacaagagactgagattcagcgtgagacagaccgagagcgcctacagatacagagacatcgtggtgagaaagcaggacggcttcacccacatcctgctgagcaccaagagcagcgagaacaacagcctgaaccccgaggtgatgagagaggtgcagagcgccctgagcaccgccgccgccgacgacagcaagctggtgctgctgagcgccgtgggcagcgtgttctgctgcggcctggacttcatctacttcatcagaagactgaccgacgacagaaagagagagagcaccaagatggccgaggccatcagaaacttcgtgaacaccttcatccagttcaagaagcccatcatcgtggccgtgaacggccccgccatcggcctgggcgccagcatcctgcccctgtgcgacgtggtgtgggccaacgagaaggcctggttccagaccccctacaccaccttcggccagagccccgacggctgcagcaccgtgatgttccccaagatcatgggcggcgccagcgccaacgagatgctgctgagcggcagaaagctgaccgcccaggaggcctgcggcaagggcctggtgagccaggtgttctggcccggcaccttcacccaggaggtgatggtgagaatcaaggagctggccagctgcaaccccgtggtgctggaggagagcaaggccctggtgagatgcaacatgaagatggagctggagcaggccaacgagagagagtgcgaggtgctgaagaagatctggggcagcgcccagggcatggacagcatgctgaagtacctgcagagaaagatcgacgagttctag

SEQ ID NO: 150026 - protein, 775 aa, Artificial Sequence
  derived and/or modified sequence
MEPPYSLTAHYDEFQEVKYVSRCGAGGARGASLPPGFPLGAARSATGARSGLPRWNRREVCLLSGLVFAAGLCAILAAMLALKYLGPVAAGGGACPEGCPERKAFARAARFLAANLDASIDPCQDFYSFACGGWLRRHAIPDDKLTYGTIAAIGEQNEERLRRLLARPGGGPGGAAQRKVRAFFRSCLDMREIERLGPRPMLEVIEDCGGWDLGGAEERPGVAARWDLNRLLYKAQGVYSAAALFSLTVSLDDRNSSRYVIRIDQDGLTLPERTLYLAQDEDSEKILAAYRVFMERVLSLLGADAVEQKAQEILQVEQQLANITVSEHDDLRRDVSSMYNKVTLGQLQKITPHLRWKWLLDQIFQEDFSEEEEVVLLATDYMQQVSQLIRSTPHRVLHNYLVWRVVVVLSEHLSPPFREALHELAQEMEGSDKPQELARVCLGQANRHFGMALGALFVHEHFSAASKAKVQQLVEDIKYILGQRLEELDWMDAETRAAARAKLQYMMVMVGYPDFLLKPDAVDKEYEFEVHEKTYFKNILNSIRFSIQLSVKKIRQEVDKSTWLLPPQALNAYYLPNKNQMVFPAGILQPTLYDPDFPQSLNYGGIGTIIGHELTHGYDDWGGQYDRSGNLLHWWTEASYSRFLRKAECIVRLYDNFTVYNQRVNGKHTLGENIADMGGLKLAYHAYQKWVREHGPEHPLPRLKYTHDQLFFIAFAQNWCIKRRSQSIYLQVLTDKHAPEHYRVLGSVSQFEEFGRAFHCPKDSPMNPAHKCSVW

SEQ ID NO: 150027 - DNA, 2328 bp, Artificial Sequence
  derived and/or modified sequence
atggaacccccgtattctctgaccgctcactacgacgaattccaagaggtgaagtacgtatcaagatgcggggccgggggagcccgcggcgcctcccttccgcctggtttcccgctgggggccgcccggtcagccactggagctcgttccggtcttcctcggtggaaccggagagaggtgtgcctcctgagtggattggtctttgccgccggattatgcgcaattctggcggccatgctggccttaaagtatctaggacccgtcgctgccggtgggggcgcatgccccgagggttgtcccgaaaggaaagcgttcgcgcgtgctgcacgattcctggctgctaatctggacgcatctatagatccgtgtcaagatttctactcctttgcatgcgggggctggctgaggaggcacgccattcccgatgacaaactcacatacggtaccatcgctgcgattggggaacagaatgaagaacggcttaggaggttgctcgcccgaccaggaggcggcccgggtggtgccgcacaacgcaaagtccgcgccttttttcgtagctgtctggacatgagagagatagagcgcctcgggcccagaccaatgctggaggtcatcgaggactgcgggggctgggaccttggcggcgctgaagaacggcccggcgtagctgcgcgatgggatctgaatagactgctgtacaaggcacagggcgtgtactctgcagccgccctattcagcctaaccgtctcactggacgacaggaattcctcccgctacgtaattagaattgatcaggacggtctaacactccctgaaaggacgttatatctcgcacaggacgaggactccgagaagatcttggccgcctaccgcgtgttcatggagagggtcctgagcctgcttggagccgatgccgtggaacagaaagctcaggagatcctgcaagtggagcagcaactcgcaaacattactgtcagtgagcacgacgatctccgcagagacgttagttccatgtacaataaggtgacactgggccaactgcaaaaaatcacgccgcatctgaggtggaaatggctactggatcagatctttcaagaagacttcagtgaggaagaggaagtggttctgctggcaacagactatatgcagcaagtgagtcagctgattcgttctacccctcaccgagtccttcacaactacctagtctggcgggtggtagtagtgctgtcagaacatcttagtcctccatttcgggaggccttacacgaacttgcacaagaaatggagggcagcgacaagccgcaggaactcgcccgcgtttgcctggggcaggccaaccgacattttggaatggcgctgggtgccttgtttgtgcatgagcatttctcagcagcttccaaagcgaaggtccagcagcttgtcgaagacattaagtatatcctgggtcagagactggaagaacttgactggatggatgcagaaacaagggccgccgcgcgtgccaaactgcagtacatgatggtgatggtgggctaccccgattttttacttaaacctgacgccgtcgataaggagtacgaattcgaggtgcatgagaaaacatatttcaaaaatatcctgaactctattcgattttccattcaactgtccgtgaaaaagattcgacaagaggtggataagtccacgtggctcctgcctccccaagcactgaacgcctactatctccctaacaaaaatcaaatggtgttccccgcaggcattttgcaaccaacattgtatgaccctgactttccgcaatctctgaattatggtgggatcgggacgataatcggccacgaactcacccacggctacgacgactggggaggccaatacgaccggtccgggaatctgctgcactggtggactgaagccagctactcacggtttctacgcaaggctgagtgtatcgtgagactgtacgacaatttcacagtttataatcagagagtcaatgggaaacacacactcggagagaatatcgcagacatgggcggccttaaattagcctatcacgcttaccagaagtgggtccgggaacacggccctgagcatcctcttccccgactgaaatacacccatgatcagttgttcttcatagcattcgcgcaaaattggtgcattaagaggcgctcgcaaagcatttatcttcaagtgctgacggacaaacacgctccagagcattaccgcgttctgggatcagtgtcccagttcgaagagtttggacgagcctttcactgccctaaagatagccctatgaaccccgctcacaagtgttctgtctggtag

SEQ ID NO: 150028 - DNA, 2328 bp, Artificial Sequence
  derived and/or modified sequence
atggagcccccctacagcctgacagcccactatgatgagttccaggaggtgaagtatgtgagccgctgtggggccggcggggcccggggggccagcctgcccccaggcttccccctgggcgccgcccggagcgccaccggggcccggagcggcctgccccgctggaacagaagagaggtgtgcctgctgagcggcctggtgtttgctgctggcctgtgtgccatcctggccgccatgctggccctgaagtacctgggccctgtggccgccggcggcggggcctgcccagagggctgcccagagaggaaggcctttgcccgggccgcccgcttcctggccgccaacctggatgccagcattgacccctgccaggacttctacagctttgcctgtggcggctggctgcggagacatgccatcccagatgacaagctgacctacggcaccatcgccgccatcggggagcagaatgaggagcggctgcggcggctgctggcccggcctgggggcggccctgggggcgccgcccagaggaaggtgcgggccttcttccgcagctgcctggacatgagagaaattgagcggctgggcccccggcccatgctggaggtgattgaggactgtggcggctgggacctgggcggcgctgaggagaggcctggggtggccgcccgctgggacctgaaccggctgctgtacaaggcccagggcgtgtacagcgctgctgccctcttcagcctgactgtgtccctggatgacaggaacagcagccgctacgtgatcagaattgaccaggacggcctgaccctgcctgagaggaccctgtacctggcccaggatgaagattctgagaagatcctggccgcctacagagtcttcatggagcgggtgctgagcctgctgggcgcagatgctgtggagcagaaggcccaggagatcctgcaggtggagcagcagctggccaacatcaccgtgtctgaacatgatgacctgcggagagatgtgtcctccatgtacaacaaggtgaccctgggccagctgcagaagatcaccccccacctgcgctggaagtggctgctggaccagatcttccaggaggacttcagcgaggaggaggaggtggtgctgctggccacagactacatgcagcaggtgtcccagctgatccgcagcaccccccaccgggtgctgcacaactacctggtgtggagggtggtggtggtgctgtctgagcacctgagcccccccttccgggaggccctgcacgagctggcccaggagatggagggcagtgacaagccccaggagctggcccgggtgtgcctgggccaggccaacagacacttcggcatggccctgggcgccctgtttgtgcatgagcacttctctgctgccagcaaggccaaggtgcagcagctggtggaggacatcaagtacatcctgggccagaggctggaggagctggactggatggatgctgagaccagggctgctgcccgggccaagctgcagtacatgatggtgatggtgggctacccagacttcctgctgaagccagatgctgtggacaaggagtatgaatttgaggtgcatgagaagacctacttcaagaacatcctgaacagcatccgcttcagcatccagctgtctgtgaagaagatccggcaggaggtggacaagagcacctggctgctgcccccccaggccctgaatgcctactacctgcccaacaagaaccagatggtgtttcctgctggcatcctgcagcccaccctgtatgaccctgacttcccccagagcctgaactatggaggcatcggcaccatcatcggccacgagctgacccacggctatgatgactggggcggccagtatgacaggagcggcaacctgctgcactggtggacagaggccagctacagccgcttcctgaggaaggccgagtgcatcgtgcggctgtatgacaacttcaccgtgtacaaccagagggtgaatggcaagcacaccctgggggagaacattgctgacatgggcggcctgaagctggcctaccacgcctaccagaagtgggtgcgggagcacggccctgagcaccccctgccccggctgaagtacacccatgaccagctgttcttcatcgcctttgcccagaactggtgcatcaagagaagaagccagagcatctacctgcaggtgctgacagacaagcacgcccctgagcactacagagtgctgggctctgtgtcccagtttgaggagtttggccgggccttccactgccccaaggacagccccatgaacccagcccacaagtgcagcgtgtggtag

SEQ ID NO: 150029 - DNA, 2328 bp, Artificial Sequence
  derived and/or modified sequence
atggagcccccctacagcctgaccgcccactacgacgagttccaggaagtgaagtacgtgtcccggtgtggagctggcggggctagaggcgcttcactgccccctgggtttccactgggagcagcacgcagtgcaacaggagcccggtccggccttccacggtggaaccgacgcgaagtgtgtttgttgtcaggactcgtttttgccgccgggctctgcgccatattggctgccatgctcgcattaaaatacctggggccggtggctgctgggggtggggcttgtcccgagggttgtccggaacgcaaggcattcgccagagccgccagattccttgcagctaacctggacgccagcatagacccttgtcaagacttctactcctttgcctgtggcggttggctccggcgacacgctatcccggacgacaagctcacatacggcacgatagctgcaattggcgaacagaatgaggagcgactaagaagactgctggccagacctggagggggaccaggaggggcggctcagaggaaagtgcgggcatttttccggtcatgcctcgatatgcgtgaaatcgagcggttggggccaaggccaatgctggaggttatcgaagattgcgggggatgggatttgggtggggctgaggagagacctggagtcgccgcccgctgggatctcaatagactgctgtataaagcacagggcgtatactcagctgctgctctcttctctctgaccgtgagtttagatgacagaaactccagtcgctatgtaatccgcatcgatcaagatgggttgactctgcccgagaggaccctgtacctggcacaggacgaagattctgagaaaattctggccgcatatcgggttttcatggaaagggtcctgagtcttttaggtgccgacgccgtggagcagaaggcacaggaaatcctacaggtagagcagcagctggcgaatatcaccgtgagcgagcacgacgatctgcgtagagacgtgagtagcatgtataataaagtaacactgggacaacttcagaagatcactccgcacctcagatggaagtggctcttggatcaaatttttcaagaggatttcagcgaggaggaggaagttgtactactggccacagattatatgcagcaggtgagtcaacttattagatcaactccacatcgcgttttacacaactatcttgtgtggcgcgtggtggtggtgctgagcgagcacctctcccctcccttccgggaggcactgcatgagctggcccaggagatggaagggtcagataagccccaggaattggccagagtttgtctcggacaggccaatcgccactttggcatggctctgggcgccctgttcgtgcacgagcacttcagcgccgctagtaaggccaaggtccagcaactcgtggaggacatcaagtatattctgggtcaacggctggaagagctggactggatggatgctgagacacgagccgcggcccgcgcaaaacttcagtacatgatggtgatggtagggtacccagacttcctcctcaaaccggacgcagtggacaaggagtacgaatttgaagtgcacgaaaagacatatttcaagaacatactcaactccatcagatttagcattcagctgtctgtgaagaagatcaggcaggaggtggataagtcgacctggctgctaccaccccaggccctgaacgcctactatctcccaaacaaaaaccaaatggtgtttccagctggcatactgcagccaactctgtatgaccctgacttccctcagagtttgaattatgggggtatcgggactatcatcgggcatgaattaactcatgggtacgatgactggggcggacagtacgaccgctccggaaatcttctccactggtggacagaagcctcgtacagtcggtttctgcggaaagccgagtgtatagtgcgcttgtacgacaacttcacagtttacaatcagcgcgtgaatggcaagcacaccttgggcgagaacatcgcagatatgggggggctgaagctggcctaccacgcctatcagaaatgggtgagagagcacggaccggaacatcctttgccacggctcaagtacacacacgaccagctgttcttcattgcattcgcacaaaactggtgtattaaaaggagatcacagtccatctatctccaggttctgactgacaaacacgccccggaacactacagagtcctcggcagtgtctctcaatttgaagagttcggcagagcatttcactgtccaaaagacagcccgatgaacccagcacataaatgctctgtgtggtag

SEQ ID NO: 150030 - DNA, 2328 bp, Artificial Sequence
  derived and/or modified sequence
atggagcccccatattccctgactgcccattatgatgagttccaggaagtgaagtacgtttccagatgtggcgcaggcggtgctagaggtgcctcgctgcctcccggatttcccctcggagcggcacgctccgctaccggtgccagaagtggactccccagatggaacagacgggaggtgtgtttattgtccggactggtgttcgccgcaggtctttgcgcgatactggccgctatgcttgcactgaagtatcttggaccagtggctgccggaggcggtgcgtgtcccgaaggatgcccagagaggaaagccttcgcccgtgccgctaggttcctggctgctaatctcgacgctagcatcgatccatgtcaggacttttacagcttcgcatgcggcggatggctccgccgacacgccatcccagacgacaagttgacatacgggactatcgcagccattggcgagcagaatgaggaacgcctccgcaggcttcttgcgagacccggaggcggaccaggcggagcagcgcagaggaaggtgagggctttctttcgttcatgtctagatatgagggaaattgagcgactgggaccacgacctatgctcgaagtgatcgaagactgtggtggatgggatttagggggtgccgaagagcgacctggcgtggctgccaggtgggacctgaaccggctgctctataaagctcagggtgtgtattccgccgcagcactgttcagcctgacggtgtccttggacgatagaaactcaagccgttacgttattcgtattgatcaagatggcctgactctccccgagcggactctgtacttggcacaagatgaggactctgaaaaaattcttgcggcttatagggtgtttatggagcgagtgttgagccttctgggcgcagacgcagtggagcagaaggcccaagagatactgcaggttgagcaacagcttgctaacatcaccgtgagtgagcatgatgatctgcggcgtgacgtgtccagcatgtataataaggtcaccctgggccagctgcagaagatcacaccccacctccggtggaagtggctcctcgatcagatatttcaggaggacttctccgaggaagaggaggtggtcttgcttgcgacagactatatgcagcaggtgtctcagctgattcgcagtacacctcacagggttttgcacaactatctcgtgtggcgcgtggtggttgtcctgagcgagcacctgtctcctcctttcagggaggcattgcatgagctggcacaggagatggagggctcagataagccccaggagctggcacgggtatgtctgggccaggccaaccgccacttcggtatggccctgggtgcactcttcgtgcacgaacacttttctgctgcttccaaagcgaaagtccagcagctggtggaggatattaaatacatattgggtcagcggctggaggagttagattggatggacgctgaaaccagagcagccgctcgagctaagttgcagtatatgatggtgatggttggatatcccgatttcctgttgaaacccgatgcggtggataaggagtacgaattcgaagttcatgagaaaacatactttaagaatattttaaacagtatccggttttcaatccagctgtctgtgaaaaagattcgccaggaggtggacaagagcacatggctgttacccccacaagcacttaacgcctactatttgccgaacaaaaatcaaatggtgttccctgccggaatcctgcagccaaccttgtatgatcctgacttcccccaaagcctgaattacggcggaatcggcaccattattggccatgaactgacacacggctatgatgattggggagggcaatatgacaggagcggaaatttattacactggtggaccgaagcgagttattcacggttcttgcgcaaggccgagtgcatagttcgactgtatgacaactttacggtgtataatcagagggttaacggcaaacatacactgggggagaatatagctgacatggggggtctgaaattggcctatcacgcctaccagaagtgggttcgtgagcacggaccagaacaccctcttccaagattgaagtacacacacgaccagttgttctttatagcattcgcccagaactggtgcattaagaggcggagccagtcaatctatctgcaggttctaacagataaacacgccccagagcattaccgcgtcctcggctccgtcagccagtttgaagagtttgggcgagcctttcattgtcctaaggatagtcctatgaaccccgctcacaaatgttctgtctggtag

SEQ ID NO: 150031 - DNA, 2328 bp, Artificial Sequence
  derived and/or modified sequence
atggagcccccctacagcctgaccgcccactacgacgagttccaggaggtgaagtacgtgagcagatgcggcgccggcggcgccagaggcgccagcctgccccccggcttccccctgggcgccgccagaagcgccaccggcgccagaagcggcctgcccagatggaacagaagagaggtgtgcctgctgagcggcctggtgttcgccgccggcctgtgcgccatcctggccgccatgctggccctgaagtacctgggccccgtggccgccggcggcggcgcctgccccgagggctgccccgagagaaaggccttcgccagagccgccagattcctggccgccaacctggacgccagcatcgacccctgccaggacttctacagcttcgcctgcggcggctggctgagaagacacgccatccccgacgacaagctgacctacggcaccatcgccgccatcggcgagcagaacgaggagagactgagaagactgctggccagacccggcggcggccccggcggcgccgcccagagaaaggtgagagccttcttcagaagctgcctggacatgagagagatcgagagactgggccccagacccatgctggaggtgatcgaggactgcggcggctgggacctgggcggcgccgaggagagacccggcgtggccgccagatgggacctgaacagactgctgtacaaggcccagggcgtgtacagcgccgccgccctgttcagcctgaccgtgagcctggacgacagaaacagcagcagatacgtgatcagaatcgaccaggacggcctgaccctgcccgagagaaccctgtacctggcccaggacgaggacagcgagaagatcctggccgcctacagagtgttcatggagagagtgctgagcctgctgggcgccgacgccgtggagcagaaggcccaggagatcctgcaggtggagcagcagctggccaacatcaccgtgagcgagcacgacgacctgagaagagacgtgagcagcatgtacaacaaggtgaccctgggccagctgcagaagatcaccccccacctgagatggaagtggctgctggaccagatcttccaggaggacttcagcgaggaggaggaggtggtgctgctggccaccgactacatgcagcaggtgagccagctgatcagaagcaccccccacagagtgctgcacaactacctggtgtggagagtggtggtggtgctgagcgagcacctgagcccccccttcagagaggccctgcacgagctggcccaggagatggagggcagcgacaagccccaggagctggccagagtgtgcctgggccaggccaacagacacttcggcatggccctgggcgccctgttcgtgcacgagcacttcagcgccgccagcaaggccaaggtgcagcagctggtggaggacatcaagtacatcctgggccagagactggaggagctggactggatggacgccgagaccagagccgccgccagagccaagctgcagtacatgatggtgatggtgggctaccccgacttcctgctgaagcccgacgccgtggacaaggagtacgagttcgaggtgcacgagaagacctacttcaagaacatcctgaacagcatcagattcagcatccagctgagcgtgaagaagatcagacaggaggtggacaagagcacctggctgctgcccccccaggccctgaacgcctactacctgcccaacaagaaccagatggtgttccccgccggcatcctgcagcccaccctgtacgaccccgacttcccccagagcctgaactacggcggcatcggcaccatcatcggccacgagctgacccacggctacgacgactggggcggccagtacgacagaagcggcaacctgctgcactggtggaccgaggccagctacagcagattcctgagaaaggccgagtgcatcgtgagactgtacgacaacttcaccgtgtacaaccagagagtgaacggcaagcacaccctgggcgagaacatcgccgacatgggcggcctgaagctggcctaccacgcctaccagaagtgggtgagagagcacggccccgagcaccccctgcccagactgaagtacacccacgaccagctgttcttcatcgccttcgcccagaactggtgcatcaagagaagaagccagagcatctacctgcaggtgctgaccgacaagcacgcccccgagcactacagagtgctgggcagcgtgagccagttcgaggagttcggcagagccttccactgccccaaggacagccccatgaaccccgcccacaagtgcagcgtgtggtag

SEQ ID NO: 150032 - DNA, 2865 bp, Artificial Sequence
  derived and/or modified sequence
ggcggcgggcgctgggagacaccggacgcccgctcggctgcgctgcggctcaggcccccgctcgggcccgacccgctcggtcaccgccggctcgggcgcgcacctgccggctgcggccccagggccatgcggaggcccacgaggaggccggcggccacgcgcatcccgtagcccaggtggcccaggtctgcaccgcggcggcctcggcgccatggagcccccgtattcgctgacggcgcactacgatgagttccaagaggtcaagtacgtgagccgctgcggcgcggggggcgcgcgcggggcctccctgcccccgggcttcccgttgggcgctgcgcgcagcgccaccggggcccggtccgggctgccgcgctggaaccggcgcgaggtgtgcctgctgtcggggctggtgttcgccgccggcctctgcgccattctggcggctatgctggccctcaagtacctgggcccggtcgcggccggcggcggcgcctgtcccgagggctgccctgagcgcaaggccttcgcgcgcgccgctcgcttcctggccgccaacctggacgccagcatcgacccatgccaggacttctactcgttcgcctgcggcggttggctgcggcgccacgccatccccgacgacaagctcacctatggcaccatcgcggccatcggcgagcaaaacgaggagcgcctacggcgcctgctggcgcggcccgggggtgggcctggcggcgcggcccagcgcaaggtgcgcgccttcttccgctcgtgcctcgacatgcgcgagatcgagcgactgggcccgcgacccatgctagaggtcatcgaggactgcgggggctgggacctgggcggcgcggaggagcgtccgggggtcgcggcgcgatgggacctcaaccggctgctgtacaaggcgcagggcgtgtacagcgccgccgcgctcttctcgctcacggtcagcctggacgacaggaactcctcgcgctacgtcatccgcattgaccaggatgggctcaccctgccagagaggaccctgtacctcgctcaggatgaggacagtgagaagatcctggcagcatacagggtgttcatggagcgagtgctcagcctcctgggtgcagacgctgtggaacagaaggcccaagagatcctgcaagtggagcagcagctggccaacatcactgtgtcagagcatgacgacctacggcgagatgtcagctccatgtacaacaaggtgacgctggggcagctgcagaagatcaccccccacttgcggtggaagtggctgctagaccagatcttccaggaggacttctcagaggaagaggaggtggtgctgctggcgacagactacatgcagcaggtgtcgcagctcatccgctccacaccccaccgggtcctgcacaactacctggtgtggcgcgtggtggtggtcctgagtgaacacctgtccccgccattccgtgaggcactgcacgagctggcacaggagatggagggcagcgacaagccacaggagctggcccgggtctgcttgggccaggccaatcgccactttggcatggcgcttggcgccctctttgtacatgagcacttctcagctgccagcaaagccaaggtgcagcagctagtggaagacatcaagtacatcctgggccagcgcctggaggagctggactggatggacgccgagaccagggctgctgctcgggccaagctccagtacatgatggtgatggtcggctacccggacttcctgctgaaacccgatgctgtggacaaggagtatgagtttgaggtccatgagaagacctacttcaagaacatcttgaacagcatccgcttcagcatccagctctcagttaagaagattcggcaggaggtggacaagtccacgtggctgctccccccacaggcgctcaatgcctactatctacccaacaagaaccagatggtgttccccgcgggcatcctgcagcccaccctgtacgaccctgacttcccacagtctctcaactacgggggcatcggcaccatcattggacatgagctgacccacggctacgacgactgggggggccagtatgaccgctcagggaacctgctgcactggtggacggaggcctcctacagccgcttcctgcgaaaggctgagtgcatcgtccgtctctatgacaacttcactgtctacaaccagcgggtgaacgggaaacacacgcttggggagaacatcgcagatatgggcggcctcaagctggcctaccacgcctatcagaagtgggtgcgggagcacggcccagagcacccacttccccggctcaagtacacacatgaccagctcttcttcattgcctttgcccagaactggtgcatcaagcggcggtcgcagtccatctacctgcaggtgctgactgacaagcatgcccctgagcactacagggtgctgggcagtgtgtcccagtttgaggagtttggccgggctttccactgtcccaaggactcacccatgaaccctgcccacaagtgttccgtgtggtgagcctggctgcccgcctgcacgcccccactgcccccgcacgaatcacctcctgctggctaccggggcaggcatgcacccggtgccagccccgctctgggcaccacctgccttccagcccctccaggacccggtccccctgctgcccctcacttcaggaggggcctggagcagggtgaggctggactttggggggctgtgagggaaatatactggggtccccagattctgctctaagggggccagaccctctgccaggctggattgtacgggccccaccttcgctgtgttcttgctgcaaagtctggtcaataaatcactgcactgtt

SEQ ID NO: 150033 - protein, 655 aa, Artificial Sequence
  derived and/or modified sequence
MSSSNVEVFIPVSQGNTNGFPATASNDLKAFTEGAVLSFHNICYRVKLKSGFLPCRKPVEKEILSNINGIMKPGLNAILGPTGGGKSSLLDVLAARKDPSGLSGDVLINGAPRPANFKCNSGYVVQDDVVMGTLTVRENLQFSAALRLATTMTNHEKNERINRVIQELGLDKVADSKVGTQFIRGVSGGERKRTSIGMELITDPSILFLDEPTTGLDSSTANAVLLLLKRMSKQGRTIIFSIHQPRYSIFKLFDSLTLLASGRLMFHGPAQEALGYFESAGYHCEAYNNPADFFLDIINGDSTAVALNREEDFKATEIIEPSKQDKPLIEKLAEIYVNSSFYKETKAELHQLSGGEKKKKITVFKEISYTTSFCHQLRWVSKRSFKNLLGNPQASIAQIIVTVVLGLVIGAIYFGLKNDSTGIQNRAGVLFFLTTNQCFSSVSAVELFVVEKKLFIHEYISGYYRVSSYFLGKLLSDLLPMRMLPSIIFTCIVYFMLGLKPKADAFFVMMFTLMMVAYSASSMALAIAAGQSVVSVATLLMTICFVFMMIFSGLLVNLTTIASWLSWLQYFSIPRYGFTALQHNEFLGQNFCPGLNATGNNPCNYATCTGEEYLVKQGIDLSPWGLWKNHVALACMIVIFLTIAYLKLLFLKKYS

SEQ ID NO: 150034 - DNA, 1968 bp, Artificial Sequence
  derived and/or modified sequence
atgtccagctcaaacgtggaagtattcatcccagtcagccagggcaatacaaatgggtttccggcaaccgcaagtaatgacctgaaggccttcacagagggcgcagtactatcctttcataatatctgttaccgcgtcaaactgaaatctggctttctcccttgtagaaagccagttgaaaaagagatcctgagcaacatcaatggaatcatgaaacctggattaaatgcaattctggggccaaccggcgggggtaagtctagccttttggacgtgctggctgcccggaaggaccctagcggcctgagtggtgacgtgctcattaacggggcaccccggcccgccaattttaagtgcaacagcggatatgtcgttcaggacgatgtggtgatggggacccttaccgtgagagaaaacctgcaattctccgccgccctcagactggcaaccacaatgacaaaccacgagaaaaacgagcggattaacagagtcatccaggaactggggctggataaagtcgcggattccaaagtcggcactcaatttattagaggggtatctggtggagaacgtaaacggacttctatcggaatggaacttattactgatccctctattttgttcctagatgagcccactactggcctggacagcagtacggccaatgccgtgctgctgctgctaaaaaggatgtcaaagcagggacggaccatcattttcagtattcatcagccacggtatagcattttcaagctgtttgactccttgaccttgttagcttctggtcggttgatgtttcacggtcccgcccaagaggctcttggctatttcgagtccgccgggtaccactgtgaagcttacaataatccggcagatttctttctggacataatcaatggtgatagtacagctgtggccttgaaccgcgaagaagacttcaaagcgaccgagatcatcgaacctagcaaacaggacaagcccctgatcgagaagctcgcggagatttatgtgaactcttcattctacaaggaaacaaaggcagagctccaccagctttccgggggcgagaaaaagaaaaagattaccgtgttcaaggagatctcctacaccacctcattttgtcaccagttgaggtgggtgagtaagcgatccttcaagaatctactagggaaccctcaagcttctatagcacagattatcgttacagtagtactgggattagtgattggagccatttacttcgggctcaagaacgactcaaccggcatccagaatagagctggtgtgctgtttttcctgaccacgaaccagtgcttctctagcgttagtgctgtggagctatttgttgtggagaagaaattgtttatacatgaatacattagcggctactatagagttagcagctatttcctgggtaaactactctctgatttactcccaatgcgaatgctcccaagcatcatattcacgtgcatcgtgtatttcatgctgggattgaaaccaaaggccgacgctttctttgtcatgatgttcacgttaatgatggtggcctactccgcatcatcaatggcccttgctatagcggccggccagtccgttgtttctgtagcgaccctcttaatgaccatctgctttgtcttcatgatgattttttctggactcttggttaatctcacaacgatcgccagttggttatcctggttgcagtactttagcatcccaaggtatggctttaccgctctacagcataatgagttcctgggacagaacttctgcccagggctgaatgccacaggcaataacccctgtaactacgcaacatgtactggagaggaatacttggtcaagcaggggattgacctgtcaccatgggggctttggaagaaccacgtcgccctggcttgtatgattgtgatctttctgactattgcttacctgaagctgctattcctgaaaaaatacagctag

SEQ ID NO: 150035 - DNA, 1968 bp, Artificial Sequence
  derived and/or modified sequence
atgagcagcagcaatgtggaggtgttcatccctgtgtcccagggcaacaccaacggcttccctgccacagccagcaatgacctgaaggccttcacagagggcgctgtgctgtccttccacaacatctgctacagagtgaagctgaagagcggcttcctgccctgcaggaagcctgtggagaaggagatcctgagcaacatcaatggcatcatgaagccaggcctgaatgccatcctgggccccaccggcggcggcaagagcagcctgctggatgtgctggccgccaggaaggaccccagcggcctgtctggagatgtgctgatcaatggagcccccaggcctgccaacttcaagtgcaacagcggctacgtggtgcaggatgatgtggtgatgggcaccctgactgtgcgggagaacctgcagttctctgctgccctgcggctggccaccaccatgaccaaccacgagaagaatgaaagaatcaacagagtcatccaggagctgggcctggacaaggtggccgacagcaaggtgggcacccagttcatccggggcgtgtctggaggagagaggaagaggaccagcatcggcatggagctgatcacagaccccagcatcctcttcctggatgagcccaccaccggcctggacagcagcacagccaatgctgtgctgctgctgctgaagaggatgagcaagcagggccgcaccatcatcttcagcatccaccagccccgctacagcatcttcaagctgtttgacagcctgaccctgctggccagcggccgcctgatgtttcatggccctgcccaggaggccctgggctactttgaatctgctggctaccactgtgaggcctacaacaacccagctgacttcttcctggacatcatcaatggagacagcacagctgtggccctgaaccgggaggaggacttcaaggccacagagatcatcgagcccagcaagcaggacaagcccctgattgagaagctggccgagatctacgtgaacagcagcttctacaaggagaccaaggccgagctgcaccagctgtctggaggagagaagaagaagaagatcaccgtcttcaaggagatctcctacaccaccagcttctgccaccagctgcgctgggtgtccaagaggagcttcaagaacctgctgggcaacccccaggccagcatcgcccagatcatcgtgacagtggtgctgggcctggtgattggagccatctacttcggcctgaagaatgacagcacaggcatccagaacagagctggggtgctcttcttcctgaccaccaaccagtgcttcagctctgtgtctgctgtggagctgtttgtggtggagaagaagctgttcatccacgagtacatcagcggctactacagagtgagcagctacttcctgggcaagctgctgagtgacctgctgcccatgaggatgctgcccagcatcatcttcacctgcatcgtgtacttcatgctgggcctgaagcccaaggcagatgccttctttgtgatgatgttcaccctgatgatggtggcctacagcgccagctccatggccctggccatcgctgctggccagagcgtggtgtctgtggccaccctgctgatgaccatctgctttgtgttcatgatgatcttcagcggcctgctggtgaacctgaccaccatcgcctcctggctgtcctggctgcagtacttcagcatccccaggtatggcttcaccgccctgcagcacaatgagttcctgggccagaacttctgccccggcctgaatgccaccggcaacaacccctgcaactatgccacctgcacaggagaggagtacctggtgaagcagggcatcgacctgagcccctggggcctgtggaagaaccacgtggccctggcctgcatgatcgtcatcttcctgaccatcgcctacctgaagctgctcttcctgaagaagtacagctag

SEQ ID NO: 150036 - DNA, 1968 bp, Artificial Sequence
  derived and/or modified sequence
atgagcagcagcaacgtggaggtgttcatccccgtgagccagggcaacacaaatggttttcctgcgaccgcttccaacgatctgaaagcgttcacagaaggcgctgtattgtcctttcacaacatctgctaccgtgtgaagttaaagtcagggtttctgccttgcaggaaacctgtagaaaaagaaattttgtcaaacatcaatgggattatgaagcctggactgaacgccattttggggcctaccggcggagggaaatcctccctcctagatgttctggctgcccggaaggacccctcaggcctgtctggcgatgtgctgattaatggtgcccctagaccagcgaatttcaaatgcaacagcggatacgtggtccaggacgatgtggttatgggtacactgacggtgcgggaaaatctgcagtttagcgcagcactgcggctggccacaactatgacaaatcatgaaaaaaatgagagaatcaatagggtaatacaagaactgggcctggataaggtggcagatagcaaggtcggcacccagtttatccggggcgtctcggggggtgaacgaaagagaacatcaataggcatggagcttatcactgatcctagcatactctttcttgatgagcccaccactggactggactcatccaccgcaaacgctgtcttgcttctgcttaagagaatgtctaaacaggggcgtacgattatattctctatccaccagcctcgctactctatctttaagttatttgacagtcttaccctattggcttcagggaggctgatgttccacgggccagcacaggaagcgctgggatacttcgagtctgcggggtaccattgcgaggcctacaacaatcccgccgactttttcttggacatcattaacggcgatagcactgctgtggccctgaatagggaagaggacttcaaagccaccgaaataatcgagccaagcaaacaagacaagcccctgattgaaaagctggccgagatctacgttaatagcagcttttataaggagaccaaagcggagctacatcagctgtcagggggcgagaagaagaaaaagattaccgtgtttaaggagataagctacaccacgtcattctgtcatcagctgcgctgggtaagtaaacgaagtttcaagaacctgcttggaaacccacaggcgtctatagctcagattatagtcactgtggtgcttggactggttatcggtgctatctattttgggctgaaaaatgattcgacagggattcaaaatagagccggggtacttttttttctgacgacaaatcagtgcttctctagtgtttccgccgtggaactgttcgttgtggagaagaagctctttatccacgaatacatttctggatactatagggtgagttcttactttcttggaaaactcctaagcgacttgttaccaatgcgaatgctcccttccatcatattcacatgcatcgtttactttatgctgggcctgaagccaaaagctgacgcatttttcgtgatgatgtttactttaatgatggttgcatattctgctagtagtatggccctggccatcgccgcaggccagagcgtggtgtccgttgctaccctgctgatgactatttgttttgtatttatgatgattttctctggcctcctggttaacctaacaactattgcttcatggctgagctggttgcaatatttctcaatcccaaggtatgggtttacagctctccagcataacgagtttctggggcagaatttctgccctggactcaacgctaccggaaacaacccttgtaattacgccacatgtaccggcgaggaatacctggtgaagcaggggatcgatctatcaccatggggtctctggaagaatcatgtggcgctcgcctgtatgattgtgatcttcctgaccattgcgtatctgaaattactcttcctgaagaaatacagctag

SEQ ID NO: 150037 - DNA, 1968 bp, Artificial Sequence
  derived and/or modified sequence
atgagtagttcaaatgtagaagttttcataccagtgagccagggaaacacaaacggttttccggctacagccagtaacgacctgaaggcatttacagaaggggcagtattatccttccataatatctgctatagggtcaagttaaaatccggctttctaccctgtcggaagccagtcgagaaggagattcttagcaatatcaacggaatcatgaagcccggtctgaatgctatactggggcctacaggcggagggaaatcctcactgttggacgtactggccgctcgaaaggatcctagcggtttgtcgggggacgtgctgataaacggggctccaagaccagctaatttcaaatgcaattctggttatgtcgtccaggacgacgtggttatgggcactctgacagtccgcgaaaatcttcagttctcggccgctctgcgcctggccaccaccatgacaaaccacgagaaaaacgaacgcatcaaccgagtcattcaggaactgggtctggataaggtagccgattcaaaggtgggtacccaattcattcgaggcgtatcgggcggagagagaaaaaggacctcaatcggaatggagctgattaccgatccctccatcctgtttctggatgaacccactacggggttagattcatctacagccaatgctgtcctgctacttctgaaacggatgagcaagcagggacggaccataatctttagcattcaccagccgcgatattctatttttaaattgtttgacagcctcaccctcctggccagcggcaggcttatgttccacggccctgcgcaggaagcacttggttacttcgaatcagctgggtaccattgcgaggcctacaacaacccggcagatttctttctggacatcattaacggagactcaaccgctgtggccttgaaccgggaagaggactttaaagccacagagataatcgaaccgtctaaacaggacaagcctcttatcgaaaagctggcggagatttacgtcaacagctccttttataaggagaccaaggcagagctgcatcagctaagcgggggagagaagaagaaaaagattactgtcttcaaggagatttcatatacaacttcattctgtcaccaactcaggtgggtatccaagcgatcgtttaagaacctcttgggaaatccgcaggcatctattgcgcagattattgttaccgtggtgctgggtcttgtgattggggctatctattttgggctcaagaatgactcgactggcattcagaatcgggctggggtcttgttttttttgactacaaatcagtgctttagctccgtgtccgcagtggagctgttcgtggtggagaagaagttgtttatacacgagtacatctccggctactatcgggtgtccagctattttctaggcaagctgttgtctgatctactccccatgagaatgctgccctcgatcatattcacatgtattgtgtatttcatgctgggcctgaagcctaaagccgacgcctttttcgtcatgatgttcactcttatgatggtagcttatagcgcttcaagcatggccctggcaattgccgctggccaatcggtggttagcgtggccacattactgatgaccatatgtttcgtgtttatgatgattttctcaggcttgctggtgaacctcactactatcgcctcgtggcttagctggctgcaatacttcagtattccacgctacggttttaccgcactccagcacaatgagttcctgggacagaacttctgccctggcctcaacgctacagggaacaacccgtgcaactacgccacatgcaccggagaggagtacctggtgaagcaggggatcgacctgtctccttggggcctgtggaagaaccacgtggcactcgcttgcatgattgtcatcttcttgacgatcgcctacctcaaactgctgttcctaaagaagtactcctag

SEQ ID NO: 150038 - DNA, 4479 bp, Artificial Sequence
  derived and/or modified sequence
actgcgttcagctctggcggtccacagcccgaagcgcggcttaggaagttcgtgtcagcgctgcctgagctcgtcccctggatgtccgggtctccccaggcggccacccgccggctcccatcgtgacctccagccgcagcgcctcccacgccggccgccgcgcgaggggagcgctcgggcgcgccgggtgtggttgggggaaggggttgtgccgcgcgcgggctgcgtgctgtgcccactcaaaaggttccgggcgcgcaggagggaagaggcagtgcccgccactcccactgagattgagagacgcggcaaggaggcagcctgtggaggaactgggtaggatttaggaacgcaccgtgcacatgcttggtggtcttgttaagtggaaactgctgctttagagtttgtttggaaggtccgggtgactcatcccaacatttacatccttaattgttaaagcgctgcctccgagcgcacgcatcctgagatcctgagcctttggttaagaccgagctctattaagctgaaaagataaaaactctccagatgtcttccagtaatgtcgaagtttttatcccagtgtcacaaggaaacaccaatggcttccccgcgacagcttccaatgacctgaaggcatttactgaaggagctgtgttaagttttcataacatctgctatcgagtaaaactgaagagtggctttctaccttgtcgaaaaccagttgagaaagaaatattatcgaatatcaatgggatcatgaaacctggtctcaacgccatcctgggacccacaggtggaggcaaatcttcgttattagatgtcttagctgcaaggaaagatccaagtggattatctggagatgttctgataaatggagcaccgcgacctgccaatttcaaatgtaattcaggttacgtggtacaagatgatgttgtgatgggcactctgacggtgagagaaaacttacagttctcagcagctcttcggcttgcaacaactatgacgaatcatgaaaaaaacgaacggattaacagggtcattcaagagttaggtctggataaagtggcagactccaaggttggaactcagtttatccgtggtgtgtctggaggagaaagaaaaaggactagtataggaatggagcttatcactgatccttccatcttgttcttggatgagcctacaactggcttagactcaagcacagcaaatgctgtccttttgctcctgaaaaggatgtctaagcagggacgaacaatcatcttctccattcatcagcctcgatattccatcttcaagttgtttgatagcctcaccttattggcctcaggaagacttatgttccacgggcctgctcaggaggccttgggatactttgaatcagctggttatcactgtgaggcctataataaccctgcagacttcttcttggacatcattaatggagattccactgctgtggcattaaacagagaagaagactttaaagccacagagatcatagagccttccaagcaggataagccactcatagaaaaattagcggagatttatgtcaactcctccttctacaaagagacaaaagctgaattacatcaactttccgggggtgagaagaagaagaagatcacagtcttcaaggagatcagctacaccacctccttctgtcatcaactcagatgggtttccaagcgttcattcaaaaacttgctgggtaatccccaggcctctatagctcagatcattgtcacagtcgtactgggactggttataggtgccatttactttgggctaaaaaatgattctactggaatccagaacagagctggggttctcttcttcctgacgaccaaccagtgtttcagcagtgtttcagccgtggaactctttgtggtagagaagaagctcttcatacatgaatacatcagcggatactacagagtgtcatcttatttccttggaaaactgttatctgatttattacccatgaggatgttaccaagtattatatttacctgtatagtgtacttcatgttaggattgaagccaaaggcagatgccttcttcgttatgatgtttacccttatgatggtggcttattcagccagttccatggcactggccatagcagcaggtcagagtgtggtttctgtagcaacacttctcatgaccatctgttttgtgtttatgatgattttttcaggtctgttggtcaatctcacaaccattgcatcttggctgtcatggcttcagtacttcagcattccacgatatggatttacggctttgcagcataatgaatttttgggacaaaacttctgcccaggactcaatgcaacaggaaacaatccttgtaactatgcaacatgtactggcgaagaatatttggtaaagcagggcatcgatctctcaccctggggcttgtggaagaatcacgtggccttggcttgtatgattgttattttcctcacaattgcctacctgaaattgttatttcttaaaaaatattcttaaatttccccttaattcagtatgatttatcctcacataaaaaagaagcactttgattgaagtattcaatcaagtttttttgttgttttctgttcccttgccatcacactgttgcacagcagcaattgttttaaagagatacatttttagaaatcacaacaaactgaattaaacatgaaagaacccaagacatcatgtatcgcatattagttaatctcctcagacagtaaccatggggaagaaatctggtctaatttattaatctaaaaaaggagaattgaattctggaaactcctgacaagttattactgtctctggcatttgtttcctcatctttaaaatgaataggtaggttagtagcccttcagtcttaatactttatgatgctatggtttgccattatttaataaatgacaaatgtattaatgctatactggaaatgtaaaattgaaaatatgttggaaaaaagattctgtcttatagggtaaaaaaagccaccgtgatagaaaaaaaatctttttgataagcacattaaagttaatagaacttactgatattcctgtctagtggtataatatctcaggaatcttggctgagggtttggaactgtgggtagagtagagggccaggagtccagtaatagaattcttgcaccatttctggaacattctagctctgggaggtcacgtaaccttcttggggtagttcagtggtttagtggtttataatccaggtgtgcgtcagaatcatctgaggaactttgctaaaatacaaaaatctggcctaagtagctccagatctaccttcataaaggaatctgaccactcctggatttggtaatttccaagttctgaaaattttacttaggatttaataactattaacatctgtccctacataggttttctttcctacttatataccttatgttctcttcattctaaccttcatcagtaatagggaaatgttttaattttatttttttagttgaagggtaatgtaccaaaaaatatagttcagtgaattaaaatgaacacacatgtgcaaccatcaattcaggtcaagaaatagaagattgtagcacacaaaagcctactcagccattctcccagtcactacttccttccttacccctgggttatttttgaaatgacacttgatgtatttccctctgttgctgttatgagaacattgctacagccaagtgttgtgtttctgtgtgcataggttgatacttaattatctccccactttttaataaacttttaatttggaaataattttagattgacagaaaagttgcaaagatagtgaggaaagttcctgtctactctttgctcagcttcccttaatgttaacattttatatagcaagatgcatttgtcaaagctaacaagttaacattggtacaatcactgttaattaaactgcacacaatattcagatttcaccacttttccactaatattctttcattgttctaggattcaattcaggagaccacatttcatctagccctcttttttaaaagtaaatacttttcagcacttacaggagttaactgagctggggcatcatggtgtatagacgccctgacactggtcatcttggaattcatttagtttgtcagtgggtgccctgacattctgtcacaacatcaatttgggaacatggcattatatttttatctttgaacttttttctttttggatgacatttgattaatgcgtcatcttggaacacattatcttttttcttggttatgtgatcaggaagattaatcagtttttcctgttcttggtataattcctgcttttcacatacctgtcccttacagttctctatatatacccttcccttattacacagagagaaatatctatctatactttttacacaaaatatacttcaaaagaaacaaaacagccacaattattaactttttaaataaatgagaatttaattata

SEQ ID NO: 150039 - DNA, 1968 bp, Artificial Sequence
  derived and/or modified sequence
atgagcagcagcaacgtggaggtgttcatccccgtgagccagggcaacaccaacggcttccccgccaccgccagcaacgacctgaaggccttcaccgagggcgccgtgctgagcttccacaacatctgctacagagtgaagctgaagagcggcttcctgccctgcagaaagcccgtggagaaggagatcctgagcaacatcaacggcatcatgaagcccggcctgaacgccatcctgggccccaccggcggcggcaagagcagcctgctggacgtgctggccgccagaaaggaccccagcggcctgagcggcgacgtgctgatcaacggcgcccccagacccgccaacttcaagtgcaacagcggctacgtggtgcaggacgacgtggtgatgggcaccctgaccgtgagagagaacctgcagttcagcgccgccctgagactggccaccaccatgaccaaccacgagaagaacgagagaatcaacagagtgatccaggagctgggcctggacaaggtggccgacagcaaggtgggcacccagttcatcagaggcgtgagcggcggcgagagaaagagaaccagcatcggcatggagctgatcaccgaccccagcatcctgttcctggacgagcccaccaccggcctggacagcagcaccgccaacgccgtgctgctgctgctgaagagaatgagcaagcagggcagaaccatcatcttcagcatccaccagcccagatacagcatcttcaagctgttcgacagcctgaccctgctggccagcggcagactgatgttccacggccccgcccaggaggccctgggctacttcgagagcgccggctaccactgcgaggcctacaacaaccccgccgacttcttcctggacatcatcaacggcgacagcaccgccgtggccctgaacagagaggaggacttcaaggccaccgagatcatcgagcccagcaagcaggacaagcccctgatcgagaagctggccgagatctacgtgaacagcagcttctacaaggagaccaaggccgagctgcaccagctgagcggcggcgagaagaagaagaagatcaccgtgttcaaggagatcagctacaccaccagcttctgccaccagctgagatgggtgagcaagagaagcttcaagaacctgctgggcaacccccaggccagcatcgcccagatcatcgtgaccgtggtgctgggcctggtgatcggcgccatctacttcggcctgaagaacgacagcaccggcatccagaacagagccggcgtgctgttcttcctgaccaccaaccagtgcttcagcagcgtgagcgccgtggagctgttcgtggtggagaagaagctgttcatccacgagtacatcagcggctactacagagtgagcagctacttcctgggcaagctgctgagcgacctgctgcccatgagaatgctgcccagcatcatcttcacctgcatcgtgtacttcatgctgggcctgaagcccaaggccgacgccttcttcgtgatgatgttcaccctgatgatggtggcctacagcgccagcagcatggccctggccatcgccgccggccagagcgtggtgagcgtggccaccctgctgatgaccatctgcttcgtgttcatgatgatcttcagcggcctgctggtgaacctgaccaccatcgccagctggctgagctggctgcagtacttcagcatccccagatacggcttcaccgccctgcagcacaacgagttcctgggccagaacttctgccccggcctgaacgccaccggcaacaacccctgcaactacgccacctgcaccggcgaggagtacctggtgaagcagggcatcgacctgagcccctggggcctgtggaagaaccacgtggccctggcctgcatgatcgtgatcttcctgaccatcgcctacctgaagctgctgttcctgaagaagtacagctag

SEQ ID NO: 150040 - protein, 276 aa, Artificial Sequence
  derived and/or modified sequence
MAWRALHPLLLLLLLFPGSQAQSKAQVLQSVAGQTLTVRCQYPPTGSLYEKKGWCKEASALVCIRLVTSSKPRTMAWTSRFTIWDDPDAGFFTVTMTDLREEDSGHYWCRIYRPSDNSVSKSVRFYLVVSPASASTQTSWTPRDLVSSQTQTQSCVPPTAGARQAPESPSTIPVPSQPQNSTLRPGPAAPIALVPVFCGLLVAKSLVLSALLVWWGDIWWKTMMELRSLDTQKATCHLQQVTDLPWTSVSSPVEREILYHTVARTKISDDDDEHTL

SEQ ID NO: 150041 - DNA, 831 bp, Artificial Sequence
  derived and/or modified sequence
atggcatggagggccctgcacccactgctcctgcttttgctgctattccctggatcacaggctcagtctaaggcacaagtgctccagagcgtcgcaggtcaaacactgactgtgaggtgtcagtatccccctaccggcagcctgtatgagaaaaagggttggtgcaaggaggccagtgccttagtgtgtattcgcctggtcacctcctctaaaccccgaacaatggcatggacatcgcggttcacgatctgggatgacccagacgctggctttttcacagtcactatgacagatctgagagaagaagactcaggccactactggtgtagaatttatagaccctcagacaacagtgttagcaaaagcgtccgcttttatctggtcgtgagccctgccagcgcgagtacgcaaacaagctggaccccccgcgacctcgtttcgtcacagactcagacacaatcatgtgtaccacctaccgcaggcgccaggcaggccccggagtcccctagcactattccggtgccgagtcagccgcagaacagcacgcttagacccgggcctgccgcccccattgcgctggttccggtgttttgcggcctcctcgttgcaaagagccttgttttgtcagctctgctcgtttggtggggagacatttggtggaagaccatgatggagcttcgttccttagacacacagaaagctacttgtcatcttcagcaggtgaccgatcttccatggacctccgtgtcatcccctgtggaaagggagattctgtaccacactgtggctaggaccaagatatctgatgacgatgatgagcacaccctgtag

SEQ ID NO: 150042 - DNA, 831 bp, Artificial Sequence
  derived and/or modified sequence
atggcctggagggccctgcaccccctgctgctgctgctgctgctcttccctggcagccaggcccagagcaaggcccaggtgctgcagagcgtggccggccagaccctgactgtgcgctgccagtacccacccaccggcagcctgtatgagaagaagggctggtgcaaggaggccagcgccctggtgtgcatccggctggtgaccagcagcaagcccaggaccatggcctggaccagccgcttcaccatctgggatgatcctgatgctggcttcttcaccgtgaccatgacagacctgcgggaggaggacagcggccactactggtgccgcatctaccggcccagcgacaacagcgtgtccaagtctgtgcgcttctacctggtggtgtccccagccagcgccagcacccagacctcctggaccccccgggacctggtgagcagccagacccagacccagagctgtgtgcccccaacagctggggcccggcaggcccctgagagccccagcaccatccctgtgcccagccagccccagaacagcaccctgcggcccggccctgctgcccccatcgccctggtgcctgtgttctgtggcctgctggtggccaagagcctggtgctgagcgccctgctggtgtggtggggagacatctggtggaagaccatgatggagctgcggagcctggacacccagaaggccacctgccacctgcagcaggtgacagacctgccctggacctctgtgagcagccctgtggagcgggagatcctgtaccacacagtggcccggaccaagatcagtgatgatgatgatgagcacaccctgtag

SEQ ID NO: 150043 - DNA, 942 bp, Artificial Sequence
  derived and/or modified sequence
gagcagcagaatcaggcccagctcccaattccctctccccagtcttctccaggtgtcccctcccatgagcgcacaggaaaaggaccacatggcctggcgagccctacacccactgctactgctgctgctgctgttcccaggctctcaggcacaatccaaggctcaggtacttcaaagtgtggcagggcagacgctaaccgtgagatgccagtacccgcccacgggcagtctctacgagaagaaaggctggtgtaaggaggcttcagcacttgtgtgcatcaggttagtcaccagctccaagcccaggacgatggcttggacctctcgattcacaatctgggacgaccctgatgctggcttcttcactgtcaccatgactgatctgagagaggaagactcaggacattactggtgtagaatctaccgcccttctgacaactctgtctctaagtccgtcagattctatctggtggtatctccagcctctgcctccacacagacctcctggactccccgcgacctggtctcttcacagacccagacccagagctgtgtgcctcccactgcaggagccagacaagcccctgagtctccatctaccatccctgtcccttcacagccacagaactccacgctccgccctggccctgcagcccccattgccctggtgcctgtgttctgtggactcctcgtagccaagagcctggtgctgtcagccctgctcgtctggtggggggacatatggtggaaaaccatgatggagctcaggagcctggatacccaaaaagccacctgccaccttcaacaggtcacggaccttccctggacctcagtttcctcacctgtagagagagaaatattatatcacactgttgcaaggactaagataagcgatgatgatgatgaacacactttgtgaataataaaattatctgaatgttt

SEQ ID NO: 150044 - DNA, 831 bp, Artificial Sequence
  derived and/or modified sequence
atggcctggcgggccctgcaccccctgctgctgctgctgctgctgttcccagggtcccaggcccagagtaaggctcaagtgctgcagtctgtagccggacagactctcactgtcaggtgtcaataccctccaaccggcagcttatacgaaaagaaggggtggtgcaaagaagcttccgcgctggtgtgcattagactcgtgacatcctctaagcctcggaccatggcatggacctcccgcttcacaatctgggatgatccggatgcgggcttttttacagtgacaatgacagatctgagagaggaagactctggacattattggtgccgtatctacaggccaagtgacaactccgtgagtaaaagcgttaggttttacctcgtagtttccccagcgtcagcatctacacagacatcatggactccaagagatctggtatcctctcaaacacaaacccaaagctgtgtgccacctaccgcaggtgcaagacaggcccccgaaagcccctctaccataccagtgccgtcccagccccagaactctacactcagacccggaccggcagctcccatagccctcgtgccagtgttctgtggcctgctggtggcaaagagtctggtgttgagcgcactgttagtctggtggggagacatctggtggaaaaccatgatggaattgaggtccctggacacccagaaggcaacatgccacctgcagcaggtgacagatcttccctggacttccgtgtccagccccgtggagagggagattctttaccacactgtcgcccgcaccaagatatccgatgatgatgacgaacacacactgtag

SEQ ID NO: 150045 - DNA, 831 bp, Artificial Sequence
  derived and/or modified sequence
atggcctggcgggctctccatcccttattgttattgctgctcctgtttccaggctcacaggcacagagcaaagcacaggtactgcagtctgtcgccggacagaccctgacagtaaggtgtcaatacccaccgaccggaagcctgtacgaaaagaagggctggtgcaaggaagcatccgccctagtgtgcatcaggctggtgacatcctcaaagccacgtactatggcctggacgtccaggttcactatctgggacgatcctgatgcaggcttttttactgtgaccatgaccgatcttcgagaagaagattctgggcactactggtgccggatctacaggccctctgataactctgtttcaaaatcggtccggttctacctggtcgtgagtccagctagcgcgtctacacaaacatcatggacgcctcgcgatttggtctcgtcccagacccagacccagagctgcgtgccgccaacagctggagccaggcaggcaccggagtcccctagcacaatccccgttcccagccaaccccagaacagcacgctgaggcctggcccagccgcacctatcgcgctcgttcccgtgttttgcggactgttggtggccaaatcgctggttctgagcgcgctcctggtgtggtggggagacatttggtggaagaccatgatggaactgagatctctagacacccagaaggctacctgccaccttcagcaagtgaccgaccttccatggacctcggttagctcaccggtcgagcgggaaatcttgtaccatacggtcgcccgtactaagatctccgatgacgatgacgagcacacactgtag

SEQ ID NO: 150046 - DNA, 831 bp, Artificial Sequence
  derived and/or modified sequence
atggcctggagagccctgcaccccctgctgctgctgctgctgctgttccccggcagccaggcccagagcaaggcccaggtgctgcagagcgtggccggccagaccctgaccgtgagatgccagtacccccccaccggcagcctgtacgagaagaagggctggtgcaaggaggccagcgccctggtgtgcatcagactggtgaccagcagcaagcccagaaccatggcctggaccagcagattcaccatctgggacgaccccgacgccggcttcttcaccgtgaccatgaccgacctgagagaggaggacagcggccactactggtgcagaatctacagacccagcgacaacagcgtgagcaagagcgtgagattctacctggtggtgagccccgccagcgccagcacccagaccagctggacccccagagacctggtgagcagccagacccagacccagagctgcgtgccccccaccgccggcgccagacaggcccccgagagccccagcaccatccccgtgcccagccagccccagaacagcaccctgagacccggccccgccgcccccatcgccctggtgcccgtgttctgcggcctgctggtggccaagagcctggtgctgagcgccctgctggtgtggtggggcgacatctggtggaagaccatgatggagctgagaagcctggacacccagaaggccacctgccacctgcagcaggtgaccgacctgccctggaccagcgtgagcagccccgtggagagagagatcctgtaccacaccgtggccagaaccaagatcagcgacgacgacgacgagcacaccctgtag

SEQ ID NO: 150047 - protein, 304 aa, Artificial Sequence
  derived and/or modified sequence
MSSTLPALLCVGLCLSQRISAQQQTLPKPFIWAEPHFMVPKEKQVTICCQGNYGAVEYQLHFEGSLFAVDRPKPPERINKVKFYIPDMNSRMAGQYSCIYRVGELWSEPSNLLDLVVTEMYDTPTLSVHPGPEVISGEKVTFYCRLDTATSMFLLLKEGRSSHVQRGYGKVQAEFPLGPVTTAHRGTYRCFGSYNNHAWSFPSEPVKLLVTGDIENTSLAPEDPTFPADTWGTYLLTTETGLQKDHALWDHTAQNLLRMGLAFLVLVALVWFLVEDWLSRKRTRERASRASTWEGRRRLNTQTL

SEQ ID NO: 150048 - DNA, 915 bp, Artificial Sequence
  derived and/or modified sequence
atgtcatctacactgcctgccttgttatgcgtgggtctctgtcttagccaacggatttccgcccagcagcagacactgcccaaaccgttcatctgggcagaaccgcattttatggtgccaaaggagaaacaggtgacaatttgctgtcaaggcaactacggggcggtggaataccagctgcacttcgaagggagtctctttgccgtggatcgaccaaaacctccagaacgcatcaacaaagtgaagttctacatccctgacatgaattcccgcatggcgggtcagtactcttgcatatacagggtgggggagttgtggtccgagccctccaatctgcttgatctggtggtgactgagatgtacgacactccgacactgagcgtgcacccaggacctgaggttatctcaggagagaaggtcacattctattgccggctcgatacggctactagcatgtttctgctgctgaaggaaggacggtctagtcacgtgcagaggggttatggcaaagtgcaggcagaatttcccctcgggcccgtgaccacagctcacagagggacgtatcggtgctttggttcgtacaacaatcatgcctggagctttccaagcgagcctgttaaactcttggttaccggagacatcgagaataccagtctcgctcctgaggaccctaccttccctgccgacacatggggaacatatctgctgactactgagacaggcttgcagaaagatcacgctctttgggaccacacagcgcaaaacttgttacgcatggggctcgccttcctggtcctggtggctctggtgtggtttctggttgaggactggctgtcgcggaagcggaccagggaacgtgcaagccgagcatcaacctgggaaggtaggcggaggctcaatacccaaaccttatag

SEQ ID NO: 150049 - DNA, 915 bp, Artificial Sequence
  derived and/or modified sequence
atgagcagcaccctgcctgccctgctgtgtgtgggcctgtgcctgagccagaggatcagcgcccagcagcagaccctgcccaagcccttcatctgggccgagccccacttcatggtgcccaaggagaagcaggtgaccatctgctgccagggcaactatggagctgtggagtaccagctgcactttgagggcagcctgtttgctgtggaccggcccaagcccccagagcgcatcaacaaggtgaagttctacatcccagacatgaacagcaggatggccggccagtacagctgcatctacagagtgggggagctgtggagcgagcccagcaacctgctggacctggtggtgacagagatgtatgacacccccaccctgtctgtgcaccctggccctgaggtgatcagcggggagaaggtgaccttctactgccgcctggacacagccacctccatgttcctgctgctgaaggagggccgcagcagccacgtgcagaggggctacggcaaggtgcaggccgagttccccctgggccctgtgaccacagcccaccggggcacctaccgctgcttcggcagctacaacaaccacgcctggagcttccccagcgagcctgtgaagctgctggtgactggagacatcgagaacaccagcctggcccctgaggaccccaccttccctgctgacacctggggcacctacctgctgaccacagagaccggcctgcagaaggaccacgccctgtgggaccacacagcccagaacctgctgaggatgggcctggccttcctggtgctggtggccctggtgtggttcctggtggaggactggctgagcaggaagaggacccgggagcgggccagccgggccagcacctgggagggcagaagaaggctgaacacccagaccctgtag

SEQ ID NO: 150050 - DNA, 1153 bp, Artificial Sequence
  derived and/or modified sequence
tccccactgctcagcactaggccggcagaatctgagcgatgtcttccacactccctgccctgctctgcgtcgggctgtgtctgagtcagaggatcagcgcccagcagcagactctcccaaaaccgttcatctgggccgagccccatttcatggttccaaaggaaaagcaagtgaccatctgttgccagggaaattatggggctgttgaataccagctgcactttgaaggaagcctttttgccgtggacagaccaaaaccccctgagcggattaacaaagtcaaattctacatcccggacatgaactcccgcatggcagggcaatacagctgcatctatcgggttggggagctctggtcagagcccagcaacttgctggatctggtggtaacagaaatgtatgacacacccaccctctcggttcatcctggacccgaagtgatctcgggagagaaggtgaccttctactgccgtctagacactgcaacaagcatgttcttactgctcaaggagggaagatccagccacgtacagcgcggatacgggaaggtccaggcggagttccccctgggccctgtgaccacagcccaccgagggacataccgatgttttggctcctataacaaccatgcctggtctttccccagtgagccagtgaagctcctggtcacaggcgacattgagaacaccagccttgcacctgaagaccccacctttcctgcagacacttggggcacctaccttttaaccacagagacgggactccagaaagaccatgccctctgggatcacactgcccagaatctccttcggatgggcctggcctttctagtcctggtggctctagtgtggttcctggttgaagactggctcagcaggaagaggactagagagcgagccagcagagcttccacttgggaaggcaggagaaggctgaacacacagactctttgaagaatgaccatgagacacagtggccatgggtggatctgaaagctggtgttgagcctgggcggcgtgagctctgtgttggacccacggaggagggagtcactgcagggaaagagggacactggcattccatttgtcagagcatcccggacgatgcagagggtgggagaactacatgctaaatttctttttttttttttttg

SEQ ID NO: 150051 - DNA, 915 bp, Artificial Sequence
  derived and/or modified sequence
atgagcagcaccctgcccgccctgctgtgcgtgggcctgtgcctgagccagcgtatatcagcacagcaacagactttgcccaagccatttatttgggccgagcctcacttcatggtccccaaggaaaaacaagttacaatatgctgccagggcaattatggcgccgttgagtaccaactgcacttcgagggctcactcttcgcagtggacagaccgaagcccccagagcgcattaataaagtgaagttctacatccccgacatgaattccaggatggcaggacagtatagttgcatatatagggttggtgagttgtggtctgagccatcaaatctcctggacctggtggtcactgaaatgtacgacactccaaccctgtccgtgcaccccggaccggaagtcatcagcggggagaaggtcaccttttactgcaggctggatacggccacatcaatgtttcttctgctcaaggaaggacgcagctcacacgtacaacgcgggtacggaaaagtacaggccgaattcccattaggcccagtgacgaccgcccatagagggacatatagatgcttcggatcctacaacaatcatgcctggtcgtttccctccgaaccagtgaagctcttagtaaccggagatattgaaaatacaagtctggcgccagaggatccaacctttcccgcagatacctggggcacataccttcttaccaccgaaactggtcttcagaaagaccacgcattgtgggatcatacggcacagaatcttctgaggatgggcctggcattcctcgtgctggttgcgttagtgtggttcctcgtagaggactggctgtcaaggaagcgcacacgggagcgggcctctcgggcaagtacctgggagggcagacgcagactaaatacacagactttgtag

SEQ ID NO: 150052 - DNA, 915 bp, Artificial Sequence
  derived and/or modified sequence
atgtcctccacacttcccgcacttctgtgtgtgggactgtgtctgagccagaggatatccgcccaacagcagaccctccccaaaccattcatttgggcagagccccattttatggtacctaaggagaagcaggttactatttgctgtcaggggaattacggagcagtggaatatcagctccactttgagggttcactgttcgctgtagataggcctaaaccccctgagaggatcaataaagttaagttttacatcccggacatgaattcaaggatggccggacagtacagctgtatctacagagtaggtgaactctggagtgagccatccaatcttctcgacctggtggtcaccgaaatgtatgacacacctacgcttagcgttcatcctggaccagaggtgatatccggtgaaaaagtgaccttctactgtcgactcgataccgctactagtatgttcctgctgctgaaagagggcaggtctagtcacgtacagcggggatacggtaaggtgcaggctgagtttcccctgggccctgtgaccactgcccaccgcggtacgtaccgctgttttggcagttacaacaaccatgcatggtctttcccgtctgaaccggtcaagctcctggtgacgggcgatattgagaacacatctctcgctcctgaggatcctacatttccggcagacacatggggaacctacctgcttactacagagacaggcctacagaaggatcatgccctgtgggatcatactgctcagaacctcctccggatgggcctggcctttctggtgttggtggctctggtgtggtttctggtggaggactggttgtcaaggaagcggactcgagaacgcgctagccgcgcatccacctgggaaggtagaagaaggctgaatacacagacgctttag

SEQ ID NO: 150053 - DNA, 915 bp, Artificial Sequence
  derived and/or modified sequence
atgagcagcaccctgcccgccctgctgtgcgtgggcctgtgcctgagccagagaatcagcgcccagcagcagaccctgcccaagcccttcatctgggccgagccccacttcatggtgcccaaggagaagcaggtgaccatctgctgccagggcaactacggcgccgtggagtaccagctgcacttcgagggcagcctgttcgccgtggacagacccaagccccccgagagaatcaacaaggtgaagttctacatccccgacatgaacagcagaatggccggccagtacagctgcatctacagagtgggcgagctgtggagcgagcccagcaacctgctggacctggtggtgaccgagatgtacgacacccccaccctgagcgtgcaccccggccccgaggtgatcagcggcgagaaggtgaccttctactgcagactggacaccgccaccagcatgttcctgctgctgaaggagggcagaagcagccacgtgcagagaggctacggcaaggtgcaggccgagttccccctgggccccgtgaccaccgcccacagaggcacctacagatgcttcggcagctacaacaaccacgcctggagcttccccagcgagcccgtgaagctgctggtgaccggcgacatcgagaacaccagcctggcccccgaggaccccaccttccccgccgacacctggggcacctacctgctgaccaccgagaccggcctgcagaaggaccacgccctgtgggaccacaccgcccagaacctgctgagaatgggcctggccttcctggtgctggtggccctggtgtggttcctggtggaggactggctgagcagaaagagaaccagagagagagccagcagagccagcacctgggagggcagaagaagactgaacacccagaccctgtag

SEQ ID NO: 150054 - protein, 1368 aa, Artificial Sequence
  derived and/or modified sequence
METQLQSIFEEVVKTEVIEEAFPGMFMDTPEDEKTKLISCLGAFRQFWGGLSQESHEQCIQWIVKFIHGQHSPKRISFLYDCLAMAVETGLLPPRLVCESLINSDTLEWERTQLWALTFKLVRKIIGGVDYKGVRDLLKVILEKILTIPNTVSSAVVQQLLAAREVIAYILERNACLLPAYFAVTEIRKLYPEGKLPHWLLGNLVSDFVDTFRPTARINSICGRCSLLPVVNNSGAICNSWKLDPATLRFPLKGLLPYDKDLFEPQTALLRYVLEQPYSRDMVCNMLGLNKQHKQRCPVLEDQLVDLVVYAMERSETEEKFDDGGTSQLLWQHLSSQLIFFVLFQFASFPHMVLSLHQKLAGRGLIKGRDHLMWVLLQFISGSIQKNALADFLPVMKLFDLLYPEKEYIPVPDINKPQSTHAFAMTCIWIHLNRKAQNDNSKLQIPIPHSLRLHHEFLQQSLRNKSLQMNDYKIALLCNAYSTNSECFTLPMGALVETIYGNGIMRIPLPGTNCMASGSITPLPMNLLDSLTVHAKMSLIHSIATRVIKLAHAKSSVALAPALVETYSRLLVYMEIESLGIKGFISQLLPTVFKSHAWGILHTLLEMFSYRMHHIQPHYRVQLLSHLHTLAAVAQTNQNQLHLCVESTALRLITALGSSEVQPQFTRFLSDPKTVLSAESEELNRALILTLARATHVTDFFTGSDSIQGTWCKDILQTIMSFTPHNWASHTLSCFPGPLQAFFKQNNVPQESRFNLKKNVEEEYRKWKSMSNENDIITHFSMQGSPPLFLCLLWKMLLETDHINQIGYRVLERIGARALVAHVRTFADFLVYEFSTSAGGQQLNKCIEILNDMVWKYNIVTLDRLILCLAMRSHEGNEAQVCYFIIQLLLLKPNDFRNRVSDFVKENSPEHWLQNDWHTKHMNYHKKYPEKLYFEGLAEQVDPPVQIQSPYLPIYFGNVCLRFLPVFDIVIHRFLELLPVSKSLETLLDHLGGLYKFHDRPVTYLYNTLHYYEMHLRDRAFLKRKLVHAIIGSLKDNRPQGWCLSDTYLKCAMNAREENPWVPDDTYYCRLIGRLVDTMAGKSPGPFPNCDWRFNEFPNPAAHALHVTCVELMALAVSGKEVGNALLNVVLKSQPLVPRENITAWMNAIGLIITALPEPYWIVLHDRIVSVISSPSLTSETEWVGYPFRLFDFTACHQSYSEMSCSYTLALAHAVWHHSSIGQLSLIPKFLTEVLLPIVKTEFQLLYVYHLVGPFLQRFQQERTRCMIEIGVAFYDMLLNVDQCSTHLNYMDPICDFLYHMKYMFTGDSVKEQVEKIICNLKPALKLRLRFITHISKMEPAAVPPQAMNSGSPAPQSNQVPVSLPVTQ

SEQ ID NO: 150055 - protein, 475 aa, Artificial Sequence
  derived and/or modified sequence
METQLQSIFEEVVKTEVIEEAFPGMFMDTPEDEKTKLISCLGAFRQFWGGLSQESHEQCIQWIVKFIHGQHSPKRISFLYDCLAMAVETGLLPPRLVCESLINSDTLEWERTQLWALTFKLVRKIIGGVDYKGVRDLLKVILEKILTIPNTVSSAVVQQLLAAREVIAYILERNACLLPAYFAVTEIRKLYPEGKLPHWLLGNLVSDFVDTFRPTARINSICGRCSLLPVVNNSGAICNSWKLDPATLRFPLKGLLPYDKDLFEPQTALLRYVLEQPYSRDMVCNMLGLNKQHKQRCPVLEDQLVDLVVYAMERSETEEKFDDGGTSQLLWQHLSSQLIFFVLFQFASFPHMVLSLHQKLAGRGLIKGRDHLMWVLLQFISGSIQKNALADFLPVMKLFDLLYPEKEYIPVPDINKPQSTHAFAMTCIWIHLNRKAQNDNSKLQIPIPHSLRLHHESAFANCFQITCMGDLTHTP

SEQ ID NO: 150056 - DNA, 4107 bp, Artificial Sequence
  derived and/or modified sequence
atggaaactcagctgcagagcatcttcgaggaagttgtcaaaactgaggtgatagaggaggcttttcctgggatgtttatggataccccagaggacgaaaaaaccaaactgatctcctgtctgggtgccttccggcagttttgggggggtctgtctcaggaatcccacgaacagtgcattcagtggattgttaaattcattcacggccaacacagtccgaaacgcatctcctttttatacgactgccttgctatggccgtggagacaggactcctgccgcctagacttgtgtgcgagagcttgataaacagcgacactctggagtgggaacggacacaactgtgggcgttaacatttaagctggtccggaagatcatcggcggggtggactacaagggagtgagggacttactgaaggtgatcctggaaaagattctgaccattcctaacacagtgagtagcgccgttgtgcagcagctgctggcggcccgggaagtcattgcctatattctggagcggaacgcctgcctcctgcctgcctacttcgcagtgactgagataaggaagctgtaccctgaagggaaattaccacactggcttctcgggaacttggtatccgactttgttgacacgttccgaccaacggcacggattaattctatctgtgggagatgctctctattgcctgtagtcaataactctggtgccatctgtaatagctggaaactggatcctgccactctaaggttccccctaaaaggcttgctgccgtatgataaggatttattcgagcctcaaactgcacttttacgctatgtcctggaacagccctacagtcgggatatggtgtgcaatatgctgggcctgaataagcagcataagcagaggtgccctgtcctagaggaccagctggtggaccttgttgtgtatgctatggaaagaagcgaaacggaggagaagtttgatgatggcggcacgtcccagttactgtggcagcacctgtccagccaattaattttttttgtgctgttccagtttgcctcatttccccatatggtgcttagtctccatcaaaagctggctggaagaggtctaatcaagggacgcgaccacctaatgtgggtcctgcttcaatttatctctggctcaatccagaaaaacgccctagccgatttcctcccagtcatgaaactgtttgatttgttgtatcccgagaaagaatacatccctgtacccgatatcaacaagccacaatccacccacgcctttgcgatgacctgcatctggatccacctgaatcgaaaagcacaaaatgacaactccaaactgcagatccctattccgcacagtctcagactgcaccacgaattcttgcaacagagcctgcgcaataagtctctgcagatgaacgattacaagatcgcattgttgtgcaacgcatactcaaccaattcggagtgtttcacactgcccatgggagcattggtcgagacaatatacggaaacggaattatgagaattcccttgcccggaaccaattgcatggcctctggaagtatcactcccctgccaatgaacctcctggacagtcttacagtgcacgctaagatgtccctcattcatagtatcgcaacccgggtcattaagctggcccacgcaaagtctagtgtcgctctcgctcctgcacttgtggagacttattcccgactgctcgtgtacatggagatcgagagtcttgggattaaaggcttcatctctcagctgcttcccacagtgttcaagagccatgcctggggaatactgcataccttgctggagatgttttcttaccgaatgcatcatattcaacctcattacagggtccagttgttatctcacctacatactctggctgccgtcgcccagaccaaccagaaccagctgcacctgtgtgtcgagtcaaccgcccttaggctgattactgccctcggctcatccgaggtgcagccccaatttactaggttcctttccgaccccaagactgtgctgtccgccgaatcagaagagctgaatcgagctctcatcctgactttggcccgggccacgcacgtaaccgacttcttcaccggtagcgattcaatccaggggacatggtgcaaggacatattgcagaccatcatgagtttcacaccgcataactgggcttcgcacactcttagttgtttcccaggtccacttcaagctttcttcaagcaaaataatgtgcctcaggagtccagatttaacctcaaaaaaaacgttgaagaagaatacagaaagtggaagagcatgtctaatgaaaacgatatcattacccacttctcaatgcagggcagcccacctctatttctctgccttctgtggaaaatgctgctggaaaccgaccatataaaccagattggctaccgagtcctcgaacggattggcgctcgggctctggtcgcacatgtgcgcacttttgccgacttcctcgtctatgagttttcaacgagtgccggcgggcagcaactgaataaatgcatcgagatccttaacgacatggtgtggaagtacaacatagtgacattggataggctcatcctgtgtctggctatgaggagccacgagggcaatgaggcacaggtctgttattttattatccagctcctgttgctgaaaccaaacgactttaggaatcgggtgagtgacttcgtgaaagagaactcaccagagcactggctgcagaatgactggcatacaaagcacatgaattaccacaaaaagtatcccgaaaagttgtattttgagggcctggctgagcaggtcgatcctccagtgcagatacagagcccatatctgcctatctacttcggcaacgtttgcctgcgatttctgcctgttttcgatattgtgatacacaggttcctggaattactgcccgttagcaaatccctggagacccttctcgatcatctcggaggcctgtataagtttcatgacagaccagttacctacctgtacaataccctacactattatgagatgcatttgcgggaccgggcatttttgaaaaggaagctggtgcatgcaattataggcagtttgaaagataataggccccaggggtggtgcttgtccgatacctacctgaagtgcgccatgaatgctcgtgaagagaatccttgggtcccggacgatacgtattactgccgtctgataggcaggttggtcgacaccatggccgggaaatctcccggcccgttcccaaattgtgactggcggttcaacgaatttccaaatcccgccgcccacgctttacacgttacctgcgtggagctgatggccctcgcggtaagcggcaaggaagtcggtaacgcactcctaaatgtcgtacttaaatctcagccccttgttcccagagaaaacatcactgcatggatgaatgccatcggtttgattatcaccgccctgcctgagccatattggatagttctgcatgaccgcattgtgtctgttataagtagtccctccctgacaagtgaaactgaatgggtgggctacccctttaggctgtttgattttaccgcatgtcaccagagctactctgagatgagctgctcctataccctagctctggcccacgcagtgtggcaccactctagcatagggcagctctcactgatccccaaatttctaacggaagtgctcctgcctatcgtgaaaaccgagttccagctgctgtatgtctatcacctcgtggggccttttctccagagattccagcaggagcgaactaggtgcatgattgagatcggagtggccttctacgatatgcttcttaacgtggaccagtgcagtacccacctaaattacatggacccaatttgtgattttctgtaccacatgaaatacatgttcacaggagatagtgtcaaagaacaggtggagaagataatttgcaatctgaagcccgcactgaagctgagactcagattcattactcatatctccaagatggagcccgctgcggtccccccacaggctatgaattcaggttctcctgcccctcagtccaatcaggtccccgtgtcactgcccgtgacacagtag

SEQ ID NO: 150057 - DNA, 3030 bp, Artificial Sequence
  derived and/or modified sequence
atggagcgatccgagactgaggagaaatttgacgacgggggtaccagtcagctgctctggcagcatctgagcagtcaattgatctttttcgtattgtttcaatttgccagctttccccatatggtcctgagccttcatcagaagtacattccagtccccgatattaataagccacagagcacacacgctttcgctatgacttgtatctggattcatttgaaccgaaaagcccagaacgataactcaaagctgcaaattccaattccccactctctgaggcttcatcatgaatttctgcagcaaagccttaggaataaatccctgcagatgaacgactataaaatagcgttgttatgcaatgcttattccacaaattcagagtgttttacgctgcctatgggcgcactggtggagaccatatatggtaatggtattatgaggattcccttgcccggcaccaattgcatggcgtccgggtcaatcactccactcccgatgaatcttctcgacagcctaacggtgcacgccaagatgtccctcatacactctatagccacaagggtcatcaagcttgcccatgccaagagttctgtggcattagccccagctctagttgaaacctacagtcggttgctcgtgtacatggagattgagtcccttggcattaagggattcatcagtcagctcctgcccaccgtcttcaagtcgcatgcttggggaatactacataccctgctggagatgttctcttacaggatgcatcatattcagccccattaccgggtgcaactccttagccatctgcatacactggcagcagtggcccagacaaaccagaatcagctgcacctgtgcgtggagtcaactgccctcaggctcataacagctttagggagctcagaggtacagccgcaattcacccgctttctgtctgacccgaagacagtgctgtccgctgagtcagaggaactgaatcgagccctgatactcacactcgcccgggccacacatgtgaccgacttcttcactggctccgatagcatccaggggacatggtgtaaagacatccttcagactattatgtcttttacacctcataactgggcctcacatacactgagctgcttcccgggtccgttgcaagcattctttaaacagaacaacgttcctcaggaaagccggttcaacttgaaaaagaatgtcgaggaggagtatagaaaatggaagtctatgtctaacgagaacgatattattactcatttctctatgcaggggtcccctccgctgttcctgtgtcttctgtggaagatgctgctggaaaccgaccacattaaccagatcggataccgggtcctcgagaggatcggcgccagagccctcgtggcccatgtacgaacctttgcagactttctggtatacgagttctctacctcagctggcgggcagcagctaaacaaatgtattgaaattctcaatgacatggtgtggaagtataacattgtgaccctagataggctgatcttgtgcctggctatgcgctcccatgagggcaatgaagcccaagtatgctatttcataatccaactgctactgctgaaaccaaacgattttcggaaccgagtcagcgacttcgttaaagagaattctcctgagcactggctgcaaaatgactggcataccaaacacatgaattatcataagaagtatccagaaaaattgtattttgagggcctggccgagcaagtggaccccccagtccagattcagagtccgtatttgcccatttattttggtaacgtgtgcctgagatttctgcccgtgtttgacatcgtgattcatcggttcttagaactgcttccagtgtcaaagagcctcgaaacgcttttagatcacctaggcggtctctataagttccatgatcggcccgtgacttatctatacaacacacttcattactacgaaatgcatctccgcgaccgcgcattcctgaagagaaaactggtacatgcaattattggaagcctgaaggataaccgacctcagggttggtgtctctcagacacctacctgaaatgcgccatgaatgcgcgagaagagaacccctgggtgcccgacgatacctactactgtcgtctgataggacgattagtggacactatggccggtaagagccccggtcctttcccaaattgcgattggagattcaatgagtttcctaatcctgctgcccacgccctgcacgttacttgtgtggagctgatggccctagctgttagcgggaaagaggtcgggaacgccctcctgaacgttgtgctgaagtctcagccactggtgccccgggagaacataactgcttggatgaacgctattggcctcatcattaccgcactcccagaaccatattggatcgtgctgcacgaccgtattgtgtctgtaataagctccccttccttgaccagcgagacagagtgggtcggatatccgtttagattatttgactttaccgcctgtcaccaatcatactctgagatgagttgttcctacacgctggccctggcacatgccgtgtggcaccacagctcgatcggacaactgagcctcattccaaagtttttaactgaggtgctcttaccaatcgtcaagacagaatttcagctgctttacgtgtatcatctggtggggccttttctccaacgattccaacaagagaggactagatgtatgattgagataggagttgcattctacgacatgttactgaacgtggaccagtgttctacccatctcaattacatggacccgatctgtgactttctgtaccacatgaaatacatgtttacaggggactctgtcaaagagcaagttgaaaagatcatatgcaacctcaaacctgccctgaaacttagactgcgcttcattactcacatttccaagatggagccagctgccgtgccaccccaggcaatgaactccggatcgcctgccccacaaagtaatcaggtgcccgtctcactgccagtaacacaatag

SEQ ID NO: 150058 - DNA, 4107 bp, Artificial Sequence
  derived and/or modified sequence
atggagacccagctgcagagcatctttgaggaggtggtgaagacagaggtgattgaggaggccttccctggcatgttcatggacaccccagaagatgagaagaccaagctgatcagctgcctgggcgccttccggcagttctggggcggcctgagccaggagagccatgagcagtgcatccagtggatcgtgaagttcatccacggccagcacagccccaagaggatctccttcctgtatgactgcctggccatggctgtggagaccggcctgctgcccccccggctggtgtgtgagagcctcatcaacagcgacaccctggagtgggagaggacccagctgtgggccctgaccttcaagctggtgaggaagatcatcggcggcgtggactacaagggcgtgcgggacctgctgaaggtgatcctggagaagatcctgaccatccccaacacagtgagcagcgctgtggtgcagcagctgctggccgcccgggaggtgattgcctacatcctggagagaaatgcctgcctgctgcctgcctactttgctgtgacagagatcaggaagctgtacccagagggcaagctgccccactggctgctgggcaacctggtgtctgactttgtggacaccttccggcccacagcccgcatcaacagcatctgtggccgctgcagcctgctgcctgtggtgaacaacagcggggccatctgcaacagctggaagctggaccctgccaccctgcgcttccccctgaagggcctgctgccctatgacaaggacctgtttgagccccagacagccctgctgcgctacgtgctggagcagccctacagccgggacatggtgtgcaacatgctgggcctgaacaagcagcacaagcagcgctgccctgtgctggaggaccagctggtggacctggtggtgtatgccatggagaggagtgaaacagaggagaagtttgatgatggcggcaccagccagctgctgtggcagcacctgagcagccagctgatcttctttgtgctcttccagtttgccagcttcccccacatggtgctgagcctgcaccagaagctggccggccggggcctcatcaagggccgggaccacctgatgtgggtgctgctgcagttcatcagcggcagcatccagaagaatgccctggccgacttcctgcctgtgatgaagctgtttgacctgctgtacccagagaaggagtacatccctgtgcctgacatcaacaagccccagagcacccacgcctttgccatgacctgcatctggatccacctgaacaggaaggcccagaatgacaacagcaagctgcagatccccatcccccacagcctgcggctgcaccacgagttcctgcagcagagcctgaggaacaagagcctgcagatgaatgactacaagatcgccctgctgtgcaatgcctacagcaccaacagcgagtgcttcaccctgcccatgggcgccctggtggagaccatctatggaaatggcatcatgaggatccccctgcccggcaccaactgcatggccagcggcagcatcacccccctgcccatgaacctgctggacagcctgactgtgcacgccaagatgagcctcatccacagcatcgccaccagggtcatcaagctggcccacgccaagagctctgtggccctggccccagccctggtggagacctacagccggctgctggtgtacatggagattgagagcctgggcatcaagggcttcatcagccagctgctgcccaccgtcttcaagagccacgcctggggcatcctgcacaccctgctggagatgttctcctacaggatgcaccacatccagccccactacagagtgcagctgctgagccacctgcacaccctggccgctgtggcccagaccaaccagaaccagctgcacctgtgtgtggagagcacagccctgcggctcatcacagccctgggcagcagcgaggtgcagccccagttcacccgcttcctgagtgaccccaagacagtgctgtctgctgagagcgaggagctgaacagagccctgatcctgaccctggcccgggccacccacgtgacagacttcttcaccggcagtgacagcatccagggcacctggtgcaaggacatcctgcagaccatcatgtccttcaccccccacaactgggccagccacaccctgagctgcttccctggccccctgcaggccttcttcaagcagaacaacgtgccccaggagagccgcttcaacctgaagaagaatgtggaggaggagtacaggaagtggaagtccatgagcaatgaaaatgacatcatcacccacttctccatgcagggcagccccccactcttcctgtgcctgctgtggaagatgctgctggagacagaccacatcaaccagatcggctacagagtgctggagcgcatcggggcccgggccctggtggcccacgtgaggacctttgctgacttcctggtgtatgagttcagcaccagcgctgggggccagcagctgaacaagtgcatcgagatcctgaatgacatggtgtggaagtacaacatcgtgaccctggacaggctcatcctgtgcctggccatgaggagccatgagggcaatgaggcccaggtgtgctacttcatcatccagctgctgctgctgaagcccaatgacttcaggaacagagtgtctgactttgtgaaggagaacagccctgagcactggctgcagaatgactggcacaccaagcacatgaactaccacaagaagtacccagagaagctgtactttgagggcctggccgagcaggtggacccccctgtgcagatccagagcccctacctgcccatctactttggaaatgtgtgcctgcgcttcctgcctgtgtttgatattgtcatccaccgcttcctggagctgctgcctgtgtccaagagcctggagaccctgctggaccacctgggcggcctgtacaagttccatgacaggcctgtgacctacctgtacaacaccctgcactactatgagatgcacctgcgggaccgggccttcctgaagaggaagctggtgcacgccatcatcggcagcctgaaggacaaccggccccagggctggtgcctgagtgacacctacctgaagtgtgccatgaatgcccgggaggagaacccctgggtgcctgatgacacctactactgccgcctcatcggccgcctggtggacaccatggccggcaagagccctggccccttccccaactgtgactggaggttcaatgagttccccaacccagctgcccacgccctgcacgtgacctgtgtggagctgatggccctggccgtgtctgggaaggaggtgggcaatgccctgctgaatgtggtgctgaagagccagcccctggtgccccgggagaacatcacagcctggatgaatgccatcggcctcatcatcacagccctgcctgagccctactggatcgtgctgcatgaccgcatcgtgtctgtcatcagcagccccagcctgaccagcgagacagagtgggtgggctaccccttccggctgtttgacttcaccgcctgccaccagagctacagcgagatgagctgcagctacaccctggccctggcccatgctgtgtggcaccacagcagcatcggccagctgagcctcatccccaagttcctgacagaggtgctgctgcccatcgtgaagacagagttccagctgctgtatgtgtaccacctggtgggccccttcctgcagcgcttccagcaggagaggacccgctgcatgattgaaattggagtggccttctatgacatgctgctgaatgtggaccagtgcagcacccacctgaactacatggaccccatctgtgacttcctgtaccacatgaagtacatgttcaccggggacagcgtgaaggagcaggtggagaagatcatctgcaacctgaagccagccctgaagctgcggctgcgcttcatcacccacatcagcaagatggagcctgctgctgtgcccccccaggccatgaacagcggcagccctgccccccagagcaaccaggtgcctgtgtccctgcctgtgacccagtag

SEQ ID NO: 150059 - DNA, 3030 bp, Artificial Sequence
  derived and/or modified sequence
atggagaggagtgaaacagaggagaagtttgatgatggcggcaccagccagctgctgtggcagcacctgagcagccagctgatcttctttgtgctcttccagtttgccagcttcccccacatggtgctgagcctgcaccagaagtacatccctgtgcctgacatcaacaagccccagagcacccacgcctttgccatgacctgcatctggatccacctgaacaggaaggcccagaatgacaacagcaagctgcagatccccatcccccacagcctgcggctgcaccacgagttcctgcagcagagcctgaggaacaagagcctgcagatgaatgactacaagatcgccctgctgtgcaatgcctacagcaccaacagcgagtgcttcaccctgcccatgggcgccctggtggagaccatctatggaaatggcatcatgaggatccccctgcccggcaccaactgcatggccagcggcagcatcacccccctgcccatgaacctgctggacagcctgactgtgcacgccaagatgagcctcatccacagcatcgccaccagggtcatcaagctggcccacgccaagagctctgtggccctggccccagccctggtggagacctacagccggctgctggtgtacatggagattgagagcctgggcatcaagggcttcatcagccagctgctgcccaccgtcttcaagagccacgcctggggcatcctgcacaccctgctggagatgttctcctacaggatgcaccacatccagccccactacagagtgcagctgctgagccacctgcacaccctggccgctgtggcccagaccaaccagaaccagctgcacctgtgtgtggagagcacagccctgcggctcatcacagccctgggcagcagcgaggtgcagccccagttcacccgcttcctgagtgaccccaagacagtgctgtctgctgagagcgaggagctgaacagagccctgatcctgaccctggcccgggccacccacgtgacagacttcttcaccggcagtgacagcatccagggcacctggtgcaaggacatcctgcagaccatcatgtccttcaccccccacaactgggccagccacaccctgagctgcttccctggccccctgcaggccttcttcaagcagaacaacgtgccccaggagagccgcttcaacctgaagaagaatgtggaggaggagtacaggaagtggaagtccatgagcaatgaaaatgacatcatcacccacttctccatgcagggcagccccccactcttcctgtgcctgctgtggaagatgctgctggagacagaccacatcaaccagatcggctacagagtgctggagagaattggagcccgggccctggtggcccacgtgaggacctttgctgacttcctggtgtatgagttcagcaccagcgctgggggccagcagctgaacaagtgcatcgagatcctgaatgacatggtgtggaagtacaacatcgtgaccctggacaggctcatcctgtgcctggccatgaggagccatgagggcaatgaggcccaggtgtgctacttcatcatccagctgctgctgctgaagcccaatgacttcaggaacagagtgtctgactttgtgaaggagaacagccctgagcactggctgcagaatgactggcacaccaagcacatgaactaccacaagaagtacccagagaagctgtactttgagggcctggccgagcaggtggacccccctgtgcagatccagagcccctacctgcccatctactttggaaatgtgtgcctgcgcttcctgcctgtgtttgacatcgtcatccaccgcttcctggagctgctgcctgtgtccaagagcctggagaccctgctggaccacctgggcggcctgtacaagttccatgacaggcctgtgacctacctgtacaacaccctgcactactatgagatgcacctgcgggaccgggccttcctgaagaggaagctggtgcacgccatcatcggcagcctgaaggacaaccggccccagggctggtgcctgagtgacacctacctgaagtgtgccatgaatgcccgggaggagaacccctgggtgcctgatgacacctactactgccgcctgattggccgcctggtggacaccatggccggcaagagccctggccccttccccaactgtgactggaggttcaatgagttccccaacccagctgcccacgccctgcacgtgacctgtgtggagctgatggccctggccgtgtctgggaaggaggtgggcaatgccctgctgaatgtggtgctgaagagccagcccctggtgccccgggagaacatcacagcctggatgaatgccatcggcctcatcatcacagccctgcctgagccctactggatcgtgctgcatgacagaattgtgtctgtcatcagcagccccagcctgaccagcgagacagagtgggtgggctaccccttccggctgtttgacttcaccgcctgccaccagagctacagcgagatgagctgcagctacaccctggccctggcccatgctgtgtggcaccacagcagcatcggccagctgagcctcatccccaagttcctgacagaggtgctgctgcccatcgtgaagacagagttccagctgctgtatgtgtaccacctggtgggccccttcctgcagcgcttccagcaggagaggacccgctgcatgattgaaattggagtggccttctatgacatgctgctgaatgtggaccagtgcagcacccacctgaactacatggaccccatctgtgacttcctgtaccacatgaagtacatgttcaccggggacagcgtgaaggagcaggtggagaagatcatctgcaacctgaagccagccctgaagctgcggctgcgcttcatcacccacatcagcaagatggagcctgctgctgtgcccccccaggccatgaacagcggcagccctgccccccagagcaaccaggtgcctgtgtccctgcctgtgacccagtag

SEQ ID NO: 150060 - DNA, 5233 bp, Artificial Sequence
  derived and/or modified sequence
gttcctgctgttggctgggctcgggagggaacgctccaggtaaagcgctgggggaggaagcgacgccgaggagctacggtttcctccagaggtctccgcccctctgcccctatattcccagagctcgagtctgatccgggccttgccgggcaccctggaaaggcgggggtgatagtacagatggagacgcaactgcagagcattttcgaagaggtggtgaaaacggaagttatagaagaggcttttcctggcatgtttatggatactcctgaagatgagaaaacaaaactaattagctgtttgggggccttcagacagttttggggtggtctttctcaggagtctcatgaacagtgtatccagtggattgttaagtttattcatggtcagcatagtcctaaaagaatttcttttctttatgactgcttagcaatggcagttgagactggtctccttccacccaggctggtttgtgaatccctgataaactctgacactcttgagtgggaaagaacacagctttgggccttaacatttaaactggttcggaaaataattgggggagtggattacaagggtgttcgagatctcttaaaagtgattttggagaagattttgacaattcctaatacagtgagctctgctgttgtacagcagcttctggcagcaagagaggttatagcatatatcttggaaagaaatgcctgcttattaccagcctattttgcagtcactgagatcaggaaactgtatcctgaaggcaaacttccacactggttacttggaaacctagtatcagactttgtggataccttcaggcccacagcaaggataaactccatttgtggtcgctgtagtcttctgccagttgtaaataattcgggtgccatttgtaattcatggaaactggatcctgctactcttcgttttcctttgaaaggccttttgccatatgataaggatctgtttgaaccacagactgctttgttgagatatgtattggagcagccttattccagggatatggtctgcaatatgctaggtttaaataagcagcacaagcagcgctgccctgtgctggaggaccagttggtggatctggttgtttatgccatggagcgatctgagaccgaggagaagtttgacgatgggggaacaagccaactcctgtggcagcatctctcaagtcagctcattttctttgtgcttttccagtttgcaagttttccacatatggtgctttctcttcatcagaagttagcagggcgaggactgattaaaggcagagatcatcttatgtgggttctcctgcaattcatttctggaagtattcagaaaaatgcactagctgattttctccctgtgatgaagctcttcgacttgctatacccagaaaaagaatatatcccagttcctgatattaacaaaccccagtcaacccatgcctttgcaatgacctgtatttggattcatctcaatagaaaagctcaaaatgacaactccaagctacagattccaatacctcattccctaagacttcaccatgagttcctgcagcagagtctaagaaataaaagtttacagatgaatgactataagattgctctattgtgtaatgcatactctacaaattcagaatgttttacattacccatgggagctctggtagaaactatttatggaaatggaattatgaggatacctctccctggaacaaactgtatggcttcaggatctattacccccttacctatgaacctcctggattcactgacagttcatgccaaaatgagccttattcacagcattgcaaccagggtgataaaacttgctcatgcaaagtccagtgtggccttggctccagccctagtggaaacttacagtcgtttattggtctatatggaaatagagtctttgggcatcaaaggatttatcagtcagcttttgccaactgttttcaaatcacatgcatgggggatcttacacacactccttgagatgtttagctaccggatgcatcatattcagcctcattacagagttcagctcctgagtcatcttcatactttggctgcagttgcacaaacaaaccagaaccagctccatctttgtgtcgagagcactgctctcaggcttataacagcattaggtagctcagaggtacaaccgcagtttacacgcttccttagtgatcccaaaacagtgctctcagcagaatctgaagaactgaaccgagccttgatattgaccttggctagagcaactcatgtaacagatttttttacaggctctgattcaattcagggaacttggtgtaaagacatacttcagaccatcatgagtttcactcctcataattgggcttcacacaccctgagctgttttccaggcccactacaggcattcttcaaacaaaataatgtgcctcaggaaagccgttttaatctgaaaaaaaatgtggaggaggagtataggaagtggaagtcaatgagcaacgaaaacgacattattacccacttctctatgcagggctcccctcctctctttctttgtcttctctggaaaatgctcttggaaacagatcatattaatcagattggctatagagtattagagagaattggagccagggccttggtagcccatgtgaggacatttgcagatttcctggtatatgagttttctacatcagcagggggtcagcaactcaataaatgcattgaaattcttaatgacatggtatggaagtataacattgttacactggacagattaattctctgcctggccatgcgtagtcacgaaggaaatgaagcccaggtttgttatttcataattcagttgctgttactcaaaccaaacgattttagaaatcgagtaagtgactttgtgaaggaaaattccccagagcactggttacagaatgactggcacaccaagcacatgaattatcacaagaaatatccagagaagttgtattttgagggcctcgcggaacaggtggatcctcctgtacagatccagtctccctatctgcccatctattttgggaatgtgtgtcttcgattccttccagtatttgatatagtaatccacagatttttagagttgcttccggtatccaaatcactggagactctactggatcatctaggaggcttatataaatttcatgatcgtccagtgacttatctgtataacactctgcactattatgaaatgcacctgagagaccgcgcatttctcaaacgaaaactcgtccatgcgatcattggctctctgaaggataatcgaccgcagggctggtgtctaagtgacacttacctgaaatgcgctatgaatgcacgagaggaaaatccttgggttccagatgacacctactattgcagattgattggcagactagtcgatacgatggctggcaaatctcctggtccctttccaaactgtgactggagattcaatgagtttcccaacccagctgcccatgctctccatgttacttgtgtggagctcatggccttggcagtttcaggcaaagaagttgggaatgcccttctaaatgttgtcctaaaaagtcagcctttagtgccaagagagaacattacagcatggatgaatgcaattggtttgatcatcactgccctaccagagccatattggattgttcttcatgatcgaattgtgagtgtcatcagcagccccagcttgacgtctgaaacagagtgggttggctatccattccgcctctttgatttcactgcctgtcatcagtcctactctgagatgagttgtagctatacgttagctcttgcacatgctgtgtggcaccattctagcatcggacaactttctctcattccaaagtttcttactgaagtacttcttcctatagtgaagaccgaattccagttgctttatgtataccatcttgttggaccatttttacaaagatttcagcaagagagaactcgttgtatgatagagattggtgtggcgttttatgacatgctgctgaatgttgaccagtgtagcacccatttaaattacatggatcccatctgtgacttcctctatcacatgaagtatatgtttactggtgacagcgtgaaagagcaagtagagaagattatctgtaacttaaaaccagctttaaaacttcgtcttcgattcatcacacacattagcaagatggagccagctgcagtgcctccacaagccatgaacagtgggtctccagcacctcagtctaatcaggtgcccgtgtctttaccagtaactcagtgaagccagactgtactgtggagaaagtagaaatatatccgtctttgagagtggactcaaaccttttaaatctgaatgcgatcacactgtagtgatatagtagaagcagtgatgatattcagattgttttattttgattcaaatgatgaatctgttgacaccttataactcccatctccctatctatatttttgtctctaagagatcaagtaagatacatgttgttcatattcataacaacttattagagctatgtaggaacatagaggtatctgtgatcaaatgacttgtcattggcactttcagtctttcctattctagccgttgtttttgtttgtattttttattattaatgacatatttagtcttcagatatattattttaaaggcaccacacatgtaaaacagttattacaaatattttatacataaatctcttggtagattttcagaataatagagatttatatcaagaaaaggaatctagattttgttgcattgtaggagcaaacaaggcttcatattctttttaaaatgacttgaaattttattataaatttccatagtttctatcaaggtcaactggcagttttattacctttgctatggacttgaacttactgtataaaattagttggaagccatgtaagaaaataacatctgaaaattcttgaacttaaaatcatgcttaaatggttgattctccaatttctttttttaaaaataagttaattgcttttgcaggttgacactctcacctgacagatgatgtaattcttcaatttttataatcttaaaatttttaaattttatatttgtaaatacagtacacattttatttcttggattttgagagacattgttaattttgggggaattggcattgcgaaagacttgaaaactaatgagtaaagtctgctgaatgaataaaccgtgtgattgtttcccg

SEQ ID NO: 150061 - DNA, 3290 bp, Artificial Sequence
  derived and/or modified sequence
tatgccatggagcgatctgagaccgaggagaagtttgacgatgggggaacaagccaactcctgtggcagcatctctcaagtcagctcattttctttgtgcttttccagtttgcaagttttccacatatggtgctttctcttcatcagaagtatatcccagttcctgatattaacaaaccccagtcaacccatgcctttgcaatgacctgtatttggattcatctcaatagaaaagctcaaaatgacaactccaagctacagattccaatacctcattccctaagacttcaccatgagttcctgcagcagagtctaagaaataaaagtttacagatgaatgactataagattgctctattgtgtaatgcatactctacaaattcagaatgttttacattacccatgggagctctggtagaaactatttatggaaatggaattatgaggatacctctccctggaacaaactgtatggcttcaggatctattacccccttacctatgaacctcctggattcactgacagttcatgccaaaatgagccttattcacagcattgcaaccagggtgataaaacttgctcatgcaaagtccagtgtggccttggctccagccctagtggaaacttacagtcgtttattggtctatatggaaatagagtctttgggcatcaaaggatttatcagtcagcttttgccaactgttttcaaatcacatgcatgggggatcttacacacactccttgagatgtttagctaccggatgcatcatattcagcctcattacagagttcagctcctgagtcatcttcatactttggctgcagttgcacaaacaaaccagaaccagctccatctttgtgtcgagagcactgctctcaggcttataacagcattaggtagctcagaggtacaaccgcagtttacacgcttccttagtgatcccaaaacagtgctctcagcagaatctgaagaactgaaccgagccttgatattgaccttggctagagcaactcatgtaacagatttttttacaggctctgattcaattcagggaacttggtgtaaagacatacttcagaccatcatgagtttcactcctcataattgggcttcacacaccctgagctgttttccaggcccactacaggcattcttcaaacaaaataatgtgcctcaggaaagccgttttaatctgaaaaaaaatgtggaggaggagtataggaagtggaagtcaatgagcaacgaaaacgacattattacccacttctctatgcagggctcccctcctctctttctttgtcttctctggaaaatgctcttggaaacagatcatattaatcagattggctatagagtattagagagaattggagccagggccttggtagcccatgtgaggacatttgcagatttcctggtatatgagttttctacatcagcagggggtcagcaactcaataaatgcattgaaattcttaatgacatggtatggaagtataacattgttacactggacagattaattctctgcctggccatgcgtagtcacgaaggaaatgaagcccaggtttgttatttcataattcagttgctgttactcaaaccaaacgattttagaaatcgagtaagtgactttgtgaaggaaaattccccagagcactggttacagaatgactggcacaccaagcacatgaattatcacaagaaatatccagagaagttgtattttgagggcctcgcggaacaggtggatcctcctgtacagatccagtctccctatctgcccatctattttgggaatgtgtgtcttcgattccttccagtatttgatatagtaatccacagatttttagagttgcttccggtatccaaatcactggagactctactggatcatctaggaggcttatataaatttcatgatcgtccagtgacttatctgtataacactctgcactattatgaaatgcacctgagagaccgcgcatttctcaaacgaaaactcgtccatgcgatcattggctctctgaaggataatcgaccgcagggctggtgtctaagtgacacttacctgaaatgcgctatgaatgcacgagaggaaaatccttgggttccagatgacacctactattgcagattgattggcagactagtcgatacgatggctggcaaatctcctggtccctttccaaactgtgactggagattcaatgagtttcccaacccagctgcccatgctctccatgttacttgtgtggagctcatggccttggcagtttcaggcaaagaagttgggaatgcccttctaaatgttgtcctaaaaagtcagcctttagtgccaagagagaacattacagcatggatgaatgcaattggtttgatcatcactgccctaccagagccatattggattgttcttcatgatcgaattgtgagtgtcatcagcagccccagcttgacgtctgaaacagagtgggttggctatccattccgcctctttgatttcactgcctgtcatcagtcctactctgagatgagttgtagctatacgttagctcttgcacatgctgtgtggcaccattctagcatcggacaactttctctcattccaaagtttcttactgaagtacttcttcctatagtgaagaccgaattccagttgctttatgtataccatcttgttggaccatttttacaaagatttcagcaagagagaactcgttgtatgatagagattggtgtggcgttttatgacatgctgctgaatgttgaccagtgtagcacccatttaaattacatggatcccatctgtgacttcctctatcacatgaagtatatgtttactggtgacagcgtgaaagagcaagtagagaagattatctgtaacttaaaaccagctttaaaacttcgtcttcgattcatcacacacattagcaagatggagccagctgcagtgcctccacaagccatgaacagtgggtctccagcacctcagtctaatcaggtgcccgtgtctttaccagtaactcagtgaagccagactgtactgtggagaaagtagaaatatatccgtctttgagagtggactcaaaccttttaaatctgaatgcgatcacactgtagtgatatagtagaagcagtgatgatattcagattgttttattttgattcaaatgatgaatctgttgacaccttataactcccatctccctatctatatttttgtctctaagagatcaagtaagatacatgttgttcatattcataacaacttattagagctatgta

SEQ ID NO: 150062 - DNA, 4107 bp, Artificial Sequence
  derived and/or modified sequence
atggagacccagctgcagagcatcttcgaggaggtggtgaagaccgaagtgatcgaggaggcttttccaggaatgttcatggatacgcctgaagacgaaaagactaaactgattagttgtctgggggctttccgccaattttggggtggactgtctcaggagtctcacgaacagtgtatccaatggattgttaaatttattcacggccagcattctccaaaaagaatatcattcctgtacgactgccttgcaatggccgtggaaactggcctactgccccccaggctggtctgcgagtccttgataaattccgataccctggagtgggagaggacacaactctgggcgctcacttttaaactggtccggaagatcatcggcggcgtagactataaaggggtgcgggaccttctgaaagtgatcttagaaaaaattctgacaatccctaacaccgtatcctctgcagtggtccagcaactgttggcggctagggaagtaattgcatatatactagagcgaaacgcctgcctactacctgcatattttgctgtgactgaaattcgcaagctgtaccccgagggaaagcttcctcattggctccttggcaacctagtgtctgactttgtggataccttcagaccaacggccaggattaactctatttgcggtaggtgctctctgctgcccgttgtgaataacagcggcgcaatatgtaattcctggaagctggatcccgcaacccttaggtttcctcttaaagggttgcttccatatgataaggacctatttgaaccacaaactgccttactgagatatgtccttgagcaaccatactccagggacatggtatgcaatatgcttggactaaataagcaacataaacagcggtgtccagtccttgaagatcaacttgtagatctcgtggtttacgcaatggagcgtagtgagactgaagagaaatttgacgatggtggaacaagccagctcctctggcagcatttgtccagccagctcatcttttttgtcctgttccaattcgcttccttcccccatatggtcttgagcctacatcaaaagctggccggtcggggcctaattaagggcagagatcatttgatgtgggtcctgctgcagtttatttccgggagtattcaaaagaacgctctggctgacttcttgcccgtgatgaagcttttcgacctcctctatcccgagaaggagtatatcccagttcccgacatcaacaagccccaatcgactcacgctttcgccatgacctgtatatggatccatcttaacagaaaagcgcagaatgataacagcaaactgcagatcccaattccgcacagcctgcgactgcaccatgagtttctccagcaatctttacgaaacaaatcactccagatgaatgactacaagatagccctcttgtgtaatgcgtacagcacaaactcggagtgcttcactttaccaatgggagctttggtggagaccatctacgggaatgggatcatgagaattcccctacccggtactaattgcatggctagcggatcaataactccactacccatgaacctactggactccttgacagttcacgcaaagatgagcctgatccattcaatcgcgactagagttatcaaacttgcacacgcgaagagctcagtcgcactagcacctgctctcgttgaaacctactccaggctcctggtctacatggagattgagagcctcgggatcaaagggttcattagccagctgctcccaacagtgttcaaaagccatgcctggggaatcctgcacactcttctcgaaatgttctcttacagaatgcaccacatacagcctcattacagagtccagctattgtcccatctgcacactctggcagccgtggcccagactaatcagaaccagctgcacctgtgcgtggaatccactgccctccgtctcatcactgccctgggcagcagcgaagtacaaccacagtttacacggttcctgtcagatccaaaaacagttctctcagcagagtcagaagagctgaatcgcgccctgatactaaccctggctcgggctacgcatgtgaccgacttttttacaggctcagattctatccagggtacctggtgtaaagatattttacagaccattatgagtttcaccccccacaactgggcctctcataccctgtcatgcttccccggtcctttacaggcatttttcaagcagaataacgtaccgcaggagtcccggtttaacctgaaaaagaacgtcgaggaagaataccggaaatggaagagtatgagtaatgagaatgatattattacccacttttctatgcagggctcacctcctttgtttttgtgtctactgtggaagatgcttttagagactgaccacattaaccaaatcggataccgagtgctggagcgcatcggcgcgagggcactcgtggctcacgtgcggacattcgctgattttctggtttacgagttttccacctcagccggtgggcagcagctcaacaaatgtatcgagatccttaacgacatggtatggaaatacaatatagtgacactcgacaggctgatcttatgcctggcaatgcggtcccatgaaggcaatgaggcacaagtctgctacttcataatacaactgttattactgaagccgaacgacttccggaaccgagtgtctgacttcgttaaagaaaactcccctgagcattggcttcagaacgattggcatactaagcatatgaattatcacaagaaataccctgagaaattatatttcgaagggttagctgaacaggttgatccccctgttcagattcagtcgccctacttaccaatctatttcggaaatgtgtgcttgagattccttccagtgttcgacatcgtcattcatcgctttctggagctactgccagtgagtaaatctctggaaacgttattggaccatctggggggactgtataagttccacgaccgcccagttacgtacttatacaatacccttcactattacgagatgcacctgagggaccgtgcatttcttaaacgtaagctcgtgcacgccattataggctcccttaaggacaatagacctcagggctggtgcctgtccgatacatacctgaagtgcgctatgaacgccagagaggagaacccatgggtcccagatgatacttactactgccgccttattggacggttggtcgacacaatggcgggcaaaagtccaggcccttttccaaactgcgactggcgctttaacgagtttcccaacccagcagctcatgccctacacgtcacgtgcgtggagttgatggctctagctgtttcggggaaggaagtcggtaacgccctccttaatgtggtattgaaatcacagccactggtgcctcgcgagaatatcacagcttggatgaatgcaatcggactcatcatcactgccctgcccgagccctattggatagttctgcatgacagaattgtctcagtaatttctagccccagtctcacatctgaaaccgaatgggtggggtacccttttcgtctatttgatttcaccgcctgtcaccagtcctactccgagatgagctgctcgtacacgttggccctggctcacgcggtctggcaccacagctccataggccagctatccttgattcccaagtttctgaccgaagtgctgctccccattgtaaaaacagagtttcagcttctctatgtgtatcacctggtggggccattcctccagcggtttcagcaggaaaggacgaggtgtatgatcgagatcggagttgccttctacgacatgctgcttaatgttgaccagtgctctacccacctcaattatatggatcctatatgcgacttcctgtaccacatgaagtacatgttcactggagacagtgtgaaagaacaagttgaaaagatcatttgtaacctcaagcccgctctgaagcttaggctgcgttttattacccacatcagcaaaatggaaccagccgcagtgcctcctcaggccatgaacagtggttcacccgccccccagagcaaccaggtcccagtgtccctccccgtaacgcagtag

SEQ ID NO: 150063 - DNA, 3030 bp, Artificial Sequence
  derived and/or modified sequence
atggagcggagcgagaccgaggagaagttcgacgacggcggcaccagccagctgctctggcaacacctctcatcccagttgatcttttttgtcttgttccagtttgcatcttttccacacatggtcctctccctgcatcagaaatatatccctgtgccagacattaacaaaccacagagcacacacgctttcgccatgacctgtatctggatacacttgaacagaaaagctcagaatgacaatagtaaactgcagatacccatcccccactccctgcggctgcatcacgagtttctccagcagtctttgaggaataagtctttgcagatgaatgactataaaatcgctctgctgtgtaatgcctacagcaccaactccgaatgttttaccttgcctatgggcgccctcgtggaaactatctatggaaacgggattatgcgcatcccactgccaggaacaaattgcatggcgagtggtagtatcacgcctctgcctatgaacctcctggattcactgacggtgcacgctaagatgagtctgatccacagcatcgctacccgggtgatcaagctcgctcatgccaaaagctcggtggcattggctcctgcactagtggaaacctatagccggctcttagtgtacatggaaatcgagtcactgggtatcaagggctttatctctcagcttctccccactgtgttcaagtctcacgcgtggggaatcctgcacactctcctcgaaatgttcagctatcgcatgcaccacatccagccccattacagggtccagcttctatcacacctgcatacccttgcagctgttgcccaaacgaatcaaaaccagctccacctttgtgtggaaagcaccgcactgcgcctgatcaccgccttaggatctagcgaagtgcaaccccagtttactagatttctttctgatccaaagaccgtactcagtgctgaaagcgaggaactcaaccgcgctctgatcttgacccttgccagggccacccatgtgacagatttcttcacagggtcagacagtatacaggggacctggtgtaaagacattctgcagacgatcatgagtttcactccccacaattgggcctctcacacactgtcttgtttcccaggccccctccaggctttcttcaaacagaacaacgttcctcaagaatctaggttcaatcttaaaaagaatgtggaggaggagtatcgcaaatggaaaagcatgagcaatgaaaatgatatcattacccacttcagcatgcagggtagtcctcccttgtttttgtgcctcctgtggaaaatgttgctcgagaccgatcatatcaaccagattggatatagggtgctcgaacgcatcggagcccgggctcttgtggcacacgtgcgcacctttgccgacttcctggtctatgaattttctacgtccgccggcgggcagcaactcaataagtgtattgaaatcctgaacgacatggtatggaaatataacatagtcaccttggaccggctcatcctgtgtctggcaatgcggtcccatgaaggcaacgaagcacaggtctgttatttcattattcagttgcttctgcttaagccaaatgattttaggaatcgggtaagtgactttgtgaaggagaatagccctgagcactggctacagaatgactggcacaccaaacacatgaattatcataaaaaatacccagagaagttgtactttgaagggctggccgagcaggtcgatccaccagtgcagattcagagcccatatctgccaatctactttggcaatgtgtgtctgaggttcctgcccgtgttcgatatcgtcattcacagatttctggaattgctccctgtcagcaagtccctcgagactctattggaccatctgggtgggctctataagttccatgataggcctgtgacctatctgtacaatactctccattactacgaaatgcatcttcgggatcgggcctttctgaagaggaaattggtgcatgccatcattggttccctcaaagataatagaccccagggatggtgcctgagcgacacctacttgaaatgtgccatgaatgcacgcgaggagaatccctgggtgcctgatgacacttactactgtcgtctgatcggaagattggtcgacacgatggccggcaaaagccctggaccctttcctaattgtgattggcggttcaacgagtttccgaatcccgcagcacacgccctgcacgtgacctgcgtcgagctaatggcattggccgtgagcggaaaggaagtgggtaatgccctacttaacgtcgttctgaaatctcagccactggtgcctagggaaaatattaccgcctggatgaacgcaatagggctgatcattactgcattacccgaaccttactggatagtgttacacgacagaatcgtttcagttattagtagtccctccctgacttctgagaccgagtgggttgggtacccttttcgcctgttcgatttcacggcctgccaccaaagctatagcgagatgagctgttcatacaccttggccctggcacacgctgtctggcaccacagttccatcgggcagttgagcctgattcccaaattcctgacagaagtgctactacccattgtaaagacagagttccagcttctgtatgtatatcatttagtggggccttttctgcagaggttccaacaagagcgcacaagatgtatgatcgagattggtgtggctttttacgacatgctgctgaacgtcgaccagtgcagcacacatctaaattatatggaccccatttgcgacttcctttatcacatgaagtacatgttcacaggggattccgtgaaggaacaggtggagaaaattatctgtaatctgaaacccgcactcaagctgcgacttcgctttatcacgcatatcagcaaaatggaacctgccgccgtaccccctcaagccatgaactctggctcccctgccccccagagcaatcaggtccccgtctctttaccagtgactcaatag

SEQ ID NO: 150064 - DNA, 4107 bp, Artificial Sequence
  derived and/or modified sequence
atggagacccagctccagagcattttcgaggaagtggtgaagacagaggtgattgaggaagcattcccaggaatgtttatggacaccccagaagatgaaaaaaccaaattaatttcatgccttggggcttttcgccagttctggggtggcttgtctcaggagtctcacgagcaatgcatccagtggatcgtgaagttcatccatggccagcactcgccgaagaggatcagcttcctatatgattgtctagctatggcggttgagacgggtctgctgcctcctaggctggtctgtgagtctctgatcaattctgatacactggagtgggaaaggacacaactttgggcactcaccttcaaactggtgcggaaaattatcgggggagtagattataagggcgtgcgggacctcctgaaagttatcttagagaaaattcttactatccccaatactgtctcttcggctgtcgtgcagcagctgctggccgctcgagaggtgatcgcatacattctggagagaaatgcatgcctgctgccagcctacttcgcggtgacagagatccggaagctctatcccgaggggaaactcccgcactggttattaggcaatttggtcagcgattttgtggatacattccgccctacagctcgcattaactccatttgcgggaggtgctcactattacctgtcgtgaataactcaggcgcaatatgcaactcttggaagctggatccggctaccttaagatttcccctgaaagggctgctgccctatgacaaggacctgttcgagccgcagaccgcgctgctacgatacgtcttagaacaaccgtacagtagggacatggtgtgtaacatgctgggcctgaataagcagcataagcagcgctgtccggtgttagaggaccaacttgtggatctggtagtgtacgccatggagcgctctgaaactgaagagaagttcgatgacggaggaacatctcagcttctatggcagcacttatccagtcagctgatcttcttcgtgctcttccagttcgcatccttcccgcatatggttctgagtctgcaccagaagctagcaggccgaggattaattaaggggagagatcatctgatgtgggtgttgctgcaattcatttcaggcagtatccagaagaacgcactggcagatttcctccccgtcatgaaactattcgacttactgtacccggagaaggagtacatccccgttcctgatattaacaaaccccaatccacccacgcattcgctatgacctgcatctggatccacctcaatagaaaggcgcagaatgacaattcgaaactgcagatcccgatcccccacagtctccgtctgcaccacgagtttctccaacagtcattgaggaataaatcactgcagatgaatgattacaaaatcgccctactctgcaacgcttatagtaccaattctgaatgttttaccctgccaatgggagcattagttgagacgatttatggtaacggaattatgcgcatccccctgccaggcacaaactgtatggccagcggcagcattacgcccttgccaatgaatttacttgatagtttaaccgtgcatgctaagatgtctttgatacatagcattgccaccagggtaatcaagctcgcccacgctaaatcatccgttgcactggccccagcgctggttgagacctatagccgtcttctcgtttacatggaaattgaatccctgggtatcaaaggcttcatatcccagctgttacccacagtctttaagtctcatgcttggggcattcttcatactctgcttgaaatgttcagctatcgtatgcaccatattcagcctcattatagggttcagctgttgtcacatctgcacactctcgctgcggtggctcagactaaccagaatcagttgcacctttgtgtagaaagtacagctctgcggctgattaccgccctgggtagctcagaggtgcagccccagttcaccagattcctgtctgaccctaagacagtactgtccgccgagagtgaagaactgaaccgcgctcttattctgaccctggcacgggctacccatgtaaccgacttcttcacaggatctgactccatccaaggtacatggtgtaaggacattcttcaaacaattatgagcttcaccccccataattgggctagtcatacgctgtcctgtttccctgggccactgcaagccttttttaaacagaataacgttccccaagaaagccgctttaacctgaagaaaaacgtagaagaggagtaccggaaatggaagagtatgagcaatgaaaacgacatcattacgcatttttccatgcagggatctcccccactgtttctgtgccttctgtggaaaatgctgctggagacggatcacattaaccagataggctatcgggtcctggaacgcataggggcaagagcgttggtagctcacgtgagaacctttgccgattttctggtgtatgagttttctacaagtgctggtggccagcagctgaacaagtgcattgaaatactgaacgatatggtgtggaagtacaatattgtgacgttggaccggcttatcctgtgtctcgccatgcgcagtcacgagggcaacgaagcccaggtgtgttattttatcatacagttgctactcctgaagcccaacgacttccggaatagagtgtccgactttgtgaaagaaaattccccagagcattggttgcagaacgactggcataccaaacacatgaattatcataagaaatatccggagaaactgtacttcgaaggactggccgagcaggtcgacccacctgtgcagatccagagcccttatcttcctatttatttcggaaacgtgtgcttgaggttcctgcccgtattcgatatagtcattcatagattcctagaactcctgccagtgagtaagagcctggagacattgctcgaccacctgggtggcctgtataagtttcatgataggcccgtgacatacttgtacaacaccctgcattactatgagatgcacctgcgggacagagccttccttaaacggaagctagtgcacgctattatcggctccctgaaggacaatcgtcctcagggctggtgcctctcagatacgtacctgaagtgcgcaatgaacgccagggaggagaacccatgggtgcccgacgacacttattactgtcgtctcatcggcagactggtcgacaccatggcaggtaaaagcccaggcccatttcctaactgcgactggagatttaatgagttccccaaccccgctgcacacgcacttcatgtaacttgcgtggaactgatggccctggccgtctctgggaaagaggtgggcaatgcactacttaatgttgttttgaaatcgcagcctcttgtccctagagaaaacattaccgcatggatgaatgcgataggcttgattatcaccgcgctgcccgagccctattggattgttctccacgatagaatcgtaagtgttattagctctccatctcttacatccgagactgagtgggtcggctatcccttccgactgtttgatttcacagcctgccatcagagctactccgagatgtcttgctcctacaccctggctcttgcacacgcagtgtggcaccacagtagtattggtcagctgtccttaattcccaagtttctcaccgaagtcctcctgccaatcgtgaaaactgaatttcagctgttgtacgtttatcacctggtgggacctttcctgcaacggttccagcaagagaggacccgatgtatgattgagattggagtggcattctacgacatgttactcaatgtcgatcagtgttccactcaccttaattacatggacccgatatgtgacttcctctatcacatgaaatacatgttcacgggggactctgttaaggaacaggttgagaagattatttgtaacctgaaaccagcacttaaactccgtctgcggtttattacccatatatctaaaatggaacccgcagccgtccccccacaggccatgaactctggttcacccgcaccacaatctaaccaagtgccagtctctctgccagtcacccaatag

SEQ ID NO: 150065 - DNA, 3030 bp, Artificial Sequence
  derived and/or modified sequence
atggagcgcagcgaaacagaagagaagttcgatgatggtggaacctctcagttactgtggcagcacctgtcctctcaactgattttcttcgtgctattccagtttgcctcattcccacacatggtgctgtccctacatcagaaatacattcccgtccccgatattaataagccccagtccacccatgcatttgccatgacttgcatctggatccatcttaatcgtaaggcccagaacgacaattctaaattgcaaatcccaattccccatagtctaagactccatcacgagtttttgcagcaatctctccggaacaagagtctgcagatgaatgactacaaaattgccctgctgtgcaatgcatattctacaaatagcgagtgtttcacgctacctatgggggctctggtggaaaccatatacggcaacgggattatgaggatccctctcccaggcacaaactgcatggcaagcgggagcattactcccctgccaatgaatctcttggatagtctgaccgtgcatgccaaaatgtccctgatacattctatcgctacccgcgtaatcaaactggcgcacgccaaaagttctgttgcgctcgccccagctttggtcgagacttactcccgactacttgtatacatggaaatcgaaagcctgggaatcaaggggtttatttcccagttgcttccaaccgtgttcaaatctcacgcgtggggcatccttcacactctgctcgagatgttctcctatcggatgcaccatatccagccacactaccgagtgcaattattgtctcacctgcataccttagccgctgttgctcagaccaatcaaaatcagttgcatttgtgcgtggagtctacagctcttaggctgattaccgcccttggatctagcgaggtacaaccacagtttaccaggttcctgagcgatcccaagaccgtcctcagcgctgagtctgaggagctcaaccgcgcactcattttgacactggccagagcgacccacgtgacagatttcttcaccggctctgatagcattcagggaacctggtgtaaggatattctccagactattatgagctttacaccgcacaattgggcctcccacacacttagctgctttccaggcccactccaggctttctttaaacagaacaatgtgccgcaggagagcaggttcaacctcaagaaaaacgtggaagaggagtatcgaaagtggaaatccatgtccaacgagaacgacatcataacccatttctccatgcagggctctcctcctttgtttctgtgccttctttggaagatgctactcgagacagatcatatcaaccaaattggatacagggttctggagaggattggcgcacgagccttggtggcccatgtgaggacatttgccgactttctcgtgtatgaattttctactagtgctggcggtcagcaacttaataaatgtattgagattctgaacgacatggtgtggaagtacaacatcgtcacactcgacagactcatcctctgccttgccatgaggtcacacgaggggaatgaggcacaagtgtgttatttcattatccaactgctgcttttgaagccaaatgacttcaggaatcgcgtaagtgattttgtgaaagaaaattcccccgaacactggcttcaaaatgactggcacacgaaacacatgaattaccataaaaaatatcctgaaaaactttattttgagggcctcgccgagcaagtggaccccccagtgcagatccagtcgccctacctccctatttacttcggcaacgtgtgcctgaggttcctccccgtctttgacatcgtcatccatcgctttttagagctcttgcctgtgtctaagagtctcgaaactttgctggaccacctaggaggcctgtacaaattccatgacagaccagtgacctatctatacaacacattacactactacgagatgcacctccgcgaccgcgctttcctgaagagaaagctcgtacacgcaatcatcggatctctgaaggacaataggccccaaggatggtgcttgtctgacacttaccttaagtgtgctatgaacgcaagggaagaaaacccttgggttccagatgatacgtactactgtaggctgattggccgtctggtcgacacaatggccggaaaaagcccaggaccttttccaaattgcgactggagatttaatgaattccctaatccggcagcacatgcgctgcacgtgacatgtgttgagctgatggccctcgccgtgtctgggaaggaagtcgggaacgctctgctgaatgtggttctcaagtcacagcccctcgtgcctcgcgaaaacatcacagcttggatgaatgccatagggcttatcatcactgccctgccagaaccttactggattgtactgcacgataggatcgtctctgtaatctctagcccttcccttacttcagagactgagtgggttggatacccctttaggttgtttgattttaccgcgtgccaccaatcctattccgaaatgtcatgttcctatacactggcactggcccatgctgtatggcaccatagctcgattggccaactctccctgattcctaaatttctcacggaagttcttctgcccatcgtgaagaccgagttccagctcctttatgtgtaccacctggtgggcccatttctgcagcgattccagcaggagcggacccgctgcatgatcgaaatcggagtggctttctacgacatgctgctaaacgtcgaccaatgttccacccacctaaactacatggatccgatctgtgacttcctctatcatatgaagtacatgttcaccggggacagtgttaaagaacaggtcgagaaaattatctgtaatctgaaaccagcccttaagctgcggttgcgatttatcacccacatcagcaagatggagccggctgcagtgccgcctcaggcaatgaattcaggaagccccgctcctcaaagcaatcaagtacccgtgtccctgccagtgacccagtag

SEQ ID NO: 150066 - DNA, 4107 bp, Artificial Sequence
  derived and/or modified sequence
atggagacccagctgcagagcatcttcgaggaggtggtgaagaccgaggtgatcgaggaggccttccccggcatgttcatggacacccccgaggacgagaagaccaagctgatcagctgcctgggcgccttcagacagttctggggcggcctgagccaggagagccacgagcagtgcatccagtggatcgtgaagttcatccacggccagcacagccccaagagaatcagcttcctgtacgactgcctggccatggccgtggagaccggcctgctgccccccagactggtgtgcgagagcctgatcaacagcgacaccctggagtgggagagaacccagctgtgggccctgaccttcaagctggtgagaaagatcatcggcggcgtggactacaagggcgtgagagacctgctgaaggtgatcctggagaagatcctgaccatccccaacaccgtgagcagcgccgtggtgcagcagctgctggccgccagagaggtgatcgcctacatcctggagagaaacgcctgcctgctgcccgcctacttcgccgtgaccgagatcagaaagctgtaccccgagggcaagctgccccactggctgctgggcaacctggtgagcgacttcgtggacaccttcagacccaccgccagaatcaacagcatctgcggcagatgcagcctgctgcccgtggtgaacaacagcggcgccatctgcaacagctggaagctggaccccgccaccctgagattccccctgaagggcctgctgccctacgacaaggacctgttcgagccccagaccgccctgctgagatacgtgctggagcagccctacagcagagacatggtgtgcaacatgctgggcctgaacaagcagcacaagcagagatgccccgtgctggaggaccagctggtggacctggtggtgtacgccatggagagaagcgagaccgaggagaagttcgacgacggcggcaccagccagctgctgtggcagcacctgagcagccagctgatcttcttcgtgctgttccagttcgccagcttcccccacatggtgctgagcctgcaccagaagctggccggcagaggcctgatcaagggcagagaccacctgatgtgggtgctgctgcagttcatcagcggcagcatccagaagaacgccctggccgacttcctgcccgtgatgaagctgttcgacctgctgtaccccgagaaggagtacatccccgtgcccgacatcaacaagccccagagcacccacgccttcgccatgacctgcatctggatccacctgaacagaaaggcccagaacgacaacagcaagctgcagatccccatcccccacagcctgagactgcaccacgagttcctgcagcagagcctgagaaacaagagcctgcagatgaacgactacaagatcgccctgctgtgcaacgcctacagcaccaacagcgagtgcttcaccctgcccatgggcgccctggtggagaccatctacggcaacggcatcatgagaatccccctgcccggcaccaactgcatggccagcggcagcatcacccccctgcccatgaacctgctggacagcctgaccgtgcacgccaagatgagcctgatccacagcatcgccaccagagtgatcaagctggcccacgccaagagcagcgtggccctggcccccgccctggtggagacctacagcagactgctggtgtacatggagatcgagagcctgggcatcaagggcttcatcagccagctgctgcccaccgtgttcaagagccacgcctggggcatcctgcacaccctgctggagatgttcagctacagaatgcaccacatccagccccactacagagtgcagctgctgagccacctgcacaccctggccgccgtggcccagaccaaccagaaccagctgcacctgtgcgtggagagcaccgccctgagactgatcaccgccctgggcagcagcgaggtgcagccccagttcaccagattcctgagcgaccccaagaccgtgctgagcgccgagagcgaggagctgaacagagccctgatcctgaccctggccagagccacccacgtgaccgacttcttcaccggcagcgacagcatccagggcacctggtgcaaggacatcctgcagaccatcatgagcttcaccccccacaactgggccagccacaccctgagctgcttccccggccccctgcaggccttcttcaagcagaacaacgtgccccaggagagcagattcaacctgaagaagaacgtggaggaggagtacagaaagtggaagagcatgagcaacgagaacgacatcatcacccacttcagcatgcagggcagcccccccctgttcctgtgcctgctgtggaagatgctgctggagaccgaccacatcaaccagatcggctacagagtgctggagagaatcggcgccagagccctggtggcccacgtgagaaccttcgccgacttcctggtgtacgagttcagcaccagcgccggcggccagcagctgaacaagtgcatcgagatcctgaacgacatggtgtggaagtacaacatcgtgaccctggacagactgatcctgtgcctggccatgagaagccacgagggcaacgaggcccaggtgtgctacttcatcatccagctgctgctgctgaagcccaacgacttcagaaacagagtgagcgacttcgtgaaggagaacagccccgagcactggctgcagaacgactggcacaccaagcacatgaactaccacaagaagtaccccgagaagctgtacttcgagggcctggccgagcaggtggacccccccgtgcagatccagagcccctacctgcccatctacttcggcaacgtgtgcctgagattcctgcccgtgttcgacatcgtgatccacagattcctggagctgctgcccgtgagcaagagcctggagaccctgctggaccacctgggcggcctgtacaagttccacgacagacccgtgacctacctgtacaacaccctgcactactacgagatgcacctgagagacagagccttcctgaagagaaagctggtgcacgccatcatcggcagcctgaaggacaacagaccccagggctggtgcctgagcgacacctacctgaagtgcgccatgaacgccagagaggagaacccctgggtgcccgacgacacctactactgcagactgatcggcagactggtggacaccatggccggcaagagccccggccccttccccaactgcgactggagattcaacgagttccccaaccccgccgcccacgccctgcacgtgacctgcgtggagctgatggccctggccgtgagcggcaaggaggtgggcaacgccctgctgaacgtggtgctgaagagccagcccctggtgcccagagagaacatcaccgcctggatgaacgccatcggcctgatcatcaccgccctgcccgagccctactggatcgtgctgcacgacagaatcgtgagcgtgatcagcagccccagcctgaccagcgagaccgagtgggtgggctaccccttcagactgttcgacttcaccgcctgccaccagagctacagcgagatgagctgcagctacaccctggccctggcccacgccgtgtggcaccacagcagcatcggccagctgagcctgatccccaagttcctgaccgaggtgctgctgcccatcgtgaagaccgagttccagctgctgtacgtgtaccacctggtgggccccttcctgcagagattccagcaggagagaaccagatgcatgatcgagatcggcgtggccttctacgacatgctgctgaacgtggaccagtgcagcacccacctgaactacatggaccccatctgcgacttcctgtaccacatgaagtacatgttcaccggcgacagcgtgaaggagcaggtggagaagatcatctgcaacctgaagcccgccctgaagctgagactgagattcatcacccacatcagcaagatggagcccgccgccgtgcccccccaggccatgaacagcggcagccccgccccccagagcaaccaggtgcccgtgagcctgcccgtgacccagtag

SEQ ID NO: 150067 - DNA, 3030 bp, Artificial Sequence
  derived and/or modified sequence
atggagagaagcgagaccgaggagaagttcgacgacggcggcaccagccagctgctgtggcagcacctgagcagccagctgatcttcttcgtgctgttccagttcgccagcttcccccacatggtgctgagcctgcaccagaagtacatccccgtgcccgacatcaacaagccccagagcacccacgccttcgccatgacctgcatctggatccacctgaacagaaaggcccagaacgacaacagcaagctgcagatccccatcccccacagcctgagactgcaccacgagttcctgcagcagagcctgagaaacaagagcctgcagatgaacgactacaagatcgccctgctgtgcaacgcctacagcaccaacagcgagtgcttcaccctgcccatgggcgccctggtggagaccatctacggcaacggcatcatgagaatccccctgcccggcaccaactgcatggccagcggcagcatcacccccctgcccatgaacctgctggacagcctgaccgtgcacgccaagatgagcctgatccacagcatcgccaccagagtgatcaagctggcccacgccaagagcagcgtggccctggcccccgccctggtggagacctacagcagactgctggtgtacatggagatcgagagcctgggcatcaagggcttcatcagccagctgctgcccaccgtgttcaagagccacgcctggggcatcctgcacaccctgctggagatgttcagctacagaatgcaccacatccagccccactacagagtgcagctgctgagccacctgcacaccctggccgccgtggcccagaccaaccagaaccagctgcacctgtgcgtggagagcaccgccctgagactgatcaccgccctgggcagcagcgaggtgcagccccagttcaccagattcctgagcgaccccaagaccgtgctgagcgccgagagcgaggagctgaacagagccctgatcctgaccctggccagagccacccacgtgaccgacttcttcaccggcagcgacagcatccagggcacctggtgcaaggacatcctgcagaccatcatgagcttcaccccccacaactgggccagccacaccctgagctgcttccccggccccctgcaggccttcttcaagcagaacaacgtgccccaggagagcagattcaacctgaagaagaacgtggaggaggagtacagaaagtggaagagcatgagcaacgagaacgacatcatcacccacttcagcatgcagggcagcccccccctgttcctgtgcctgctgtggaagatgctgctggagaccgaccacatcaaccagatcggctacagagtgctggagagaatcggcgccagagccctggtggcccacgtgagaaccttcgccgacttcctggtgtacgagttcagcaccagcgccggcggccagcagctgaacaagtgcatcgagatcctgaacgacatggtgtggaagtacaacatcgtgaccctggacagactgatcctgtgcctggccatgagaagccacgagggcaacgaggcccaggtgtgctacttcatcatccagctgctgctgctgaagcccaacgacttcagaaacagagtgagcgacttcgtgaaggagaacagccccgagcactggctgcagaacgactggcacaccaagcacatgaactaccacaagaagtaccccgagaagctgtacttcgagggcctggccgagcaggtggacccccccgtgcagatccagagcccctacctgcccatctacttcggcaacgtgtgcctgagattcctgcccgtgttcgacatcgtgatccacagattcctggagctgctgcccgtgagcaagagcctggagaccctgctggaccacctgggcggcctgtacaagttccacgacagacccgtgacctacctgtacaacaccctgcactactacgagatgcacctgagagacagagccttcctgaagagaaagctggtgcacgccatcatcggcagcctgaaggacaacagaccccagggctggtgcctgagcgacacctacctgaagtgcgccatgaacgccagagaggagaacccctgggtgcccgacgacacctactactgcagactgatcggcagactggtggacaccatggccggcaagagccccggccccttccccaactgcgactggagattcaacgagttccccaaccccgccgcccacgccctgcacgtgacctgcgtggagctgatggccctggccgtgagcggcaaggaggtgggcaacgccctgctgaacgtggtgctgaagagccagcccctggtgcccagagagaacatcaccgcctggatgaacgccatcggcctgatcatcaccgccctgcccgagccctactggatcgtgctgcacgacagaatcgtgagcgtgatcagcagccccagcctgaccagcgagaccgagtgggtgggctaccccttcagactgttcgacttcaccgcctgccaccagagctacagcgagatgagctgcagctacaccctggccctggcccacgccgtgtggcaccacagcagcatcggccagctgagcctgatccccaagttcctgaccgaggtgctgctgcccatcgtgaagaccgagttccagctgctgtacgtgtaccacctggtgggccccttcctgcagagattccagcaggagagaaccagatgcatgatcgagatcggcgtggccttctacgacatgctgctgaacgtggaccagtgcagcacccacctgaactacatggaccccatctgcgacttcctgtaccacatgaagtacatgttcaccggcgacagcgtgaaggagcaggtggagaagatcatctgcaacctgaagcccgccctgaagctgagactgagattcatcacccacatcagcaagatggagcccgccgccgtgcccccccaggccatgaacagcggcagccccgccccccagagcaaccaggtgcccgtgagcctgcccgtgacccagtag

SEQ ID NO: 150068 - protein, 241 aa, Artificial Sequence
  derived and/or modified sequence
MSGESARSLGKGSAPPGPVPEGSIRIYSMRFCPFAERTRLVLKAKGIRHEVININLKNKPEWFFKKNPFGLVPVLENSQGQLIYESAITCEYLDEAYPGKKLLPDDPYEKACQKMILELFSKVPSLVGSFIRSQNKEDYAGLKEEFRKEFTKLEEVLTNKKTTFFGGNSISMIDYLIWPWFERLEAMKLNECVDHTPKLKLWMAAMKEDPTVSALLTSEKDWQGFLELYLQNSPEACDYGL

SEQ ID NO: 150069 - protein, 200 aa, Artificial Sequence
  derived and/or modified sequence
MRFCPFAERTRLVLKAKGIRHEVININLKNKPEWFFKKNPFGLVPVLENSQGQLIYESAITCEYLDEAYPGKKLLPDDPYEKACQKMILELFSKVPSLVGSFIRSQNKEDYAGLKEEFRKEFTKLEEVLTNKKTTFFGGNSISMIDYLIWPWFERLEAMKLNECVDHTPKLKLWMAAMKEDPTVSALLTSEKDWQGFLEL

SEQ ID NO: 150070 - protein, 213 aa, Artificial Sequence
  derived and/or modified sequence
MRFCPFAERTRLVLKAKGIRHEVININLKNKPEWFFKKNPFGLVPVLENSQGQLIYESAITCEYLDEAYPGKKLLPDDPYEKACQKMILELFSKVPSLVGSFIRSQNKEDYAGLKEEFRKEFTKLEEVLTNKKTTFFGGNSISMIDYLIWPWFERLEAMKLNECVDHTPKLKLWMAAMKEDPTVSALLTSEKDWQGFLELYLQNSPEACDYGL

SEQ ID NO: 150071 - DNA, 726 bp, Artificial Sequence
  derived and/or modified sequence
atgtcaggggagtccgccagaagcctcggcaaggggtcagctccgcctggacccgtgccggagggaagtattcggatatacagtatgagattctgtcccttcgcggaacgaactcggctggtgctcaaggcgaaggggatacggcacgaagtaatcaatatcaacctgaagaacaagcccgaatggttttttaagaaaaacccttttggcctggtgcctgtcctggagaactctcagggccagctaatatacgagagcgcgatcacctgtgagtaccttgacgaagcctaccccgggaaaaagctgctccctgacgacccgtacgaaaaggcatgtcagaagatgatcctggaactgttctcaaaggtaccatctttggtggggtcattcattaggtctcagaacaaagaagactatgctggcttgaaggaggagttccgcaaagagttcactaaacttgaagaggtgctaacaaataagaagactacattttttggaggtaatagtatctccatgatcgactatctcatttggccctggtttgagcggttagaggccatgaagttaaacgaatgtgttgaccacacccccaagcttaaattgtggatggcagccatgaaagaagacccaaccgtgagcgcattgcttaccagcgagaaggattggcaaggcttcctcgaactgtacctccaaaactctcctgaggcctgcgattacggactgtag

SEQ ID NO: 150072 - DNA, 972 bp, Artificial Sequence
  derived and/or modified sequence
acagccccttaagatgttttaagggctatcccataaagccgggaaggcacaacgggtggagctggcggccgccgggggcaggcacttttgagctaaggaggaagcgggggagggaaggagggcgggaaggacgcgccacctacttcctgaatcccctgcaaaccccagaggagctcggcctgcgctgcgccacgatgtccggggagtcagccaggagcttggggaagggaagcgcgcccccggggccggtcccggagggctcgatccgcatctacagcatgaggttctgcccgtttgctgagaggacgcgtctagtcctgaaggccaagggaatcaggcatgaagtcatcaatatcaacctgaaaaataagcctgagtggttctttaagaaaaatccctttggtctggtgccagttctggaaaacagtcagggtcagctgatctacgagtctgccatcacctgtgagtacctggatgaagcatacccagggaagaagctgttgccggatgacccctatgagaaagcttgccagaagatgatcttagagttgttttctaaggtgccatccttggtaggaagctttattagaagccaaaataaagaagactatgctggcctaaaagaagaatttcgtaaagaatttaccaagctagaggaggttctgactaataagaagacgaccttctttggtggcaattctatctctatgattgattacctcatctggccctggtttgaacggctggaagcaatgaagttaaatgagtgtgtagaccacactccaaaactgaaactgtggatggcagccatgaaggaagatcccacagtctcagccctgcttactagtgagaaagactggcaaggtttcctagagctctacttacagaacagccctgaggcctgtgactatgggctctgaagggggcaggagtcagcaataaagctatgtctgatattttccttcactaata

SEQ ID NO: 150073 - DNA, 829 bp, Artificial Sequence
  derived and/or modified sequence
gggggtgatctcggcgacccccggcggcatgttcgaggctgctccgggagcccagccgcccgggagcgccccaccggcggggaacgggtcggagctgcagtgggacgcgggggcggtgggatacggggggtctcgacacctctctgggccgtaatcgccttcgcttctccccggcaggaagcgcgcccccggggccggtcccggagggctcgatccgcatctacagcatgaggttctgcccgtttgctgagaggacgcgtctagtcctgaaggccaagggaatcaggcatgaagtcatcaatatcaacctgaaaaataagcctgagtggttctttaagaaaaatccctttggtctggtgccagttctggaaaacagtcagggtcagctgatctacgagtctgccatcacctgtgagtacctggatgaagcatacccagggaagaagctgttgccggatgacccctatgagaaagcttgccagaagatgatcttagagttgttttctaaggtgccatccttggtaggaagctttattagaagccaaaataaagaagactatgctggcctaaaagaagaatttcgtaaagaatttaccaagctagaggaggttctgactaataagaagacgaccttctttggtggcaattctatctctatgattgattacctcatctggccctggtttgaacggctggaagcaatgaagttaaatgagtgtgtagaccacactccaaaactgaaactgtggatggcagccatgaaggaagatcccacagtctcagccctgcttactagtgagaaagactggcaaggtttcctagagctcta

SEQ ID NO: 150074 - DNA, 1052 bp, Artificial Sequence
  derived and/or modified sequence
aaggatgactcctagacctgtctttgtcccatacttgggaagataagctgttagtttacattgccaagatgaaattcaactgatctgttttagagtaaagatcttgcgggccaacaaggaatttccttggggaggtgtgtggcctttgatctttgtagctatttagcaacaaaatgggaggcagtgttgcctgactcagtttccaagcttgactcttccctttggcatagtgagtttggagtcaagagatttttattttcccttcacaagctgaacaggagcctttggagagaacgctctggaccggaagcgcgcccccggggccggtcccggagggctcgatccgcatctacagcatgaggttctgcccgtttgctgagaggacgcgtctagtcctgaaggccaagggaatcaggcatgaagtcatcaatatcaacctgaaaaataagcctgagtggttctttaagaaaaatccctttggtctggtgccagttctggaaaacagtcagggtcagctgatctacgagtctgccatcacctgtgagtacctggatgaagcatacccagggaagaagctgttgccggatgacccctatgagaaagcttgccagaagatgatcttagagttgttttctaaggtgccatccttggtaggaagctttattagaagccaaaataaagaagactatgctggcctaaaagaagaatttcgtaaagaatttaccaagctagaggaggttctgactaataagaagacgaccttctttggtggcaattctatctctatgattgattacctcatctggccctggtttgaacggctggaagcaatgaagttaaatgagtgtgtagaccacactccaaaactgaaactgtggatggcagccatgaaggaagatcccacagtctcagccctgcttactagtgagaaagactggcaaggtttcctagagctctacttacagaacagccctgaggcctgtgactatgggctctgaagggggcaggagtcagcaataaagctatgtctgatattttccttcactaatatg

SEQ ID NO: 150075 - DNA, 726 bp, Artificial Sequence
  derived and/or modified sequence
atgtctggagagagcgcccggagcctgggcaaaggaagtgcccctcctggccctgtgcctgagggcagcatccgcatctacagcatgaggttctgcccctttgctgagaggacccggctggtgctgaaggccaagggcatcagacatgaagtcatcaacatcaacctgaagaacaagccagagtggttcttcaagaagaaccccttcggcctggtgcctgtgctggagaacagccagggccagctgatctatgagagcgccatcacctgtgagtacctggatgaggcctacccaggcaagaagctgctgcctgatgacccctatgagaaggcctgccagaagatgatcctggagctgttcagcaaggtgcccagcctggtgggcagcttcatccgcagccagaacaaggaggactatgccggcctgaaggaggagttcaggaaggagttcaccaagctggaggaggtgctgaccaacaagaagaccaccttctttggaggcaacagcatctccatgattgactacctgatctggccctggtttgagcggctggaggccatgaagctgaatgaatgtgtggaccacacccccaagctgaagctgtggatggccgccatgaaggaggaccccaccgtgtctgccctgctgaccagcgagaaggactggcagggcttcctggagctgtacctgcagaacagccctgaggcctgtgactatggcctgtag

SEQ ID NO: 150076 - DNA, 726 bp, Artificial Sequence
  derived and/or modified sequence
atgagcggcgagagcgcccggagcctgggcaagggcagcgcccccccgggacccgtccccgaggggtccatccggatctatagtatgcgcttctgcccctttgcagaacgcacacgacttgtgctgaaagcaaaaggaattcgtcatgaggtgattaacattaatctgaaaaataagcctgagtggtttttcaagaagaatccattcgggctcgtgccggtcctggagaattctcagggacagctcatctacgaatccgccataacatgcgaatatctggatgaagcctatccaggcaagaagcttcttcccgatgatccatacgaaaaagcatgccaaaagatgatcctggagctcttttcgaaggtcccctcccttgtcggaagtttcatccgaagtcagaataaagaggactatgccggccttaaagaggagtttcggaaggaattcacaaagctggaagaagtacttaccaataaaaagactaccttttttggcgggaacagcataagcatgatcgactacttaatttggccctggttcgagcgcttagaagctatgaagctgaatgaatgtgtggatcataccccaaaactgaagctgtggatggccgctatgaaggaggatccaactgttagcgccctgctgacatcagagaaagattggcaaggattcctggagctgtacctgcagaatagcccagaagcctgtgactatggactgtag

SEQ ID NO: 150077 - DNA, 726 bp, Artificial Sequence
  derived and/or modified sequence
atgagcggagagtctgctcgctcactcggaaaaggatccgccccaccaggccctgttcccgagggctccattagaatctactcaatgcgtttctgtccgtttgccgaacgaacaaggctggtgctgaaagcaaagggcatccggcacgaggtgattaatatcaacctgaagaacaaaccagagtggttctttaagaaaaacccattcgggcttgtgccagtattggagaactcacagggacaactgatctacgagagtgccatcacctgtgaatacctcgacgaggcatatccaggtaaaaagctcctgcccgacgacccttatgaaaaagcctgtcaaaagatgatcttggagctctttagcaaggtgccctcattagtggggtccttcatacgctcacagaacaaagaggactacgctggactcaaagaagagtttcggaaggaatttaccaagctggaagaggtgcttaccaacaaaaaaacaacattttttggagggaactctatcagcatgatcgattacttgatctggccctggttcgaaaggctcgaggccatgaagttgaacgaatgtgtcgatcatactcccaaattgaagctttggatggccgctatgaaggaggatccgactgtgagcgctttactcacttcagaaaaggattggcagggcttcttggaattgtatttgcaaaactcccccgaggcctgtgattatgggttgtag

SEQ ID NO: 150078 - DNA, 726 bp, Artificial Sequence
  derived and/or modified sequence
atgagcggcgagagcgccagaagcctgggcaagggcagcgccccccccggccccgtgcccgagggcagcatcagaatctacagcatgagattctgccccttcgccgagagaaccagactggtgctgaaggccaagggcatcagacacgaggtgatcaacatcaacctgaagaacaagcccgagtggttcttcaagaagaaccccttcggcctggtgcccgtgctggagaacagccagggccagctgatctacgagagcgccatcacctgcgagtacctggacgaggcctaccccggcaagaagctgctgcccgacgacccctacgagaaggcctgccagaagatgatcctggagctgttcagcaaggtgcccagcctggtgggcagcttcatcagaagccagaacaaggaggactacgccggcctgaaggaggagttcagaaaggagttcaccaagctggaggaggtgctgaccaacaagaagaccaccttcttcggcggcaacagcatcagcatgatcgactacctgatctggccctggttcgagagactggaggccatgaagctgaacgagtgcgtggaccacacccccaagctgaagctgtggatggccgccatgaaggaggaccccaccgtgagcgccctgctgaccagcgagaaggactggcagggcttcctggagctgtacctgcagaacagccccgaggcctgcgactacggcctgtag

SEQ ID NO: 150079 - protein, 167 aa, Artificial Sequence
  derived and/or modified sequence
MVAQQESIREGFQKRCLPVMVLKAKKPFTFETQEGKQEMFHATVATEKEFFFVKVFNTLLKDKFIPKRIIIIARYYRHSGFLEVNSASRVLDAESDQKVNVPLNIIRKAGETPKINTLQTQPLGTIVNGLFVVQKVTEKKKNILFDLSDNTGKMEVLGVRNEDTMKC

SEQ ID NO: 150080 - protein, 343 aa, Artificial Sequence
  derived and/or modified sequence
MESKYKEILLLTGLDNITDEELDRFKFFLSDEFNIATGKLHTANRIQVATLMIQNAGAVSAVMKTIRIFQKLNYMLLAKRLQEEKEKVDKQYKSVTKPKPLSQAEMSPAASAAIRNDVAKQRAAPKVSPHVKPEQKQMVAQQESIREGFQKRCLPVMVLKAKKPFTFETQEGKQEMFHATVATEKEFFFVKVFNTLLKDKFIPKRIIIIARYYRHSGFLEVNSASRVLDAESDQKVNVPLNIIRKAGETPKINTLQTQPLGTIVNGLFVVQKVTEKKKNILFDLSDNTGKMEVLGVRNEDTMKCKEGDKVRLTFFTLSKNGEKLQLTSGVHSTIKVIKAKKKT

SEQ ID NO: 150081 - protein, 136 aa, Artificial Sequence
  derived and/or modified sequence
MESKYKEILLLTGLDNITDEELDRFKFFLSDEFNIATGKLHTANRIQVATLMIQNAGAVSAVMKTIRIFQKLNYMLLAKRLQEEKEKVDKQYKSVTKPKPLSQAEMSPAASAAIRNDVAKQRAAPKVSPHVKPEQK

SEQ ID NO: 150082 - DNA, 1032 bp, Artificial Sequence
  derived and/or modified sequence
atggaatcaaaatataaggagattctccttctgaccggacttgataatattacagatgaggagttggacaggttcaaattttttctctccgatgagttcaatatcgcaactgggaagcttcatacagccaatcgtatccaggttgccactctgatgatacagaatgcaggtgccgtttctgcagtgatgaagactatacgcatcttccagaaacttaactacatgctgctggcaaaacgcttacaggaggagaaggaaaaagtcgacaaacagtacaaatcggtgaccaaacctaagccgctttcccaagcagagatgagccccgcggcctctgctgccattcggaatgatgtggccaaacaaagagctgcccctaaagttagtccccacgtaaagcccgagcagaagcagatggtcgcgcaacaagaaagcattcgggagggcttccagaagcgttgccttccagtgatggtcctcaaagctaaaaaacctttcacctttgagactcaagagggcaagcaagagatgttccacgccaccgtggccactgagaaggagttcttctttgtcaaggtgtttaacacattgctcaaagataagttcatccctaaaaggatcattatcatcgcacgctactacagacatagcgggttcctcgaggtgaacagcgcgagccgcgtgttggatgccgagtcagatcagaaggtaaatgtgcccctcaacattattcgaaaggcaggagaaacgcctaaaatcaatactttgcagacccagccactagggacgattgtcaacggccttttcgtcgtgcagaaagtcactgaaaaaaaaaagaatattctgttcgatctttcggataacactggaaaaatggaggtgttgggtgtgcggaacgaggatactatgaaatgtaaggagggcgacaaagtgcgtctgacctttttcaccctgagcaaaaatggggagaagttgcagttgacctctggcgtccactcaacgattaaagttattaaggccaagaaaaaaacttag

SEQ ID NO: 150083 - DNA, 411 bp, Artificial Sequence
  derived and/or modified sequence
atggagagtaaatataaagagattctgctgctcaccgggttggataatattaccgacgaggagctcgatcggtttaaatttttcctgtccgacgaattcaacatagccactggaaagctccatacagctaaccggatccaggtggcgacccttatgatccaaaacgcaggtgccgtcagtgcagtgatgaagaccattcggatcttccaaaaactcaattacatgctgttggctaagcggctgcaggaagagaaggagaaagtggacaaacagtataaatctgtgacaaagccaaagccattgagccaggctgagatgtccccagcggcaagtgctgcaataagaaacgacgtcgccaagcagcgtgctgcgccaaaggtgtctccccacgtaaaaccggagcagaaatag

SEQ ID NO: 150084 - DNA, 1032 bp, Artificial Sequence
  derived and/or modified sequence
atggagagcaagtacaaggagatcctgctgctgaccggcctggacaacatcacagatgaggagctggaccgcttcaagttcttcctgagtgatgagttcaacatcgccaccgggaagctgcacacagccaaccgcatccaggtggccaccctgatgatccagaatgctggagctgtgtctgctgtgatgaagaccatccgcatcttccagaagctgaactacatgctgctggccaagaggctgcaggaggagaaggagaaggtggacaagcagtacaagtctgtgaccaagcccaagcccctgagccaggccgagatgagccctgctgccagcgctgccatcagaaatgatgtggccaagcagagagctgcccccaaggtgagcccccacgtgaagccagagcagaagcagatggtggcccagcaggagagcatccgggagggcttccagaagcgctgcctgcctgtgatggtgctgaaggccaagaagcccttcacctttgagacccaggagggcaagcaggagatgttccacgccaccgtggccacagagaaggagttcttctttgtgaaggtgttcaacaccctgctgaaggacaagttcatccccaagaggatcatcatcatcgcccgctactaccgccacagcggcttcctggaggtgaacagcgccagccgggtgctggatgctgagagtgaccagaaggtgaatgtgcccctgaacatcatcaggaaggccggggagacccccaagatcaacaccctgcagacccagcccctgggcaccatcgtgaatggcctgtttgtggtgcagaaggtgacagagaagaagaagaacatcctgtttgacctgagtgacaacacaggcaagatggaggtgctgggcgtgagaaatgaagacaccatgaagtgcaaggagggggacaaggtgcggctgaccttcttcaccctgagcaagaatggagagaagctgcagctgaccagcggcgtgcacagcaccatcaaggtgatcaaggccaagaagaagacctag

SEQ ID NO: 150085 - DNA, 411 bp, Artificial Sequence
  derived and/or modified sequence
atggagagcaagtacaaggagatcctgctgctgaccggcctggacaacatcacagatgaggagctggaccgcttcaagttcttcctgagtgatgagttcaacatcgccaccgggaagctgcacacagccaaccgcatccaggtggccaccctgatgatccagaatgctggagctgtgtctgctgtgatgaagaccatccgcatcttccagaagctgaactacatgctgctggccaagaggctgcaggaggagaaggagaaggtggacaagcagtacaagtctgtgaccaagcccaagcccctgagccaggccgagatgagccctgctgccagcgctgccatcagaaatgatgtggccaagcagagagctgcccccaaggtgagcccccacgtgaagccagagcagaagtag

SEQ ID NO: 150086 - DNA, 1032 bp, Artificial Sequence
  derived and/or modified sequence
atggagagcaagtacaaggagatcctgctgctgaccggcctggacaatattaccgatgaggagctggatcggtttaagttttttctgtccgatgagtttaacattgcaacgggcaagctgcacaccgccaataggatccaggttgcgactttgatgatccagaacgccggagccgtgtctgcagtcatgaaaacgatacggattttccagaagttgaactacatgctgctggctaaaagacttcaggaggagaaagagaaagtggataagcagtacaagtcagttacaaaaccaaagcccttgagtcaggcggagatgtcacccgcagcctcagcagccattaggaacgatgtcgcgaagcagcgcgccgctccgaaggtgagcccacatgtgaaacctgagcagaaacaaatggtggctcaacaggaatccatccgggaaggattccagaagcgttgcctgcctgtgatggtgctgaaagccaaaaagccgtttacattcgagactcaagagggtaagcaggaaatgtttcatgctacagtcgctacagagaaagagttcttttttgtgaaagtgttcaatactctgttgaaggacaaattcattcccaagcgtattatcatcatcgcacggtactatcgacattccggttttctcgaagtgaactctgcaagtagagtgctggacgccgagtccgaccagaaggtaaacgtgccgcttaacatcatccggaaggcaggggaaacccctaaaataaatactctgcagacacaaccgctcggcaccatcgttaacggccttttcgtcgtgcagaaggtgactgagaagaagaagaatattctctttgacctgtcggataacacagggaagatggaagtccttggtgtgagaaatgaggacactatgaagtgcaaggaaggggataaagttagactcactttcttcacactctctaagaacggcgagaaacttcaattgacaagtggggtccatagtaccattaaagtcattaaggcaaagaagaagacctag

SEQ ID NO: 150087 - DNA, 411 bp, Artificial Sequence
  derived and/or modified sequence
atggagagcaagtacaaggagatcctgctgctgaccggcctggacaatataacagatgaggaacttgatcgtttcaagtttttcctatcagacgaattcaatatcgcgaccggcaaactgcacactgccaacaggatacaggtggctacattaatgatccagaacgcaggagcagtcagtgccgtgatgaagacaatccgcatctttcagaaacttaattacatgcttctggcgaaaaggttacaagaggagaaagagaaagtggataagcagtacaagtctgtgaccaaacctaagcccctgagccaagctgagatgtctccagcggctagcgccgccatcaggaacgacgttgcaaagcagagagccgcgcctaaagtcagtcctcacgtcaagccagagcagaaatag

SEQ ID NO: 150088 - DNA, 1032 bp, Artificial Sequence
  derived and/or modified sequence
atggaatccaaatataaagaaattttactgttgaccggactcgacaatatcactgacgaggagctcgatagatttaaattcttcctgtccgatgagtttaacatagccacaggtaaactgcacacggccaatcggatccaggtcgctaccctgatgatccagaacgccggagccgtgtctgctgtgatgaagacaattcggatattccaaaaacttaattacatgctcctggctaagaggctccaagaggaaaaagagaaagtagacaagcagtacaaatcagtgactaaaccaaagccattgagccaggccgagatgagccctgcagcgagtgcggcaatcagaaatgacgtggccaaacagcgggctgcgcctaaggtgagtcctcacgtaaaaccggaacaaaagcaaatggtggcccagcaagagagcatccgcgaaggatttcagaagcgatgcctgcctgttatggtgctgaaggctaaaaagccgttcacctttgagacacaggaggggaagcaagagatgtttcacgcaactgtggcaaccgagaaagagttcttcttcgtaaaggtgtttaacaccctgttgaaggacaagtttattcccaaacgcattataattatcgctagatattacaggcacagcggattcctcgaggtgaacagcgcttcccgcgtacttgacgcagagagcgatcaaaaggtcaacgtgcctttgaatatcatccgaaaggcaggcgaaacgcctaagataaataccctgcaaacacagcccctggggactatcgtgaatggcctgtttgttgtgcagaaagtgaccgagaagaagaagaatatcctgtttgacctctccgacaacaccggcaaaatggaggtgctaggcgttcgtaacgaggacaccatgaaatgtaaggagggtgacaaggttagactcacgttctttacgttaagtaagaacggtgaaaagctgcagctgacatcaggtgtgcattccactatcaaggtgattaaagccaagaagaaaacctag

SEQ ID NO: 150089 - DNA, 411 bp, Artificial Sequence
  derived and/or modified sequence
atggagagcaagtacaaagaaattctgctgttgacaggtctggacaacatcaccgatgaagagctggataggttcaaattctttctgagcgacgaattcaacatagctactggcaagctacatactgcaaatcggatacaggtggcaaccctgatgatccagaatgccggtgcagtttctgcggtcatgaagaccattcgaatatttcagaagttgaactatatgctcctggccaagcgcctgcaagaggaaaaggagaaggtggataagcagtacaagtcagtaactaagcccaagcctctctctcaagccgaaatgtccccagccgcatccgctgctattcgaaacgatgtagccaagcagagggctgcaccaaaagtttccccccatgtgaaacccgagcagaagtag

SEQ ID NO: 150090 - DNA, 1529 bp, Artificial Sequence
  derived and/or modified sequence
atagacattttcttctgtggctgctagtgagaacccaaaccagctcagccaattagagctccagttgtcactcctacccacactgggcctgggggtgaagggaagtgtttattaggggtacatgtgaagccgtccagaagtgtcagagtctttgtagctttgaaagtcacctaggttatttgggcatgctctcctgagtcctctgctagttaagctctctgaaaagaaggtggcagacccggtttgctgatcgccccagggatcaggaggctgatcccaaagttgtcagatggagagtaaatacaaggagatactcttgctaacaggcctggataacatcactgatgaggaactggataggtttaagttctttctttcagacgagtttaatattgccacaggcaaactacatactgcaaacagaatacaagtagctaccttgatgattcaaaatgctggggcggtgtctgcagtgatgaagaccattcgtatttttcagaagttgaattatatgcttttggcaaaacgtcttcaggaggagaaggagaaagttgataagcaatacaaatcggtaacaaaaccaaagccactaagtcaagctgaaatgagtcctgctgcatctgcagccatcagaaatgatgtcgcaaagcaacgtgctgcaccaaaagtctctcctcatgttaagcctgaacagaaacagatggtggcccagcaggaatctatcagagaagggtttcagaagcgctgtttgccagttatggtactgaaagcaaagaagcccttcacgtttgagacccaagaaggcaagcaggagatgtttcatgctacagtggctacagaaaaggaattcttctttgtaaaagtttttaatacactgctgaaagataaattcattccaaagagaataattataatagcaagatattatcggcacagtggtttcttagaggtaaatagcgcctcacgtgtgttagatgctgaatctgaccaaaaggttaatgtcccgctgaacattatcagaaaagctggtgaaaccccgaagatcaacacgcttcaaactcagccccttggaacaattgtgaatggtttgtttgtagtccagaaggtaacagaaaagaagaaaaacatattatttgacctaagtgacaacactgggaaaatggaagtactgggggttagaaacgaggacacaatgaaatgtaaggaaggagataaggttcgacttacattcttcacactgtcaaaaaatggagaaaaactacagctgacatctggagttcatagcaccataaaggttattaaggccaaaaaaaaaacatagagaagtaaaaaggaccaattcaagccaactggtctaagcagcatttaattgaagaatatgtgatacagcctcttcaatcagattgtaagttacctgaaagctgcagttcacaggctcctctctccaccaaattaggatagaataattgctggataaacaaattcagaatatcaacagatgatcacaataaacatctgtttctcattca

SEQ ID NO: 150091 - DNA, 832 bp, Artificial Sequence
  derived and/or modified sequence
aatataggtgtgttgtagagtcaggcagaacccagaacgtctggagatgaatgtagggaagaaggaaggaccagcaagttcttccaggctggagtacgatggcgcaatctccgctcactgcaatctccactgactacaacctccgcctcccgggttcaagtgattatcctgcctcagcctcctgagtagctgggattacagatacttaactatcaggaaacatttacagatgaagaaagaagaacatctgaacacagactgagcttactggatattgatgccagtggcaatattggcaaacaaatcttgaagatagatggccagagaaatgatggaaactgtgtctgagtcactgcttggaagagagccaccaaaccaggagcacttacatccgactggaatgctgatcccaaagttgtcagatggagagtaaatacaaggagatactcttgctaacaggcctggataacatcactgatgaggaactggataggtttaagttctttctttcagacgagtttaatattgccacaggcaaactacatactgcaaacagaatacaagtagctaccttgatgattcaaaatgctggggcggtgtctgcagtgatgaagaccattcgtatttttcagaagttgaattatatgcttttggcaaaacgtcttcaggaggagaaggagaaagttgataagcaatacaaatcggtaacaaaaccaaagccactaagtcaagctgaaatgagtcctgctgcatctgcagccatcagaaatgatgtcgcaaagcaacgtgctgcaccaaaagtctctcctcatgttaagcctgaacagaaaca

SEQ ID NO: 150092 - DNA, 1032 bp, Artificial Sequence
  derived and/or modified sequence
atggagagcaagtacaaggagatcctgctgctgaccggcctggacaacatcaccgacgaggagctggacagattcaagttcttcctgagcgacgagttcaacatcgccaccggcaagctgcacaccgccaacagaatccaggtggccaccctgatgatccagaacgccggcgccgtgagcgccgtgatgaagaccatcagaatcttccagaagctgaactacatgctgctggccaagagactgcaggaggagaaggagaaggtggacaagcagtacaagagcgtgaccaagcccaagcccctgagccaggccgagatgagccccgccgccagcgccgccatcagaaacgacgtggccaagcagagagccgcccccaaggtgagcccccacgtgaagcccgagcagaagcagatggtggcccagcaggagagcatcagagagggcttccagaagagatgcctgcccgtgatggtgctgaaggccaagaagcccttcaccttcgagacccaggagggcaagcaggagatgttccacgccaccgtggccaccgagaaggagttcttcttcgtgaaggtgttcaacaccctgctgaaggacaagttcatccccaagagaatcatcatcatcgccagatactacagacacagcggcttcctggaggtgaacagcgccagcagagtgctggacgccgagagcgaccagaaggtgaacgtgcccctgaacatcatcagaaaggccggcgagacccccaagatcaacaccctgcagacccagcccctgggcaccatcgtgaacggcctgttcgtggtgcagaaggtgaccgagaagaagaagaacatcctgttcgacctgagcgacaacaccggcaagatggaggtgctgggcgtgagaaacgaggacaccatgaagtgcaaggagggcgacaaggtgagactgaccttcttcaccctgagcaagaacggcgagaagctgcagctgaccagcggcgtgcacagcaccatcaaggtgatcaaggccaagaagaagacctag

SEQ ID NO: 150093 - DNA, 411 bp, Artificial Sequence
  derived and/or modified sequence
atggagagcaagtacaaggagatcctgctgctgaccggcctggacaacatcaccgacgaggagctggacagattcaagttcttcctgagcgacgagttcaacatcgccaccggcaagctgcacaccgccaacagaatccaggtggccaccctgatgatccagaacgccggcgccgtgagcgccgtgatgaagaccatcagaatcttccagaagctgaactacatgctgctggccaagagactgcaggaggagaaggagaaggtggacaagcagtacaagagcgtgaccaagcccaagcccctgagccaggccgagatgagccccgccgccagcgccgccatcagaaacgacgtggccaagcagagagccgcccccaaggtgagcccccacgtgaagcccgagcagaagtag

SEQ ID NO: 150094 - protein, 1166 aa, Artificial Sequence [sequence omitted]

SEQ ID NO: 150095 - DNA, 3501 bp, Artificial Sequence
  derived and/or modified sequence
atggccaacgacagccccgccaagagcctggtggacatcgacctgagcagcctgagagaccccgccggcatcttcgagctggtggaggtggtgggcaacggcacctacggccaggtgtacaagggcagacacgtgaagaccggccagctggccgccatcaaggtgatggacgtgaccgaggacgaggaggaggagatcaagctggagatcaacatgctgaagaagtacagccaccacagaaacatcgccacctactacggcgccttcatcaagaagagcccccccggccacgacgaccagctgtggctggtgatggagttctgcggcgccggcagcatcaccgacctggtgaagaacaccaagggcaacaccctgaaggaggactggatcgcctacatcagcagagagatcctgagaggcctggcccacctgcacatccaccacgtgatccacagagacatcaagggccagaacgtgctgctgaccgagaacgccgaggtgaagctggtggacttcggcgtgagcgcccagctggacagaaccgtgggcagaagaaacaccttcatcggcaccccctactggatggcccccgaggtgatcgcctgcgacgagaaccccgacgccacctacgactacagaagcgacctgtggagctgcggcatcaccgccatcgagatggccgagggcgccccccccctgtgcgacatgcaccccatgagagccctgttcctgatccccagaaaccccccccccagactgaagagcaagaagtggagcaagaagttcttcagcttcatcgagggctgcctggtgaagaactacatgcagagacccagcaccgagcagctgctgaagcaccccttcatcagagaccagcccaacgagagacaggtgagaatccagctgaaggaccacatcgacagaaccagaaagaagagaggcgagaaggacgagaccgagtacgagtacagcggcagcgaggaggaggaggaggaggtgcccgagcaggagggcgagcccagcagcatcgtgaacgtgcccggcgagagcaccctgagaagagacttcctgagactgcagcaggagaacaaggagagaagcgaggccctgagaagacagcagctgctgcaggagcagcagctgagagagcaggaggagtacaagagacagctgctggccgagagacagaagagaatcgagcagcagaaggagcagagaagaagactggaggagcagcagagaagagagagagaggccagaagacagcaggagagagagcagagaagaagagagcaggaggagaagagaagactggaggagctggagagaagaagaaaggaggaggaggagagaagaagagccgaggaggagaagagaagagtggagagagagcaggagtacatcagaagacagctggaggaggagcagagacacctggaggtgctgcagcagcagctgctgcaggagcaggccatgctgctgcacgaccacagaagaccccacccccagcacagccagcagcccccccccccccagcaggagagaagcaagcccagcttccacgcccccgagcccaaggcccactacgagcccgccgacagagccagagaggtgcccgtgagaaccaccagcagaagccccgtgctgagcagaagagacagccccctgcagggcagcggccagcagaacagccaggccggccagagaaacagcaccagcagcatcgagcccagactgctgtgggagagagtggagaagctggtgcccagacccggcagcggcagcagcagcggcagcagcaacagcggcagccagcccggcagccaccccggcagccagagcggcagcggcgagagattcagagtgagaagcagcagcaagagcgagggcagccccagccagagactggagaacgccgtgaagaagcccgaggacaagaaggaggtgttcagacccctgaagcccgccgtgagaatcgacctgaccgccctggccaaggagctgagagccgtggaggacgtgagacccccccacaaggtgaccgactacagcagcagcagcgaggagagcggcaccaccgacgaggaggacgacgacgtggagcaggagggcgccgacgagagcaccagcggccccgaggacaccagagccgccagcagcctgaacctgagcaacggcgagaccgagagcgtgaagaccatgatcgtgcacgacgacgtggagagcgagcccgccatgacccccagcaaggagggcaccctgatcgtgagacagacccagagcgccagcagcaccctgcagaagcacaagagcagcagcagcttcacccccttcatcgaccccagactgctgcagatcagccccagcagcggcaccaccgtgaccagcgtggtgggcttcagctgcgacggcatgagacccgaggccatcagacaggaccccaccagaaagggcagcgtggtgaacgtgaaccccaccaacaccagaccccagagcgacacccccgagatcagaaagtacaagaagagattcaacagcgagatcctgtgcgccgccctgtggggcgtgaacctgctggtgggcaccgagagcggcctgatgctgctggacagaagcggccagggcaaggtgtaccccctgatcaacagaagaagattccagcagatggacgtgctggagggcctgaacgtgctggtgaccatcagcggcaagaaggacaagctgagagtgtactacctgagctggctgagaaacaagatcctgcacaacgaccccgaggtggagaagaagcagggctggaccaccgtgggcgacctggagggctgcgtgcactacaaggtggtgaagtacgagagaatcaagttcctggtgatcgccctgaagagcagcgtggaggtgtacgcctgggcccccaagccctaccacaagttcatggccttcaagagcttcggcgagctggtgcacaagcccctgctggtggacctgaccgtggaggagggccagagactgaaggtgatctacggcagctgcgccggcttccacgccgtggacgtggacagcggcagcgtgtacgacatctacctgcccacccacgtgagaaagaacccccacagcatgatccagtgcagcatcaagccccacgccatcatcatcctgcccaacaccgacggcatggagctgctggtgtgctacgaggacgagggcgtgtacgtgaacacctacggcagaatcaccaaggacgtggtgctgcagtggggcgagatgcccaccagcgtggcctacatcagaagcaaccagaccatgggctggggcgagaaggccatcgagatcagaagcgtggagaccggccacctggacggcgtgttcatgcacaagagagcccagagactgaagttcctgtgcgagagaaacgacaaggtgttcttcgccagcgtgagaagcggcggcagcagccaggtgtacttcatgaccctgggcagaaccagcctgctgagctggtag

SEQ ID NO: 150096 - DNA, 3654 bp, Artificial Sequence
  derived and/or modified sequence
ctggtctgcggctgagatacacagagcgacagagacatttattgttatttgttttttggtggcaaaaagggaaaatggcgaacgactcccctgcaaaaagtctggtggacatcgacctctcctccctgcgggatcctgctgggatttttgagctggtggaagtggttggaaatggcacctatggacaagtctataagggtcgacatgttaaaacgggtcagttggcagccatcaaagttatggatgtcactgaggatgaagaggaagaaatcaaactggagataaatatgctaaagaaatactctcatcacagaaacattgcaacatattatggtgctttcatcaaaaagagccctccaggacatgatgaccaactctggcttgttatggagttctgtggggctgggtccattacagaccttgtgaagaacaccaaagggaacacactcaaagaagactggatcgcttacatctccagagaaatcctgaggggactggcacatcttcacattcatcatgtgattcaccgggatatcaagggccagaatgtgttgctgactgagaatgcagaggtgaaacttgttgactttggtgtgagtgctcagctggacaggactgtggggcggagaaatacgttcataggcactccctactggatggctcctgaggtcatcgcctgtgatgagaacccagatgccacctatgattacagaagtgatctttggtcttgtggcattacagccattgagatggcagaaggtgctccccctctctgtgacatgcatccaatgagagcactgtttctcattcccagaaaccctcctccccggctgaagtcaaaaaaatggtcgaagaagttttttagttttatagaagggtgcctggtgaagaattacatgcagcggccctctacagagcagcttttgaaacatccttttataagggatcagccaaatgaaaggcaagttagaatccagcttaaggatcatatagatcgtaccaggaagaagagaggcgagaaagatgaaactgagtatgagtacagtgggagtgaggaagaagaggaggaagtgcctgaacaggaaggagagccaagttccattgtgaacgtgcctggtgagtctactcttcgccgagatttcctgagactgcagcaggagaacaaggaacgttccgaggctcttcggagacaacagttactacaggagcaacagctccgggagcaggaagaatataaaaggcaactgctggcagagagacagaagcggattgagcagcagaaagaacagaggcgacggctagaagagcaacaaaggagagagcgggaagctagaaggcagcaggaacgtgaacagcgaaggagagaacaagaagaaaagaggcgtctagaggagttggagagaaggcgcaaagaagaagaggagaggagacgggcagaagaagaaaagaggagagttgaaagagaacaggagtatatcaggcgacagctagaagaggagcagcggcacttggaagtccttcagcagcagctgctccaggagcaggccatgttactgcatgaccataggaggccgcacccgcagcactcgcagcagccgccaccaccgcagcaggaaaggagcaagccaagcttccatgctcccgagcccaaagcccactacgagcctgctgaccgagcgcgagaggttcctgtgagaacaacatctcgctcccctgttctgtcccgtcgagattccccactgcagggcagtgggcagcagaatagccaggcaggacagagaaactccaccagcagtattgagcccaggcttctgtgggagagagtggagaagctggtgcccagacctggcagtggcagctcctcagggtccagcaactcaggatcccagcccgggtctcaccctgggtctcagagtggctccggggaacgcttcagagtgagatcatcatccaagtctgaaggctctccatctcagcgcctggaaaatgcagtgaaaaaacctgaagataaaaaggaagttttcagacccctcaagcctgctgtaaggattgatctgaccgcactggccaaagagcttcgagcagtggaagatgtacggccacctcacaaagtaacggactactcctcatccagtgaggagtcggggacgacggatgaggaggacgacgatgtggagcaggaaggggctgacgagtccacctcaggaccagaggacaccagagcagcgtcatctctgaatttgagcaatggtgaaacggaatctgtgaaaaccatgattgtccatgatgatgtagaaagtgagccggccatgaccccatccaaggagggcactctaatcgtccgccagactcagtccgctagtagcacactccagaaacacaaatcttcctcctcctttacaccttttatagaccccagattactacagatttctccatctagcggaacaacagtgacatctgtggtgggattttcctgtgatgggatgagaccagaagccataaggcaagatcctacccggaaaggctcagtggtcaatgtgaatcctaccaacactaggccacagagtgacaccccggagattcgtaaatacaagaagaggtttaactctgagattctgtgtgctgccttatggggagtgaatttgctagtgggtacagagagtggcctgatgctgctggacagaagtggccaagggaaggtctatcctcttatcaaccgaagacgatttcaacaaatggacgtacttgagggcttgaatgtcttggtgacaatatctggcaaaaaggataagttacgtgtctactatttgtcctggttaagaaataaaatacttcacaatgatccagaagttgagaagaagcagggatggacaaccgtaggggatttggaaggatgtgtacattataaagttgtaaaatatgaaagaatcaaatttctggtgattgctttgaagagttctgtggaagtctatgcgtgggcaccaaagccatatcacaaatttatggcctttaagtcatttggagaattggtacataagccattactggtggatctcactgttgaggaaggccagaggttgaaagtgatctatggatcctgtgctggattccatgctgttgatgtggattcaggatcagtctatgacatttatctaccaacacatgtaagaaagaacccacactctatgatccagtgtagcatcaaaccccatgcaatcatcatcctccccaatacagatggaatggagcttctggtgtgctatgaagatgagggggtttatgtaaacacatatggaaggatcaccaaggatgtagttctacagtggggagagatgcctacatcagtagcatatattcgatccaatcagacaatgggctggggagagaaggccatagagatccgatctgtggaaactggtcacttggatggtgtgttcatgcacaaaagggctcaaagactaaaattcttgtgtgaacgcaatgacaaggtgttctttgcctctgttcggtctggtggcagcagtcaggtttatttcatgaccttaggcaggacttctcttctgagctggtagaagcagtgtgatccagggattactggcctccagagtcttcaagatcctgagaacttggaattccttgtaactggagctc

SEQ ID NO: 150097 - DNA, 3501 bp, Artificial Sequence
  derived and/or modified sequence
atggccaatgactctcctgcaaagtcattggtggacatcgatctgtcgagtctgcgcgatccggccggcatcttcgaactggtggaggtcgttgggaacggaacctatggtcaggtgtacaaaggacgccacgtgaagactgggcagcttgccgccatcaaagtcatggatgtgaccgaggacgaggaagaggaaatcaaactggaaattaacatgttgaagaagtacagtcaccaccgaaatatcgccacctattacggcgcttttatcaagaaaagccctccaggtcacgacgatcaactgtggctcgtcatggaattttgcggcgccggcagtatcaccgatttagtcaagaatacaaaaggtaatacactcaaggaggattggattgcatatattagtagggagatcctgagaggactggctcatctgcacattcaccatgtgattcaccgtgatatcaagggacagaatgtactgcttacggagaatgccgaagtgaagctcgtcgattttggcgtgagcgctcagttggatagaacagtcggacgccggaacactttcattgggacgccatactggatggcccccgaggtgattgcctgtgacgagaaccctgacgctacttacgactaccgttcagacttgtggtcttgtggcatcacggcaatcgaaatggccgagggggcgccaccactgtgcgatatgcaccccatgagggctcttttcctaataccccgcaacccccccccacggctgaaatcaaaaaagtggagcaagaagtttttttcttttatcgagggttgtttggtcaagaactatatgcagcgcccttcaaccgaacaattattgaaacacccttttataagagatcagcccaatgaacgccaggtgcgaattcagctcaaggatcacatcgatcggacacggaagaagaggggtgagaaagacgagacagaatacgaatatagcggctcggaagaggaggaagaggaagtgccagagcaggagggtgaacccagctcaattgtgaatgtgccaggagagtcaactctcaggcgggattttctgcggctccagcaggagaataaggagcgctctgaggctttgcgccggcagcagctcctgcaagagcagcagctccgcgaacaggaagaatacaaacgtcagctgttggccgagcgacagaaacggatcgaacaacagaaggaacagagaagaaggctggaggaacagcaaagacgcgaaagagaggcccgaagacagcaagagcgtgagcaacgtcggagggagcaggaagagaaacgcagactggaagagctggaacggaggagaaaagaagaggaggaacgccgtagggccgaagaggagaaaagaagggtcgagcgagagcaggaatatattcgcagacaactggaagaggagcagcgtcatcttgaagtattgcagcaacagctgctgcaggagcaagccatgctgttacacgaccaccggcggccgcacccccagcactcacagcaacccccacccccccaacaggagagaagtaaaccatctttccacgctccagagccgaaggcgcattatgaacctgctgaccgagcacgcgaagtgcctgttcggacaacctctcgctcccccgtgctgagcaggagggactcccccttgcaggggagtggccagcagaattcgcaggctggccagcggaacagtacaagcagcattgaaccccggctgctctgggaaagagtcgaaaaactggtgcccagaccaggctctggatctagctcagggtcatcaaacagcggcagccagcccggaagccaccccggctctcagtctgggagcggcgagagatttcgggttcgtagcagctccaagagtgagggctccccttcccagcggcttgagaacgcagttaagaagcccgaggacaaaaaggaggtcttccggccactgaaaccggccgtgcgaatcgatcttacagcactcgcaaaagagttgagggcagtggaggacgtacgccctccacataaggttaccgattattccagcagctcagaagagagtggcaccacggacgaagaagacgacgatgttgaacaggagggagccgacgaatccacctctggacccgaggatactagagcagcctcaagtttaaatctgtctaatggcgagaccgaaagtgtgaagacgatgattgttcacgacgacgtggagagcgagcctgccatgacgccaagtaaggagggaaccctgatcgtacgccagacgcagagcgcctcaagcacactgcagaagcataaaagcagctcctctttcaccccattcattgacccaaggcttttgcagatctccccttctagcggcaccactgtgaccagcgtggtcggcttctcctgcgatgggatgagacctgaggccatccgacaagaccctacccggaagggtagcgtcgtcaacgtaaatccgaccaatacacgcccccaaagtgatacccccgagatccgcaagtacaaaaagcgttttaattctgaaattctgtgcgcagctctgtggggtgtgaaccttctggtggggacagagagtggacttatgcttctagacaggagtgggcaaggaaaggtgtaccctctgatcaatagacggcgattccagcagatggacgtgctggaaggactgaatgtcctagtgaccatcagcggaaaaaaagacaaactgcgcgtatactatctgagctggttgcgaaacaaaattctccacaacgatcctgaagtcgagaagaaacagggctggaccacagtgggtgacttagaaggttgtgtgcattataaggtcgttaagtatgaaagaatcaaatttctcgtaattgcactgaagagcagtgttgaagtctatgcctgggcaccaaagccttaccacaagttcatggcattcaagagcttcggagagttggtacacaagcctttattggtggatctcaccgttgaggagggccagaggctcaaagttatatacgggtcctgcgccgggtttcacgccgtcgatgtggattcaggctctgtatacgacatctacctcccaacccacgtgagaaagaacccacattctatgatccagtgcagtataaagccccatgccattattatattacccaacaccgacggtatggagctgctggtttgttatgaagacgagggcgtctacgtcaatacttatggccgcatcacaaaagacgtcgtgctccagtggggtgaaatgccaacctcggtggcctacatccgatcaaatcagactatgggctggggcgagaaagctattgaaatccggtctgtcgaaacgggacacctggatggcgtatttatgcacaagcgggcccaacggctgaagttcttgtgtgagaggaatgataaagttttttttgcatctgtgagaagtggaggtagctcacaggtctatttcatgactttgggtagaacatccctgctcagctggtag

SEQ ID NO: 150098 - DNA, 3501 bp, Artificial Sequence
  derived and/or modified sequence
atggccaatgacagccctgccaagagcctggtggacatcgacctgagcagcctgcgggaccctgctggcatctttgagctggtggaggtggtgggcaatggcacctacggccaggtgtacaagggccgccacgtgaagacaggccagctggccgccatcaaggtgatggatgtgacagaagatgaggaggaggagatcaagctggagatcaacatgctgaagaagtacagccaccacaggaacatcgccacctactacggggccttcatcaagaagagccccccaggccatgatgaccagctgtggctggtgatggagttctgtggggccggcagcatcacagacctggtgaagaacaccaagggcaacaccctgaaggaggactggatcgcctacatcagccgggagatcctgcggggcctggcccacctgcacatccaccacgtgatccaccgggacatcaagggccagaatgtgctgctgacagaaaatgctgaggtgaagctggtggactttggagtgtctgcccagctggacagaacagtgggcagaagaaacaccttcatcggcaccccctactggatggcccctgaggtgattgcctgtgatgagaacccagatgccacctatgactacagaagtgacctgtggagctgtggcatcacagccatcgagatggccgagggcgccccacccctgtgtgacatgcaccccatgagggccctcttcctgatccccagaaatcctccaccccggctgaagagcaagaagtggagcaagaagttcttctccttcatcgagggctgcctggtgaagaactacatgcagaggcccagcacagagcagctgctgaagcaccccttcatccgggaccagcccaatgaaaggcaggtgcgcatccagctgaaggaccacatcgacaggaccaggaagaagagaggagagaaggatgaaacagaatatgagtacagcggcagcgaggaggaggaggaggaggtgcctgagcaggagggggagcccagcagcatcgtgaatgtgcctggagagagcaccctgcggcgggacttcctgcggctgcagcaggagaacaaggagaggtctgaggccctgcggcggcagcagctgctgcaggagcagcagctgcgggagcaggaggagtacaagaggcagctgctggccgagcggcagaagagaattgagcagcagaaggagcagaggcggcggctggaggagcagcagaggcgggagcgggaggcccggcggcagcaggagcgggagcagaggagaagagagcaggaggagaagaggcggctggaggagctggagaggaggaggaaggaggaggaggagcggcggcgggcagaggaggagaagagaagagtggagcgggagcaggagtacatccggcggcagctggaggaggagcagaggcacctggaggtgctgcagcagcagctgctgcaggagcaggccatgctgctgcatgaccaccggcggccccacccccagcacagccagcagcccccaccaccccagcaggagaggagcaagcccagcttccacgcccctgagcccaaggcccactatgagcctgctgaccgggcccgggaggtgcctgtgaggaccaccagccgcagccctgtgctgagcagaagagacagccccctgcagggcagcggccagcagaacagccaggccggccagaggaacagcaccagcagcattgagccccggctgctgtgggagcgggtggagaagctggtgcccaggcctggcagcggcagcagcagcggcagcagcaacagcggcagccagcccggcagccaccctggcagccagagcggcagcggggagcgcttccgggtgcgcagcagcagcaagtctgagggcagccccagccagaggctggagaatgctgtgaagaagccagaggacaagaaggaggtgttccggcccctgaagccagctgtgagaattgacctgacagccctggccaaggagctgcgggctgtggaggatgtgcggcccccccacaaggtgacagactacagcagcagcagcgaggagagcggcaccacagatgaggaggatgatgatgtggagcaggagggcgcagatgagagcaccagcggccctgaggacaccagggctgccagcagcctgaacctgagcaatggagaaacagagagcgtgaagaccatgattgtgcatgatgatgtggagagcgagcccgccatgacccccagcaaggagggcaccctgattgtgcggcagacccagagcgccagcagcaccctgcagaagcacaagagcagcagcagcttcacccccttcatcgacccccggctgctgcagatcagccccagcagcggcaccaccgtgacctctgtggtgggcttcagctgtgatggcatgaggcctgaggccatccggcaggaccccaccaggaaaggatctgtggtgaatgtgaaccccaccaacacccggccccagagcgacaccccagagatcaggaagtacaagaagcgcttcaacagcgagatcctgtgtgccgccctgtggggcgtgaacctgctggtgggcacagagagcggcctgatgctgctggacaggagcggccagggcaaggtgtaccccctcatcaacagaagacgcttccagcagatggatgtgctggagggcctgaatgtgctggtgaccatcagcggcaagaaggacaagctgcgggtgtactacctgtcctggctgaggaacaagatcctgcacaatgaccctgaggtggagaagaagcagggctggaccaccgtgggggacctggagggctgtgtgcactacaaggtggtgaagtatgaaagaatcaagttcctggtgattgccctgaagagctctgtggaggtgtatgcctgggcccccaagccctaccacaagttcatggccttcaagagctttggagagctggtgcacaagcccctgctggtggacctgactgtggaggagggccagaggctgaaggtgatctacggcagctgtgccggcttccacgctgtggatgtggacagcggctctgtgtatgacatctacctgcccacccacgtgaggaagaacccccacagcatgatccagtgcagcatcaagccccacgccatcatcatcctgcccaacacagatggcatggagctgctggtgtgctatgaagatgagggcgtgtatgtgaacacctacggccgcatcaccaaggatgtggtgctgcagtggggcgagatgcccacctctgtggcctacatccgcagcaaccagaccatgggctggggcgagaaggccatcgagatccgctctgtggagaccggccacctggatggagtcttcatgcacaagagggcccagaggctgaagttcctgtgtgaaagaaatgacaaggtgttctttgcctctgtgcgcagcggcggcagcagccaggtgtacttcatgaccctgggccgcaccagcctgctgtcctggtag

SEQ ID NO: 150099 - DNA, 3501 bp, Artificial Sequence
  derived and/or modified sequence
atggccaacgacagccccgccaagagcctggtggacatcgacctgtcctcacttcgcgacccggccggtatattcgagctcgtggaggtcgtgggtaacggtacttatggtcaggtctataaaggtaggcacgtgaagacggggcagctcgccgcaatcaaagtgatggacgttactgaggacgaagaggaggagattaagcttgagattaacatgctgaagaagtactcccaccacagaaacattgccacatactacggcgcgtttatcaaaaagtcaccaccaggtcatgatgaccagctatggctggttatggaattttgtggcgcaggtagcattaccgatctagttaagaacacaaagggcaacacacttaaagaggactggatcgcttacatttctcgggagattttaaggggtctcgcacacctgcatattcatcacgttatccaccgggacataaagggacagaacgtgctgttaacggagaatgccgaggtaaagctcgttgatttcggtgttagcgcccagcttgatcgcaccgtgggaaggcgaaacacttttattggcacaccatactggatggcaccggaggtgattgcttgtgatgagaaccctgatgccacatacgactatagaagcgacctatggagctgcggcattaccgccatcgagatggcggaaggagctccacccttatgtgacatgcatccaatgagggccctgtttctcattccacggaacccacctccccgtctgaagagcaagaagtggtccaagaagttcttcagctttattgaggggtgtcttgttaagaattatatgcaacggccttcgacagagcagcttctgaagcacccttttatccgtgatcagccaaacgagcggcaggttcggatccaattgaaggaccacattgaccggacacggaagaaacgcggcgagaaggacgagacggagtacgaatattccggctcagaggaggaagaggaagaggtgcccgagcaggagggcgagccaagcagtatagtgaacgtccccggcgaatcaaccctgaggagggattttttaagattgcagcaggagaacaaggaacgaagcgaagctctaaggaggcaacagttgttgcaggagcaacaattgagggaacaggaggagtacaagcggcaactgctggcagagaggcagaagcggatcgagcagcagaaggagcaacgtcggcggctagaggaacaacaaagaagagagagagaggctcggaggcagcaggagcgcgaacaacggaggagagaacaggaggagaaacgcaggttggaagagctcgaacgacggagaaaagaagaggaagaacgtagacgggctgaggaggagaaacgacgggtggaacgggagcaggagtacatcagaagacagctcgaggaagaacagcgtcacttggaggtcttgcagcagcaactattgcaggaacaggccatgctgctacacgaccaccgccgcccccacccacagcattcacagcagccgccccctcctcagcaggaacgatctaaaccgtcctttcacgcgccagaaccgaaggcccattatgaacctgctgatcgtgcccgggaagtgcctgttagaactacctcacgatcgcctgtgctctctagacgggacagccctttacaggggtccggtcagcagaactcgcaggcaggacaaaggaactctaccagttccatcgagccccgactgctttgggaaagggtggaaaagctcgtgccaagaccgggtagcggaagttcttctggcagtagcaactccggctcccagcccggctcccaccccggaagccagtccggcagcggcgaaaggtttagggtgaggtcctcaagcaagtctgagggctccccaagtcagagattagagaatgccgtgaaaaagccagaagataaaaaagaggtcttcaggccactgaagcctgccgttagaatagacctgaccgctctggcaaaagagctgcgcgctgtcgaagacgtgagacccccacataaggtgacagactattcatccagtagcgaagagtctggcactactgacgaggaggatgacgatgtggagcaggaaggcgccgatgaatccacttctgggccggaagatacaagagccgcttcctccctaaacctcagcaatggagagacagagtcagtaaagacaatgatagtccacgatgacgtcgaatcggagccagcaatgacacctagcaaagagggaactctgatcgtaaggcaaactcagtccgcctctagtaccctgcagaagcacaagtcgtctagctcctttacccccttcatcgacccacggcttttgcagatctcaccctcatctggcacaacggtgacctccgtggttggctttagctgcgacggaatgaggcccgaggcaatccgccaagatcctacgcggaaaggctctgtggtcaacgtaaatcccaccaatacgcgcccccaatcagacacacccgagattagaaagtacaagaagcgcttcaacagtgaaattctttgcgctgcactctggggtgttaacttgctggttggcactgagagcgggctgatgcttctcgatcggagtgggcagggcaaagtgtatcctctaatcaatcgccgcaggttccaacagatggacgtgctcgaaggcctaaatgtgcttgttaccatttctggaaaaaaagataagctgagggtgtactacctatcatggctcagaaataagattttacacaatgatcccgaggttgaaaagaagcagggctggaccaccgtaggcgacttagaaggctgtgtgcattacaaggtggtgaagtatgaaaggattaaattcctggtgatagcactgaagtcttcagttgaagtatacgcgtgggcccccaagccttatcacaagttcatggcattcaaaagttttggcgagctcgtacacaaaccactcttggttgacctgaccgtagaggaagggcagcgcctgaaagtgatctatggatcttgcgccggttttcatgcggtcgacgtggactccggttcggtatatgacatctacctacctactcacgtgcgcaaaaacccacacagcatgatccagtgtagcataaagccccatgcgatcatcatcctgccaaatactgacgggatggagctgctggtgtgttatgaggacgagggtgtttatgtgaatacctacgggcggatcacaaaggatgtggtgcttcaatggggggaaatgccaaccagtgtggcctacattagatccaaccagactatgggatggggcgagaaagccattgagatcagaagtgtcgagaccggccatctcgacggagtgtttatgcacaaaagggcacagcgcctgaaattcttatgtgagcggaacgataaagtcttctttgcctctgtccgcagtggggggtcttcacaggtctatttcatgaccctgggaagaaccagcctgctgagctggtag

SEQ ID NO: 150100 - DNA, 3501 bp, Artificial Sequence
  derived and/or modified sequence
atggccaacgatagccccgctaagtccttagtagacatcgacctgagttcgttgagagatcccgctggtatctttgaactcgtggaagtggtaggcaacggtacttacggccaagtgtacaaaggaaggcacgtcaagacaggacagttggctgccatcaaagttatggacgttactgaggacgaggaggaagagattaagctcgagattaatatgctaaaaaagtactctcaccatcggaatatagccacttactatggggcattcatcaagaagtctcccccaggacacgatgaccagctttggctggtgatggaattttgcggagcgggttctataacggatttggttaaaaacaccaagggcaatacattgaaggaggactggattgcttacatcagtcgagagatcctccgcggactggcgcacttgcatatccatcacgtcatccatagggacatcaagggccagaacgtgttgctgaccgaaaacgccgaggttaaactcgtcgactttggtgtcagcgcccaattagataggaccgtgggaagaaggaataccttcatcgggacaccctactggatggcccctgaagtcatcgcctgcgatgagaaccccgacgcaacctatgactatcggtctgacttatggagctgcgggattacagccattgagatggctgaaggggctcctccactgtgcgacatgcaccctatgcgcgcactgtttcttattcctaggaatccacccccacgtctcaaaagtaagaaatggtcaaagaaatttttctcattcatagaaggatgtttggtaaagaattatatgcagcgacctagtaccgaacagctactcaagcatccatttatcagggaccagccgaacgaacgccaagtaaggatccagctgaaggaccatattgatcgtactcggaaaaagcgcggagagaaggacgaaaccgagtatgagtactcgggaagtgaggaagaagaagaggaagttcctgagcaggagggcgaaccctcatccatagtgaatgttcccggagagagcaccttgaggagggactttctccgcctgcagcaggagaataaagagaggagcgaggccctgcgacgccaacagctactgcaggagcagcagctgcgggaacaggaggagtacaaacggcagctgctggcagagcgtcagaagcggattgagcaacagaaagaacagaggcggaggttagaagagcaacagcgaagagagcgggaggctcgcagacagcaggaaagagaacagaggcgcagggagcaggaggagaagcgaaggttggaggaattagagcgcagaagaaaggaggaagaggaacggaggagggccgaggaagaaaaacgacgggtggaacgcgagcaggagtacatcaggcggcagctggaagaggagcagaggcacctcgaagtgctgcaacagcagctgttgcaagaacaagccatgttgttgcatgaccatcgtcgccctcatcctcaacactctcagcaaccaccaccacctcagcaggaacgaagcaaaccaagtttccacgctcccgaacctaaagcccactatgagccagcagaccgcgcacgagaagtccccgtgaggactacgagcagatctccagtgctatctaggagggattcacccctgcaggggtcagggcagcagaactctcaggcaggacagcgcaactcaacatcgtctatcgaaccacggctgctgtgggaacgggtggaaaaattagtacctaggcctggcagcgggtctagctccggatcctccaactcaggttctcagcccggttcccatccaggtagccagtccggctcaggcgagcggttcagagtgaggtctagtagtaagagcgaaggctctccgagccagcgcctagagaacgccgtgaagaaacccgaagataagaaggaagtcttccggcctctcaagccggctgtgcgtatcgaccttactgctctggcaaaagagttaagagctgtggaggatgtcaggcccccacataaagtgacggactatagttcatcatccgaagagagtggtacgactgacgaagaggacgatgatgtcgagcaggagggcgcagatgaaagtacttcaggccctgaggatacaagagctgcctccagccttaatttaagcaacggtgagaccgagtcagtgaagacaatgattgtacatgacgatgtggaatctgagccagcgatgacccccagcaaagaaggcactcttatcgtgcgtcagacccaatccgccagtagcactctccaaaaacataagtccagctcaagttttacccccttcatcgatccgaggctgttacagattagcccctcgagtggtactacagtcacctctgtcgtcggcttttcctgcgacgggatgaggcctgaggcgataagacaggacccaacaaggaagggctctgttgttaacgtaaatccaaccaacaccagaccccagtccgatactcccgaaatccggaagtacaagaagcggtttaatagtgaaattttgtgtgccgctttatggggagtgaatcttttagtgggaactgagtctggcttgatgctcctggatcggtctgggcaaggaaaggtctatccgctgataaatcggaggcgctttcagcagatggacgtgctcgaaggactgaatgttctcgtgaccatcagtgggaaaaaggataagctccgggtttactatctgtcctggctccgcaacaaaattcttcataacgaccccgaggtcgaaaagaaacaggggtggacgacagttggcgaccttgaaggttgcgtgcactacaaggtagtcaagtacgagagaataaagtttctcgtcattgctctgaagtcatcagtcgaagtgtatgcgtgggctccaaagccttaccacaaattcatggcttttaaaagcttcggcgagctggtgcacaaacctctgctggtggacctgacggtggaggaggggcagagattgaaagtgatctatggaagctgtgcaggctttcacgcagttgacgtggacagtggctctgtgtatgacatttatctacccacacacgtgcggaagaatccccatagtatgatccagtgcagcattaaaccacatgctatcatcatacttcccaacactgatggtatggaactcttggtatgttacgaagacgaaggcgtgtacgttaacacatacggacgcattaccaaggacgtggtattgcagtggggtgaaatgcctacgtcggttgcttacatcagatcaaaccagacaatggggtggggcgaaaaggccatcgaaattcgatcggtagaaactggtcacttagacggcgttttcatgcataaacgggcacagaggctcaaatttctttgtgagagaaatgataaggtatttttcgcttcagtgaggtcaggcggttcatcgcaggtttacttcatgactcttgggagaacgtctttgctttcatggtag

SEQ ID NO: 150101 - DNA, 2252 bp, Artificial Sequence
  derived and/or modified sequence
agccaggaccccaggcagcagcgagtgacaggacgtctggaccggcgcgccgctagcagctctgccgggccgcggcggtgatcgatggggagcggctggagcggacccagcgagtgagggcgcacagccgggacgccgaggcggcgggcgggagacccgcaccagcgcagccggccctcggcgggacgtgacgcagcgcccggggcgcgggtgagtccgcgcggaccgccaggtgtatttgatatagtgtttgcaacaaattcgacccaggtgatcaaaatgattctcaactcttctactgaagatggtattaaaagaatccaagatgattgtcccaaagctggaaggcataattacatatttgtcatgattcctactttatacagtatcatctttgtggtgggaatatttggaaacagcttggtggtgatagtcatttacttttatatgaagctgaagactgtggccagtgtttttcttttgaatttagcactggctgacttatgctttttactgactttgccactatgggctgtctacacagctatggaataccgctggccctttggcaattacctatgtaagattgcttcagccagcgtcagtttcaacctgtacgctagtgtgtttctactcacgtgtctcagcattgatcgatacctggctattgttcacccaatgaagtcccgccttcgacgcacaatgcttgtagccaaagtcacctgcatcatcatttggctgctggcaggcttggccagtttgccagctataatccatcgaaatgtatttttcattgagaacaccaatattacagtttgtgctttccattatgagtcccaaaattcaaccctcccgatagggctgggcctgaccaaaaatatactgggtttcctgtttccttttctgatcattcttacaagttatactcttatttggaaggccctaaagaaggcttatgaaattcagaagaacaaaccaagaaatgatgatatttttaagataattatggcaattgtgcttttctttttcttttcctggattccccaccaaatattcacttttctggatgtattgattcaactaggcatcatacgtgactgtagaattgcagatattgtggacacggccatgcctatcaccatttgtatagcttattttaacaattgcctgaatcctcttttttatggctttctggggaaaaaatttaaaagatattttctccagcttctaaaatatattcccccaaaagccaaatcccactcaaacctttcaacaaaaatgagcacgctttcctaccgcccctcagataatgtaagctcatccaccaagaagcctgcaccatgttttgaggttgagtgacatgttcgaaacctgtccataaagtaattttgtgaaagaaggagcaagagaacattcctctgcagcacttcactaccaaatgagcattagctacttttcagaattgaaggagaaaatgcattatgtggactgaaccgacttttctaaagctctgaacaaaagcttttctttccttttgcaacaagacaaagcaaagccacattttgcattagacagatgacggctgctcgaagaacaatgtcagaaactcgatgaatgtgttgatttgagaaattttactgacagaaatgcaatctccctagcctgcttttgtcctgttattttttatttccacataaaggtatttagaatatattaaatcgttagaggagcaacaggagatgagagttccagattgttctgtccagtttccaaagggcagtaaagttttcgtgccggttttcagctattagcaactgtgctacacttgcacctggtactgcacattttgtacaaagatatgctaagcagtagtcgtcaagttgcagatctttttgtgaaattcaacctgtgtcttataggtttccactgccaaaacaatgcccgtaagatggcttatttgtataatggtgttactaaagtcacatataaaagttaaactacttgtaaaggtgctgcactggtcccaagtagtagtgtcttcctagtatattagtttgatttaatatctgagaagtgtatatagtttgtggtaaaaagattatatatcataaagtatgccttcctgtttaaaaaaagtatatattctacacatatatgtatatgtatatctatatctctaaactgctgttaattgattaaaatctggcaaagttatatttactttaaaataaaataattttattgcaatgtat

SEQ ID NO: 150102 - DNA, 2328 bp, Artificial Sequence
  derived and/or modified sequence
actataaattcggagctgcctcctcgccaatgattccagcgcctgacagccaggaccccaggcagcagcgagtgacaggacgtctggaccggcgcgccgctagcagctctgccgggccgcggcggtgatcgatggggagcggctggagcggacccagcgagtgagggcgcacagccgggacgccgaggcggcgggcgggagacccgcaccagcgcagccggccctcggcgggacgtgacgcagcgcccggggcgcggatgaagaaaatgaatcacaagtcaactgacagtccaaaggctccacagctcagaggaggtgtatttgatatagtgtttgcaacaaattcgacccaggtgatcaaaatgattctcaactcttctactgaagatggtattaaaagaatccaagatgattgtcccaaagctggaaggcataattacatatttgtcatgattcctactttatacagtatcatctttgtggtgggaatatttggaaacagcttggtggtgatagtcatttacttttatatgaagctgaagactgtggccagtgtttttcttttgaatttagcactggctgacttatgctttttactgactttgccactatgggctgtctacacagctatggaataccgctggccctttggcaattacctatgtaagattgcttcagccagcgtcagtttcaacctgtacgctagtgtgtttctactcacgtgtctcagcattgatcgatacctggctattgttcacccaatgaagtcccgccttcgacgcacaatgcttgtagccaaagtcacctgcatcatcatttggctgctggcaggcttggccagtttgccagctataatccatcgaaatgtatttttcattgagaacaccaatattacagtttgtgctttccattatgagtcccaaaattcaaccctcccgatagggctgggcctgaccaaaaatatactgggtttcctgtttccttttctgatcattcttacaagttatactcttatttggaaggccctaaagaaggcttatgaaattcagaagaacaaaccaagaaatgatgatatttttaagataattatggcaattgtgcttttctttttcttttcctggattccccaccaaatattcacttttctggatgtattgattcaactaggcatcatacgtgactgtagaattgcagatattgtggacacggccatgcctatcaccatttgtatagcttattttaacaattgcctgaatcctcttttttatggctttctggggaaaaaatttaaaagatattttctccagcttctaaaatatattcccccaaaagccaaatcccactcaaacctttcaacaaaaatgagcacgctttcctaccgcccctcagataatgtaagctcatccaccaagaagcctgcaccatgttttgaggttgagtgacatgttcgaaacctgtccataaagtaattttgtgaaagaaggagcaagagaacattcctctgcagcacttcactaccaaatgagcattagctacttttcagaattgaaggagaaaatgcattatgtggactgaaccgacttttctaaagctctgaacaaaagcttttctttccttttgcaacaagacaaagcaaagccacattttgcattagacagatgacggctgctcgaagaacaatgtcagaaactcgatgaatgtgttgatttgagaaattttactgacagaaatgcaatctccctagcctgcttttgtcctgttattttttatttccacataaaggtatttagaatatattaaatcgttagaggagcaacaggagatgagagttccagattgttctgtccagtttccaaagggcagtaaagttttcgtgccggttttcagctattagcaactgtgctacacttgcacctggtactgcacattttgtacaaagatatgctaagcagtagtcgtcaagttgcagatctttttgtgaaattcaacctgtgtcttataggtttccactgccaaaacaatgcccgtaagatggcttatttgtataatggtgttactaaagtcacatataaaagttaaactacttgtaaaggtgctgcactggtcccaagtagtagtgtcttcctagtatattagtttgatttaatatctgagaagtgtatatagtttgtggtaaaaagattatatatcataaagtatgccttcctgtttaaaaaaagtatatattctacacatatatgtatatgtatatctatatctctaaactgctgttaattgattaaaatctggcaaagttatatttactttaaaataaaataattttattgc

SEQ ID NO: 150103 - DNA, 2412 bp, Artificial Sequence
  derived and/or modified sequence
actataaattcggagctgcctcctcgccaatgattccagcgcctgacagccaggaccccaggcagcagcgagtgacaggacgtctggaccggcgcgccgctagcagctctgccgggccgcggcggtgatcgatggggagcggctggagcggacccagcgagtgagggcgcacagccgggacgccgaggcggcgggcgggagacccgcaccagcgcagccggccctcggcgggacgtgacgcagcgcccggggcgcgggtttgatatttgacaaattgatctaaaatggctgggtttttatctgaataactcactgatgccatcccagaaagtcggcaccagatgaagaaaatgaatcacaagtcaactgacagtccaaaggctccacagctcagaggaggtgtatttgatatagtgtttgcaacaaattcgacccaggtgatcaaaatgattctcaactcttctactgaagatggtattaaaagaatccaagatgattgtcccaaagctggaaggcataattacatatttgtcatgattcctactttatacagtatcatctttgtggtgggaatatttggaaacagcttggtggtgatagtcatttacttttatatgaagctgaagactgtggccagtgtttttcttttgaatttagcactggctgacttatgctttttactgactttgccactatgggctgtctacacagctatggaataccgctggccctttggcaattacctatgtaagattgcttcagccagcgtcagtttcaacctgtacgctagtgtgtttctactcacgtgtctcagcattgatcgatacctggctattgttcacccaatgaagtcccgccttcgacgcacaatgcttgtagccaaagtcacctgcatcatcatttggctgctggcaggcttggccagtttgccagctataatccatcgaaatgtatttttcattgagaacaccaatattacagtttgtgctttccattatgagtcccaaaattcaaccctcccgatagggctgggcctgaccaaaaatatactgggtttcctgtttccttttctgatcattcttacaagttatactcttatttggaaggccctaaagaaggcttatgaaattcagaagaacaaaccaagaaatgatgatatttttaagataattatggcaattgtgcttttctttttcttttcctggattccccaccaaatattcacttttctggatgtattgattcaactaggcatcatacgtgactgtagaattgcagatattgtggacacggccatgcctatcaccatttgtatagcttattttaacaattgcctgaatcctcttttttatggctttctggggaaaaaatttaaaagatattttctccagcttctaaaatatattcccccaaaagccaaatcccactcaaacctttcaacaaaaatgagcacgctttcctaccgcccctcagataatgtaagctcatccaccaagaagcctgcaccatgttttgaggttgagtgacatgttcgaaacctgtccataaagtaattttgtgaaagaaggagcaagagaacattcctctgcagcacttcactaccaaatgagcattagctacttttcagaattgaaggagaaaatgcattatgtggactgaaccgacttttctaaagctctgaacaaaagcttttctttccttttgcaacaagacaaagcaaagccacattttgcattagacagatgacggctgctcgaagaacaatgtcagaaactcgatgaatgtgttgatttgagaaattttactgacagaaatgcaatctccctagcctgcttttgtcctgttattttttatttccacataaaggtatttagaatatattaaatcgttagaggagcaacaggagatgagagttccagattgttctgtccagtttccaaagggcagtaaagttttcgtgccggttttcagctattagcaactgtgctacacttgcacctggtactgcacattttgtacaaagatatgctaagcagtagtcgtcaagttgcagatctttttgtgaaattcaacctgtgtcttataggtttccactgccaaaacaatgcccgtaagatggcttatttgtataatggtgttactaaagtcacatataaaagttaaactacttgtaaaggtgctgcactggtcccaagtagtagtgtcttcctagtatattagtttgatttaatatctgagaagtgtatatagtttgtggtaaaaagattatatatcataaagtatgccttcctgtttaaaaaaagtatatattctacacatatatgtatatgtatatctatatctctaaactgctgttaattgattaaaatctggcaaagttatatttactttaaaataaaataattttattgc

SEQ ID NO: 150104 - protein, 1116 aa, Artificial Sequence
  derived and/or modified sequence
MERAISPGLLVRALLLLLLLLGLAARTVAAGRARGLPAPTAEAAFGLGAAAAPTSATRVPAAGAVAAAEVTVEDAEALPAAAGEQEPRGPEPDDETELRPRGRSLVIISTLDGRIAALDPENHGKKQWDLDVGSGSLVSSSLSKPEVFGNKMIIPSLDGALFQWDQDRESMETVPFTVESLLESSYKFGDDVVLVGGKSLTTYGLSAYSGKVRYICSALGCRQWDSDEMEQEEDILLLQRTQKTVRAVGPRSGNEKWNFSVGHFELRYIPDMETRAGFIESTFKPNENTEESKIISDVEEQEAAIMDIVIKVSVADWKVMAFSKKGGHLEWEYQFCTPIASAWLLKDGKVIPISLFDDTSYTSNDDVLEDEEDIVEAARGATENSVYLGMYRGQLYLQSSVRISEKFPSSPKALESVTNENAIIPLPTIKWKPLIHSPSRTPVLVGSDEFDKCLSNDKFSHEEYSNGALSILQYPYDNGYYLPYYKRERNKRSTQITVRFLDNPHYNKNIRKKDPVLLLHWWKEIVATILFCIIATTFIVRRLFHPHPHRQRKESETQCQTENKYDSVSGEANDSSWNDIKNSGYISRYLTDFEPIQCLGRGGFGVVFEAKNKVDDCNYAIKRIRLPNRELAREKVMREVKALAKLEHPGIVRYFNAWLEAPPEKWQEKMDEIWLKDESTDWPLSSPSPMDAPSVKIRRMDPFATKEHIEIIAPSPQRSRSFSVGISCDQTSSSESQFSPLEFSGMDHEDISESVDAAYNLQDSCLTDCDVEDGTMDGNDEGHSFELCPSEASPYVRSRERTSSSIVFEDSGCDNASSKEEPKTNRLHIGNHCANKLTAFKPTSSKSSSEATLSISPPRPTTLSLDLTKNTTEKLQPSSPKVYLYIQMQLCRKENLKDWMNGRCTIEERERSVCLHIFLQIAEAVEFLHSKGLMHRDLKPSNIFFTMDDVVKVGDFGLVTAMDQDEEEQTVLTPMPAYARHTGQVGTKLYMSPEQIHGNSYSHKVDIFSLGLILFELLYPFSTQMERVRTLTDVRNLKFPPLFTQKYPCEYVMVQDMLSPSPMERPEAINIIENAVFEDLDFPGKTVLRQRSRSLSSSGTKHSRQSNNSHSPLPSN

SEQ ID NO: 150105 - protein, 965 aa, Artificial Sequence
  derived and/or modified sequence
MIIPSLDGALFQWDQDRESMETVPFTVESLLESSYKFGDDVVLVGGKSLTTYGLSAYSGKVRYICSALGCRQWDSDEMEQEEDILLLQRTQKTVRAVGPRSGNEKWNFSVGHFELRYIPDMETRAGFIESTFKPNENTEESKIISDVEEQEAAIMDIVIKVSVADWKVMAFSKKGGHLEWEYQFCTPIASAWLLKDGKVIPISLFDDTSYTSNDDVLEDEEDIVEAARGATENSVYLGMYRGQLYLQSSVRISEKFPSSPKALESVTNENAIIPLPTIKWKPLIHSPSRTPVLVGSDEFDKCLSNDKFSHEEYSNGALSILQYPYDNGYYLPYYKRERNKRSTQITVRFLDNPHYNKNIRKKDPVLLLHWWKEIVATILFCIIATTFIVRRLFHPHPHRQRKESETQCQTENKYDSVSGEANDSSWNDIKNSGYISRYLTDFEPIQCLGRGGFGVVFEAKNKVDDCNYAIKRIRLPNRELAREKVMREVKALAKLEHPGIVRYFNAWLEAPPEKWQEKMDEIWLKDESTDWPLSSPSPMDAPSVKIRRMDPFATKEHIEIIAPSPQRSRSFSVGISCDQTSSSESQFSPLEFSGMDHEDISESVDAAYNLQDSCLTDCDVEDGTMDGNDEGHSFELCPSEASPYVRSRERTSSSIVFEDSGCDNASSKEEPKTNRLHIGNHCANKLTAFKPTSSKSSSEATLSISPPRPTTLSLDLTKNTTEKLQPSSPKVYLYIQMQLCRKENLKDWMNGRCTIEERERSVCLHIFLQIAEAVEFLHSKGLMHRDLKPSNIFFTMDDVVKVGDFGLVTAMDQDEEEQTVLTPMPAYARHTGQVGTKLYMSPEQIHGNSYSHKVDIFSLGLILFELLYPFSTQMERVRTLTDVRNLKFPPLFTQKYPCEYVMVQDMLSPSPMERPEAINIIENAVFEDLDFPGKTVLRQRSRSLSSSGTKHSRQSNNSHSPLPSN

SEQ ID NO: 150106 - DNA, 4646 bp, Artificial Sequence
  derived and/or modified sequence
ggaaagtccaccttccccaacaaggccagcctgggaacatggagtggcagcggccgcagccaatgagagagcaaacgcgcggaaagtttgctcaatgggcgatgtccgagataggctgtcactcaggtggcagcggcagaggccgggctgagacgtggccaggggaacacggctggctgtccaggccgtcggggcggcagtagggtccctagcacgtccttgccttcttgggagctccaagcggcgggagaggcaggcgtcagtggctgcgcctccatgcctgcgcgcggggcgggacgctgatggagcgcgccatcagcccggggctgctggtacgggcgctgctgctgctgctgctgctgctggggctcgcggcaaggacggtggccgcggggcgcgcccgtggcctcccagcgccgacggcggaggcggcgttcggcctcggggcggccgctgctcccacctcagcgacgcgagtaccggcggcgggcgccgtggctgcggccgaggtgactgtggaggacgctgaggcgctgccggcagccgcgggagagcaggagcctcggggtccggaaccagacgatgagacagagttgcgaccgcgcggcaggtcattagtaattatcagcactttagatgggagaattgctgccttggatcctgaaaatcatggtaaaaagcagtgggatttggatgtgggatccggttccttggtgtcatccagccttagcaaaccagaggtatttgggaataagatgatcattccttccctggatggagccctcttccagtgggaccaagaccgtgaaagcatggaaacagttcctttcacagttgaatcacttcttgaatcttcttataaatttggagatgatgttgttttggttggaggaaaatctctgactacatatggactcagtgcatatagtggaaaggtgaggtatatctgttcagctctgggttgtcgccaatgggatagtgacgaaatggaacaagaggaagacatcctgcttctacagcgtacccaaaaaactgttagagctgtcggacctcgcagtggcaatgagaagtggaatttcagtgttggccactttgaacttcggtatattccagacatggaaacgagagccggatttattgaaagcacctttaagcccaatgagaacacagaagagtctaaaattatttcagatgtggaagaacaggaagctgccataatggacatagtgataaaggtttcggttgctgactggaaagttatggcattcagtaagaagggaggacatctggaatgggagtaccagttttgtactccaattgcatctgcctggttacttaaggatgggaaagtcattcccatcagtctttttgatgatacaagttatacatctaatgatgatgttttagaagatgaagaagacattgtagaagctgccagaggagccacagaaaacagtgtttacttgggaatgtatagaggccagctgtatctgcagtcatcagtcagaatttcagaaaagtttccttcaagtcccaaggctttggaatctgtcactaatgaaaacgcaattattcctttaccaacaatcaaatggaaacccttaattcattctccttccagaactcctgtcttggtaggatctgatgaatttgacaaatgtctcagtaatgataagttttctcatgaagaatatagtaatggtgcactttcaatcttgcagtatccatatgataatggttattatctaccatactacaagagggagaggaacaaacgaagcacacagattacagtcagattcctcgacaacccacattacaacaagaatatccgcaaaaaggatcctgttcttcttttacactggtggaaagaaatagttgcaacgattttgttttgtatcatagcaacaacgtttattgtgcgcaggcttttccatcctcatcctcacaggcaaaggaaggagtctgaaactcagtgtcaaactgaaaataaatatgattctgtaagtggtgaagccaatgacagtagctggaatgacataaaaaactctggatatatatcacgatatctaactgattttgagccaattcaatgcctgggacgtggtggctttggagttgtttttgaagctaaaaacaaagtagatgactgcaattatgctatcaagaggatccgtctccccaatagggaattggctcgggaaaaggtaatgcgagaagttaaagccttagccaagcttgaacacccgggcattgttagatatttcaatgcctggctcgaagcaccaccagagaagtggcaagaaaagatggatgaaatttggctgaaagatgaaagcacagactggccactcagctctcctagcccaatggatgcaccatcagttaaaatacgcagaatggatcctttcgctacaaaagaacatattgaaatcatagctccttcaccacaaagaagcaggtctttttcagtagggatttcctgtgaccagacaagttcatctgagagccagttctcaccactggaattctcaggaatggaccatgaggacatcagtgagtcagtggatgcagcatacaacctccaggacagttgccttacagactgtgatgtggaagatgggactatggatggcaatgatgaggggcactcctttgaactttgtccttctgaagcttctccttatgtaaggtcaagggagagaacctcctcttcaatagtatttgaagattctggctgtgataatgcttccagtaaagaagagccgaaaactaatcgattgcatattggcaaccattgtgctaataaactaactgctttcaagcccaccagtagcaaatcttcttctgaagctacattgtctatttctcctccaagaccaaccactttaagtttagatctcactaaaaacaccacagaaaaactccagcccagttcaccaaaggtgtatctttacattcaaatgcagctgtgcagaaaagaaaacctcaaagactggatgaatggacgatgtaccatagaggagagagagaggagcgtgtgtctgcacatcttcctgcagatcgcagaggcagtggagtttcttcacagtaaaggactgatgcacagggacctcaagccatccaacatattctttacaatggatgatgtggtcaaggttggagactttgggttagtgactgcaatggaccaggatgaggaagagcagacggttctgaccccaatgccagcttatgccagacacacaggacaagtagggaccaaactgtatatgagcccagagcagattcatggaaacagctattctcataaagtggacatcttttctttaggcctgattctatttgaattgctgtatccattcagcactcagatggagagagtcaggaccttaactgatgtaagaaatctcaaatttccaccattatttactcagaaatatccttgtgagtacgtgatggttcaagacatgctctctccatcccccatggaacgacctgaagctataaacatcattgaaaatgctgtatttgaggacttggactttccaggaaaaacagtgctcagacagaggtctcgctccttgagttcatcgggaacaaaacattcaagacagtccaacaactcccatagccctttgccaagcaattagccttaagttgtgctagcaaccctaataggtgatgcagataatagcctacttcttagaatatgcctgtccaaaattgcagacttgaaaagtttgttcttcgctcaatttttttgtggactactttttttatatcaaatttaagctggatttgggggcataacctaatttgagccaactcctgagttttgctatacttaaggaaagggctatctttgttctttgttagtctcttgaaactggctgctggccaagctttatagccctcaccatttgcctaaggaggtagcagcaatccctaatatatatatatagtgagaactaaaatggatatatttttataatgcagaagaaggaaagtccccctgtgtggtaactgtattgttctagaaatatgctttctagagatatgatgattttgaaactgatttctagaaaaagctgactccatttttgtccctggcgggtaaattaggaatctgcactattttggaggacaagtagcacaaactgtataacggtttatgtccgtagttttatagtcctatttgtagcattcaatagctttattccttagatggttctagggtgggtttacagctttttgtacttttacctccaataaagggaaaatgaagctttttatgtaaattggttgaaaggtctagttttgggaggaaaaaagccgtagtaagaaatggatcatatatattacaactaacttcttcaactatggactttttaagcctaatgaaatcttaagtgtcttatatgtaatcctgtaggttggtacttcccccaaactgattataggtaacagtttaatcatctcacttgctaacatgtttttatttttcactgtaaatatgtttatgttttatttataaaaattctgaaatcaatccatttgggttggtggtgtacagaacacacttaagtgtgttaacttgtgacttctttcaagtctaaatgatttaataaaactttttttaaatt

SEQ ID NO: 150107 - DNA, 4402 bp, Artificial Sequence
  derived and/or modified sequence
agtagggtccctagcacgtccttgccttcttgggagctccaagcggcgggagaggcaggcgtcagtggctgcgcctccatgcctgcgcgcggggcgggacgctgatggagcgcgccatcagcccggggctgctggtacgggcgctgctgctgctgctgctgctgctggggctcgcggcaaggacggtggccgcggggcgcgcccgtggcctcccagcgcctcagcgacgcgagtaccggcggcgggcgccgtggctgcggccgaggtgactgtggaggacgctgaggcgctgccggcagccgcgggagagcaggagcctcggggtccggaaccagacgatgagacagagttgcgaccgcgcggcaggtcattagtaattatcagcactttagatgggagaattgctgccttggatcctgaaaatcatggtaaaaagcagtgggatttggatgtgggatccggttccttggtgtcatccagccttagcaaaccagaggtatttgggaataagatgatcattccttccctggatggagccctcttccagtgggaccaagaccgtgaaagcatggaaacagttcctttcacagttgaatcacttcttgaatcttcttataaatttggagatgatgttgttttggttggaggaaaatctctgactacatatggactcagtgcatatagtggaaaggtgaggtatatctgttcagctctgggttgtcgccaatgggatagtgacgaaatggaacaagaggaagacatcctgcttctacagcgtacccaaaaaactgttagagctgtcggacctcgcagtggcaatgagaagtggaatttcagtgttggccactttgaacttcggtatattccagacatggaaacgagagccggatttattgaaagcacctttaagcccaatgagaacacagaagagtctaaaattatttcagatgtggaagaacaggaagctgccataatggacatagtgataaaggtttcggttgctgactggaaagttatggcattcagtaagaagggaggacatctggaatgggagtaccagttttgtactccaattgcatctgcctggttacttaaggatgggaaagtcattcccatcagtctttttgatgatacaagttatacatctaatgatgatgttttagaagatgaagaagacattgtagaagctgccagaggagccacagaaaacagtgtttacttgggaatgtatagaggccagctgtatctgcagtcatcagtcagaatttcagaaaagtttccttcaagtcccaaggctttggaatctgtcactaatgaaaacgcaattattcctttaccaacaatcaaatggaaacccttaattcattctccttccagaactcctgtcttggtaggatctgatgaatttgacaaatgtctcagtaatgataagttttctcatgaagaatatagtaatggtgcactttcaatcttgcagtatccatatgataatggttattatctaccatactacaagagggagaggaacaaacgaagcacacagattacagtcagattcctcgacaacccacattacaacaagaatatccgcaaaaaggatcctgttcttcttttacactggtggaaagaaatagttgcaacgattttgttttgtatcatagcaacaacgtttattgtgcgcaggcttttccatcctcatcctcacaggcaaaggaaggagtctgaaactcagtgtcaaactgaaaataaatatgattctgtaagtggtgaagccaatgacagtagctggaatgacataaaaaactctggatatatatcacgatatctaactgattttgagccaattcaatgcctgggacgtggtggctttggagttgtttttgaagctaaaaacaaagtagatgactgcaattatgctatcaagaggatccgtctccccaatagggaattggctcgggaaaaggtaatgcgagaagttaaagccttagccaagcttgaacacccgggcattgttagatatttcaatgcctggctcgaagcaccaccagagaagtggcaagaaaagatggatgaaatttggctgaaagatgaaagcacagactggccactcagctctcctagcccaatggatgcaccatcagttaaaatacgcagaatggatcctttcgctacaaaagaacatattgaaatcatagctccttcaccacaaagaagcaggtctttttcagtagggatttcctgtgaccagacaagttcatctgagagccagttctcaccactggaattctcaggaatggaccatgaggacatcagtgagtcagtggatgcagcatacaacctccaggacagttgccttacagactgtgatgtggaagatgggactatggatggcaatgatgaggggcactcctttgaactttgtccttctgaagcttctccttatgtaaggtcaagggagagaacctcctcttcaatagtatttgaagattctggctgtgataatgcttccagtaaagaagagccgaaaactaatcgattgcatattggcaaccattgtgctaataaactaactgctttcaagcccaccagtagcaaatcttcttctgaagctacattgtctatttctcctccaagaccaaccactttaagtttagatctcactaaaaacaccacagaaaaactccagcccagttcaccaaaggtgtatctttacattcaaatgcagctgtgcagaaaagaaaacctcaaagactggatgaatggacgatgtaccatagaggagagagagaggagcgtgtgtctgcacatcttcctgcagatcgcagaggcagtggagtttcttcacagtaaaggactgatgcacagggacctcaagccatccaacatattctttacaatggatgatgtggtcaaggttggagactttgggttagtgactgcaatggaccaggatgaggaagagcagacggttctgaccccaatgccagcttatgccagacacacaggacaagtagggaccaaactgtatatgagcccagagcagattcatggaaacagctattctcataaagtggacatcttttctttaggcctgattctatttgaattgctgtatccattcagcactcagatggagagagtcaggaccttaactgatgtaagaaatctcaaatttccaccattatttactcagaaatatccttgtgagtacgtgatggttcaagacatgctctctccatcccccatggaacgacctgaagctataaacatcattgaaaatgctgtatttgaggacttggactttccaggaaaaacagtgctcagacagaggtctcgctccttgagttcatcgggaacaaaacattcaagacagtccaacaactcccatagccctttgccaagcaattagccttaagttgtgctagcaaccctaataggtgatgcagataatagcctacttcttagaatatgcctgtccaaaattgcagacttgaaaagtttgttcttcgctcaatttttttgtggactactttttttatatcaaatttaagctggatttgggggcataacctaatttgagccaactcctgagttttgctatacttaaggaaagggctatctttgttctttgttagtctcttgaaactggctgctggccaagctttatagccctcaccatttgcctaaggaggtagcagcaatccctaatatatatatatagtgagaactaaaatggatatatttttataatgcagaagaaggaaagtccccctgtgtggtaactgtattgttctagaaatatgctttctagagatatgatgattttgaaactgatttctagaaaaagctgactccatttttgtccctggcgggtaaattaggaatctgcactattttggaggacaagtagcacaaactgtataacggtttatgtccgtagttttatagtcctatttgtagcattcaatagctttattccttagatggttctagggtgggtttacagctttttgtacttttacctccaataaagggaaaatgaagctttttatgtaaattggttgaaaggtctagttttgggaggaaaaaagccgtagtaagaaatggatcatatatattacaactaacttcttcaactatggactttttaagcctaatgaaatcttaagtgtcttatatgtaatcctgtaggttggtacttcccccaaactgattataggtaacagtttaatcatctcacttgctaacatgtttttatttttcactgtaaatatgtttatgttttatttataaaaattctgaaatcaatccatttgggttggtggtgtacagaacacacttaagtgtgttaacttgtgacttctttcaagtctaaatgatttaataaaactttttttaaatt

SEQ ID NO: 150108 - DNA, 3351 bp, Artificial Sequence
  derived and/or modified sequence
atggaacgggccataagtcctggtctgctggtgcgtgccttactgcttctcttactgttgctcggactcgcagcaagaaccgtcgccgccggtcgagctcggggcctgccagccccaaccgctgaagccgcattcggtctcggtgctgcggccgcccccacaagtgccacaagagttcctgcggcaggagccgtagctgccgccgaggtaaccgttgaggacgccgaagcccttccggcagccgccggagaacaggaacctcggggcccagaacctgacgacgaaactgagctacgtccgcgggggcgctcactggtgataattagcactctggacgggcgaatcgccgccctggatcccgaaaatcatgggaagaaacagtgggacctggatgtgggaagcggatccctggtatcatctagtctgtccaaacccgaagtgttcggtaacaagatgatcattccctcactggatggagccctgtttcaatgggaccaggatagggaatcaatggaaaccgtccccttcacagtcgagtccttgctcgaatccagttataagttcggtgatgacgtggtactggtcggtggcaagtctttaacaacatacgggttgtctgcatactccgggaaagtgagatacatttgctccgcattaggttgcaggcagtgggactctgacgagatggagcaggaagaagatatcctcctactgcagcgcacccagaagaccgttcgcgccgtgggcccccggtctggtaacgaaaagtggaactttagtgtcggtcatttcgagctgagatacattcccgatatggaaacacgcgcgggattcatcgaatccacttttaagcctaacgagaacacagaagaaagtaagattatctccgatgtagaggagcaggaagccgctatcatggacatcgtaataaaagtgtcggtggcagactggaaggtgatggcatttagtaagaagggcggccatctcgaatgggagtatcagttttgtacccccatcgcgtctgcctggcttctgaaagacgggaaggttattccaataagtctattcgacgacacaagttacacaagcaatgacgacgtcctggaagatgaagaggacatcgtagaagccgctaggggcgcgactgagaattccgtgtacctaggaatgtacagagggcagctctacctacagtccagtgtcagaatttctgagaagttcccatcctcccctaaagccctcgaatctgtgaccaacgaaaatgcaatcattccacttcccacaattaagtggaaacctctcatccactcccccagcaggactcccgtcttggtcggtagcgacgaatttgacaagtgtctctcgaacgacaagttttcccacgaggaatactcaaacggagccctatccatcttgcagtacccttacgataatggatattatctcccctattacaagagggaaagaaataaaagaagtacccagatcacggttaggttcctagataatcctcattacaataagaacatccggaagaaggacccagtgctgctgctacactggtggaaggagatagtagcaacgatcctcttctgcatcattgcaactactttcatagtgagaagattattccaccctcacccccatcgtcagcgcaaggaaagtgagacacaatgccagacggaaaataagtatgactcggtgagtggtgaagcaaatgactcttcctggaacgacatcaagaactcgggctatattagccgctatctgacagatttcgagccgatccagtgtctcggcaggggaggctttggcgtggtctttgaagctaagaacaaagtcgacgattgcaactacgctatcaaaagaattcggcttccgaacagagagctggcccgggagaaagtcatgagagaagtcaaagcactggctaagctggaacaccccgggatagttcgctactttaacgcttggttagaagccccccccgagaaatggcaggaaaagatggacgaaatctggctgaaagacgaatcgacagattggcctctgagtagcccatcacccatggatgccccctctgttaagatccgccgtatggacccgtttgcgaccaaagagcacattgaaatcattgcgccatcaccacagcgaagccgttcgttttccgtcgggatttcttgtgaccagactagctcaagtgaatcacagttcagtcctctggagtttagtgggatggaccatgaggacatctctgaatccgtagatgcagcctacaatctgcaagactcctgtttgactgactgcgacgtggaagacggaactatggatgggaatgatgagggccattctttcgaactgtgtcccagcgaggcatcgccatatgtgcgttctcgagaacgtacctccagctcaatcgtcttcgaagactcagggtgcgataacgcttcttcaaaggaagaaccgaaaacaaatagactccatatcggcaatcattgtgctaacaagttgacggcgttcaagcctactagttcaaagtcaagcagcgaagccaccctatctattagtccccccagaccaactactctgtcactcgatttgactaaaaataccacagagaagctgcagccttcttctccgaaagtttacctctacattcagatgcagctttgtcgtaaggaaaatttgaaagactggatgaatgggcgctgcactattgaagaaagagaaaggtcagtgtgcctgcacattttcctgcagattgctgaagctgtggaattcctccacagcaagggcttgatgcatagggacttgaaaccaagcaatatattcttcacaatggatgatgtagtgaaagtgggcgactttgggctggtgacggctatggaccaggacgaggaggagcagacggttctaacccccatgccagcttatgcacgccacactggacaggtgggcactaaattatacatgagtccggaacagattcacgggaactcctattcccacaaggtcgatattttttcactcggcctgatcctgtttgagcttctatatccttttagtacacaaatggaaagggtgagaactcttaccgacgttcggaatctaaagtttcctccattgttcacccagaagtacccatgcgagtatgtcatggttcaggatatgctttctccgagtcctatggaacgccctgaggctatcaatattatagaaaacgccgtgtttgaggacttagattttccaggcaagaccgtgctccggcaaagaagccgtagtctctcaagttctggaacaaagcactccagacagagcaataattctcactccccactgcctagcaattag

SEQ ID NO: 150109 - DNA, 2898 bp, Artificial Sequence
  derived and/or modified sequence
atgattatcccttcgctagatggggctctgtttcagtgggatcaggatcgcgagagcatggaaaccgtcccattcacggtggagtcactgctggaaagctcttataagtttggcgacgatgtggtcctggtcggaggcaagtcactgacaacctatggtctgtctgcctattcaggcaaagtgcgctatatctgctctgccttagggtgcagacagtgggactccgacgaaatggagcaagaagaagatattctgctcctgcagcgaacacagaaaacagtgagagccgtcggacccaggtccggcaacgagaagtggaacttctcagtgggccacttcgagctccgttatattcccgatatggagaccagggcgggtttcatcgaaagcactttcaagcctaatgaaaatactgaggaaagcaaaatcatctcagacgttgaagaacaagaagccgccatcatggatattgtaataaaggtgtccgtggctgattggaaggtgatggctttctccaaaaaggggggccacctcgagtgggagtatcagttctgcacgcctatcgcatcggcctggcttctcaaagatggtaaggtgatacctatatccctttttgacgataccagctacacatccaatgacgatgtactggaggatgaggaggacatagtcgaagccgcccggggagccaccgagaattccgtgtacctgggcatgtataggggccaattgtacctgcaatcatctgtccggatctcggaaaagttcccctcctctcccaaagccctggagtccgtgactaacgaaaatgcaatcatcccactgccaacaatcaagtggaaaccactgatacattccccatccagaactccagtcttggtaggctctgatgaatttgacaagtgcttgtccaatgataagttttcacacgaggaatactccaacggggcactgtcaattttgcagtatccatatgacaatgggtattacctcccttattacaaacgagagagaaataagagatctactcagattactgtccgttttctggataatcctcactacaacaaaaacatcagaaaaaaggatcccgtgctgctgctacattggtggaaggaaatagtagccaccattctgttttgcataatcgctaccacattcatcgtaaggcggctgtttcatccccatccccaccggcagaggaaagaatccgaaacacagtgccagaccgaaaacaaatacgatagcgtttccggcgaagctaacgattccagctggaatgacatcaaaaacagcggttacatctctaggtacttgacagatttcgaacccatccagtgcctcggtcgcggcggcttcggggtggtgtttgaggctaaaaacaaagttgatgactgtaactatgccattaaaaggattaggctcccgaacagggagctggccagggaaaaagttatgcgggaggtgaaagccctcgcgaaattagagcaccccgggatcgtcaggtatttcaacgcatggctcgaggccccgccagagaagtggcaggagaaaatggacgagatctggctaaaagatgagagcactgactggcctttgtcctcaccttccccaatggatgcaccatcagtcaagatcaggcgcatggacccctttgccaccaaggaacacattgaaattatcgctcccagccctcaaagatcacgtagctttagtgtcgggattagttgtgatcagaccagctcttcggaaagtcaattctctccccttgaattttcaggcatggatcacgaagatatctcggagtctgtagatgccgcctacaacctgcaggattcttgcctcacggactgcgatgtggaggacggaactatggatggtaatgacgagggccattctttcgaattatgcccctctgaggcttctccgtatgtgcggagccgcgagaggacctcttctagtattgttttcgaggattctgggtgtgataatgcttcatcaaaggaagagccaaagacaaatagattgcatatcggtaaccattgtgcgaataagctcacagcgttcaagcccacatcgtcaaagagctcctctgaggcaaccctgtcaattagcccgcccagacccaccaccctaagcctggatttaaccaagaacaccacagagaagcttcaaccaagttctcctaaggtctatctttatatacagatgcagctctgtcgaaaagaaaacctcaaggattggatgaatgggagatgcaccatagaggaaagggagagaagtgtgtgtcttcacatctttctacaaattgccgaggccgtggagtttctgcactctaaaggactcatgcacagggatctgaaacccagtaacattttcttcactatggatgacgtagtgaaggtaggagattttggactggtcacggccatggatcaagacgaggaggagcagacagtcttgacgcctatgcctgcttatgccaggcatacaggccaagtggggactaaactgtacatgtcccctgaacagattcacggtaattcttactcccataaggtggacattttctcactcggtctcatcctctttgaactactgtatcccttcagtacacaaatggaacgtgtcagaacccttacggacgtaaggaacttaaagttcccccccctgttcactcaaaagtacccatgcgaatatgtcatggtgcaggacatgttaagcccaagcccaatggagcggccagaggctattaacattatcgagaacgcggttttcgaagacttggacttcccgggcaagactgtccttcgccagcgtagtcgctccctcagcagcagcggaacaaagcactctcggcagtctaacaactcgcattctcctctgccctcaaactag

SEQ ID NO: 150110 - DNA, 3351 bp, Artificial Sequence
  derived and/or modified sequence
atggagcgggccatcagccctggcctgctggtgcgggccctgctgctgctgctgctgctgctgggcctggccgccaggacagtggccgccggccgggcccggggcctgcctgcccccacagctgaggccgccttcggcctgggcgctgctgctgcccccaccagcgccaccagggtgcctgctgctggagctgtggccgctgctgaggtgacagtggaggatgctgaggccctgcctgctgctgctggggagcaggagccccggggccctgagccagatgatgaaacagagctgcggccccggggccgcagcctggtgatcatcagcaccctggatggaagaattgctgccctggaccctgaaaatcatggcaagaagcagtgggacctggatgtgggcagcggcagcctggtgagcagcagcctgagcaagccagaggtgtttggaaacaagatgatcatccccagcctggatggagccctcttccagtgggaccaggaccgggagagcatggagaccgtgcccttcaccgtggagagcctgctggagagcagctacaagtttggagatgatgtggtgctggtgggcggcaagagcctgaccacctacggcctgagcgcctacagcggcaaggtgcgctacatctgcagcgccctgggctgccggcagtgggacagtgatgagatggagcaggaggaggacatcctgctgctgcagaggacccagaagacagtgcgggctgtgggccccaggtctggaaatgagaagtggaacttctctgtgggccactttgagctgcgctacatcccagacatggagacccgggccggcttcatcgagagcaccttcaagcccaatgaaaatacagaggagagcaagatcatcagtgatgtggaggagcaggaggccgccatcatggacatcgtcatcaaggtgtctgtggccgactggaaggtgatggccttcagcaagaagggcggccacctggagtgggagtaccagttctgcacccccatcgccagcgcctggctgctgaaggatggcaaggtgatccccatcagcctgtttgatgacaccagctacaccagcaatgatgatgtgctggaggatgaggaggacatcgtggaggccgcccggggggccacagaaaattctgtgtacctgggcatgtaccggggccagctgtacctgcagagctctgtgcgcatcagcgagaagttccccagcagccccaaggccctggagagcgtgaccaatgaaaatgccatcatccccctgcccaccatcaagtggaagcccctcatccacagccccagcaggacccctgtgctggtgggcagtgatgaatttgacaagtgcctgagcaatgacaagttcagccatgaggagtacagcaatggagccctgagcatcctgcagtacccctatgacaatggctactacctgccctactacaagcgggagaggaacaagaggagcacccagatcaccgtgcgcttcctggacaacccccactacaacaagaacatcaggaagaaggaccctgtgctgctgctgcactggtggaaggagatcgtggccaccatcctcttctgcatcatcgccaccaccttcatcgtgagaagactcttccacccccacccccaccggcagaggaaggagagcgagacccagtgccagacagagaacaagtatgattctgtgtctggagaggccaatgacagctcctggaatgacatcaagaacagcggctacatcagccgctacctgacagactttgagcccatccagtgcctgggccggggcggcttcggcgtggtgtttgaggccaagaacaaggtggatgactgcaactatgccatcaagaggatccggctgcccaaccgggagctggcccgggagaaggtgatgagggaggtgaaggccctggccaagctggagcaccctggcatcgtgcgctacttcaatgcctggctggaggcccctcctgagaagtggcaggagaagatggatgagatctggctgaaggatgagagcacagactggcccctgagcagccccagccccatggatgcccccagcgtgaagatccggaggatggacccctttgccaccaaggagcacatcgagatcatcgcccccagcccccagaggagccgctccttctctgtgggcatcagctgtgaccagaccagcagcagcgagagccagttcagccccctggagttcagcggcatggaccacgaggacatcagcgagagcgtggatgctgcctacaacctgcaggacagctgcctgacagactgtgatgtggaggatggcaccatggatggaaatgatgagggccacagctttgagctgtgccccagcgaggccagcccctacgtgcgcagccgggagaggaccagcagcagcatcgtgtttgaagattctggctgtgacaatgccagcagcaaggaggagcccaagaccaaccggctgcacatcggcaaccactgtgccaacaagctgacagccttcaagcccaccagcagcaagagcagcagcgaggccaccctgagcatcagccccccccggcccaccaccctgagcctggacctgaccaagaacaccacagagaagctgcagcccagcagccccaaggtgtacctgtacatccagatgcagctgtgcaggaaggagaacctgaaggactggatgaatggccgctgcaccatcgaggagcgggagaggtctgtgtgcctgcacatcttcctgcagattgctgaggccgtggagttcctgcacagcaagggcctgatgcaccgggacctgaagcccagcaacatcttcttcaccatggatgatgtggtgaaggtgggggactttggcctggtgacagccatggaccaggatgaggaggagcagacagtgctgacccccatgcctgcctatgcccggcacacaggccaggtgggcaccaagctgtacatgagccctgagcagatccacggcaacagctacagccacaaggtggacatcttcagcctgggcctcatcctgtttgagctgctgtaccccttcagcacccagatggagcgggtgaggaccctgacagatgtgaggaacctgaagttccccccactcttcacccagaagtacccctgtgaatatgtgatggtgcaggacatgctgagccccagccccatggagaggcctgaggccatcaacatcattgaaaatgctgtgtttgaggacctggacttccctgggaagacagtgctgcggcagaggagccgcagcctgagcagcagcggcaccaagcacagccggcagagcaacaacagccacagccccctgcccagcaactag

SEQ ID NO: 150111 - DNA, 2898 bp, Artificial Sequence
  derived and/or modified sequence
atgatcatccccagcctggatggagccctcttccagtgggaccaggaccgggagagcatggagaccgtgcccttcaccgtggagagcctgctggagagcagctacaagtttggagatgatgtggtgctggtgggcggcaagagcctgaccacctacggcctgagcgcctacagcggcaaggtgcgctacatctgcagcgccctgggctgccggcagtgggacagtgatgagatggagcaggaggaggacatcctgctgctgcagaggacccagaagacagtgcgggctgtgggccccaggtctggaaatgagaagtggaacttctctgtgggccactttgagctgcgctacatcccagacatggagaccagggctggcttcatcgagagcaccttcaagcccaatgaaaatacagaggagagcaagatcatcagtgatgtggaggagcaggaggccgccatcatggacatcgtcatcaaggtgtctgtggccgactggaaggtgatggccttcagcaagaagggcggccacctggagtgggagtaccagttctgcacccccatcgccagcgcctggctgctgaaggatggcaaggtgatccccatcagcctgtttgatgacaccagctacaccagcaatgatgatgtgctggaggatgaagaagatattgtggaggccgcccggggggccacagagaacagcgtgtacctgggcatgtaccggggccagctgtacctgcagagctctgtgcgcatcagcgagaagttccccagcagccccaaggccctggagagcgtgaccaatgaaaatgccatcatccccctgcccaccatcaagtggaagcccctcatccacagccccagcaggacccctgtgctggtgggcagtgatgaatttgacaagtgcctgagcaatgacaagttcagccatgaggagtacagcaatggagccctgagcatcctgcagtacccctatgacaatggctactacctgccctactacaagcgggagaggaacaagaggagcacccagatcaccgtgcgcttcctggacaacccccactacaacaagaacatcaggaagaaggaccctgtgctgctgctgcactggtggaaggagatcgtggccaccatcctcttctgcatcatcgccaccaccttcatcgtgcggcggctcttccacccccacccccaccggcagaggaaggagagcgagacccagtgccagacagagaacaagtatgacagcgtgtctggagaggccaatgacagctcctggaatgacatcaagaacagcggctacatcagccgctacctgacagactttgagcccatccagtgcctgggccggggcggctttggagtggtgtttgaggccaagaacaaggtggatgactgcaactatgccatcaagaggatccggctgcccaaccgggagctggcccgggagaaggtgatgagggaggtgaaggccctggccaagctggagcaccctggcatcgtgcgctacttcaatgcctggctggaggcccctcctgagaagtggcaggagaagatggatgagatctggctgaaggatgagagcacagactggcccctgagcagccccagccccatggatgcccccagcgtgaagatccggaggatggacccctttgccaccaaggagcacatcgagatcatcgcccccagcccccagaggagccgctccttctctgtgggcatcagctgtgaccagaccagcagcagcgagagccagttcagccccctggagttcagcggcatggaccacgaggacatcagcgagagcgtggatgctgcctacaacctgcaggacagctgcctgacagactgtgatgtggaggatggcaccatggatggaaatgatgagggccacagctttgagctgtgccccagcgaggccagcccctacgtgcgcagccgggagaggaccagcagcagcatcgtgtttgaggacagcggctgtgacaatgccagcagcaaggaggagcccaagaccaaccggctgcacatcggcaaccactgtgccaacaagctgacagccttcaagcccaccagcagcaagagcagcagcgaggccaccctgagcatcagccccccccggcccaccaccctgagcctggacctgaccaagaacaccacagagaagctgcagcccagcagccccaaggtgtacctgtacatccagatgcagctgtgcaggaaagaaaacctgaaggactggatgaatggccgctgcaccatcgaggagcgggagaggtctgtgtgcctgcacatcttcctgcagattgctgaggccgtggagttcctgcacagcaagggcctgatgcaccgggacctgaagcccagcaacatcttcttcaccatggatgatgtggtgaaggtgggggactttggcctggtgacagccatggaccaggatgaggaggagcagacagtgctgacccccatgcctgcctatgcccggcacacaggccaggtgggcaccaagctgtacatgagccctgagcagatccacggcaacagctacagccacaaggtggacatcttcagcctgggcctcatcctgtttgagctgctgtaccccttcagcacccagatggagcgggtgaggaccctgacagatgtgaggaacctgaagtttcctcctctcttcacccagaagtacccctgtgaatatgtgatggtgcaggacatgctgagccccagccccatggagaggcctgaggccatcaacatcattgaaaatgctgtgtttgaggacctggacttccctgggaagacagtgctgcggcagaggagccgcagcctgagcagcagcggcaccaagcacagccggcagagcaacaacagccacagccccctgcccagcaactag

SEQ ID NO: 150112 - DNA, 3351 bp, Artificial Sequence
  derived and/or modified sequence
atggagcgggccatcagccccggcctgctggtgcgggccctgctgctgttgttgcttctgctcggattagcggcaagaaccgtggcggccgggagggccaggggactgccagcccctaccgctgaggccgcatttggactgggggccgcagctgccccaacgagcgctacgcgcgtgcctgctgctggagctgttgcagcggctgaagttacagtggaggatgcggaggcgttacctgcggctgccggggaacaagagccacggggccccgagccagatgatgagactgagttgcgcccacgcgggaggtctctcgtgatcatttctaccctcgatggtagaatcgctgctctggaccctgagaaccacggaaagaaacagtgggacctggatgtaggatcgggctcgctggtatcttcaagcctctccaagcctgaagtgttcgggaataaaatgatcatccccagtctcgatggggccctgtttcagtgggaccaggatagggagagcatggagactgttcccttcaccgtagaaagtctccttgaatcctcctacaaatttggtgacgatgtggtacttgttggcggcaagagccttacaacctacggcctctcagcatattccggtaaggtgcggtatatctgcagcgccctcggctgccggcagtgggatagcgacgaaatggagcaggaagaagacatcctcctacttcaaaggacccagaaaacggtgcgggccgtaggcccaagaagcggtaacgagaagtggaatttctctgtgggccattttgaacttagatacatacccgacatggaaacgagagcaggatttatagagtcaactttcaagcctaacgagaataccgaggagtccaaaattatatctgatgtcgaggaacaagaggcagcaattatggacatcgtgattaaagtctctgtcgccgactggaaggtgatggcattttctaagaaaggcggacatctcgagtgggaataccagttctgtaccccaattgcgtctgcttggctactcaaggacgggaaggtgatcccgattagtttgttcgacgatacgagttacacatccaatgatgatgttttggaagacgaagaagatatcgtcgaagccgcccgcggagctaccgagaattccgtctacctagggatgtatagggggcaattgtatctgcaaagcagcgtccgcatctcagagaaattcccctcaagcccaaaagccttggaaagtgtgacaaacgagaacgctatcattcccctgcccaccataaaatggaagccactgatacactctccgagcagaaccccagttctcgtcggatccgatgagtttgacaagtgtctctccaacgataagttctctcatgaagagtattccaatggtgccctgtccattctgcagtacccttacgacaatgggtactaccttccttactacaaaagagaaagaaataagcgaagcacgcagatcactgtcagattcttggataatccccattataataagaatattcgcaaaaaggaccctgtattgctgctgcactggtggaaggaaatcgttgctaccatactgttctgcataatcgcaaccacatttatcgtgaggcgactgtttcacccgcatcctcatagacagaggaaggagtccgagacccagtgtcagaccgaaaataaatacgattcggtctccggcgaggcgaatgattcttcgtggaatgatatcaagaacagcggttacatatcgcgctatctcaccgacttcgaacctatccagtgcctgggtagagggggattcggagtggtgttcgaggccaaaaacaaggttgacgactgcaactatgctattaagagaatccgacttcccaatcgggagttggccagagagaaagtaatgagagaggtgaaagctttggcaaaactcgaacatcccggcatagtccgctactttaacgcgtggctggaagcacccccagagaagtggcaagagaaaatggacgagatctggttaaaggacgaatctactgactggcctctgagcagcccatccccaatggacgccccttcggttaaaatcaggcggatggatcctttcgctactaaggagcacattgagattattgcccccagcccacagaggtcgagaagtttctcagtcggcatctcgtgtgaccaaacaagctcatccgagagccagttcagtccgttggagtttagcggaatggatcacgaggatatttcggagtcggtagacgccgcctataatctgcaggacagttgcctcaccgattgtgacgtggaggacggcaccatggatggaaacgacgaaggccacagctttgagctgtgtcccagcgaagcctctccttacgtacggtcgcgggagcgaacaagctcgtccatagtgtttgaggattctgggtgcgacaacgctagctccaaggaagagcccaaaacaaatcggcttcacataggcaaccactgtgcaaacaaactgacagcgtttaagccgactagctctaagtctagttccgaggcgacgctgtccataagtccgcctcgacctaccacgctgtccctagaccttacaaagaatactaccgaaaagctgcagcctagttcccccaaggtgtacctgtatatccagatgcagttatgtaggaaggagaacctgaaggactggatgaacggtcggtgtaccatcgaagaaagggagaggtccgtgtgcctgcatatctttcttcagattgccgaagcagtggagttccttcatagcaagggactgatgcacagagacctgaagccaagcaatattttcttcacgatggatgatgtggtgaaggtaggtgacttcggcctagtgactgcaatggatcaggatgaggaagagcaaactgtgttaaccccaatgcccgcttacgctagacacaccgggcaagtcggaacaaagctgtacatgtcacccgagcaaatccatggtaattcctactcccataaggtggacatttttagcctgggtttgatacttttcgaactgctgtatccttttagcacgcaaatggaacgggttagaacactgactgacgtgagaaacctgaagttccccccactgtttacccaaaaatacccctgcgagtatgtgatggtccaggacatgctatctccaagccctatggagagacccgaagcgataaatattatagagaatgcagtgtttgaagatttggactttcctggtaagacagtgctcagacagcgtagccgtagtttaagcagctctgggaccaagcactctagacagtccaataactctcacagcccccttccgtctaattag

SEQ ID NO: 150113 - DNA, 2898 bp, Artificial Sequence
  derived and/or modified sequence
atgatcatccccagcctggacggcgccctgttccagtgggaccaggatagggaaagcatggagactgtaccgtttactgtggagtcactacttgagagttcctacaaattcggagacgacgtggttttggtgggtggcaaatcactgacaacatatggactcagcgcgtattccgggaaggtgcggtatatttgtagcgctctaggctgccgacagtgggacagcgatgaaatggaacaagaagaagatatactgctgcttcagcggacacaaaaaaccgtgcgagctgtgggaccccgatctggcaatgagaaatggaacttctccgtagggcactttgagctccgctatattccagatatggaaacacgcgcaggattcatagagtccacattcaagccaaacgaaaacaccgaagaatccaagatcatctctgacgttgaagagcaagaggccgccatcatggatatcgtgattaaggtaagtgtggctgactggaaagtgatggctttttcaaagaagggcggacacttggaatgggaataccagttttgtacccctattgcctccgcatggctcctgaaggatggcaaagttatccccattagcctgttcgacgacacttcttatacatccaacgatgatgtgctggaggatgaggaggacatcgtggaagcagcccgcggagccacagaaaattccgtatacctgggaatgtacagggggcagctttacctgcaaagcagtgtcagaatctccgagaaatttccctcctcccccaaggcattagagtccgtgactaatgagaacgccattattcctctgccaactatcaagtggaagccgctaatccactctccttcaagaactcccgtcctggtcggctctgatgagttcgataagtgtctatccaatgacaaattcagccatgaggagtattcaaacggcgcattgagcatcttgcagtatccatatgataacggttactatctgccttattacaagagagaacgcaataaacggagcacccaaattacagttaggttcctggataatcctcattataataagaacatcaggaaaaaagacccagtgctgctgctgcactggtggaaagagattgtggccacgatcctgttttgcattattgctacgaccttcatagtgcgccgcctgtttcacccccacccccataggcaaaggaaagagtcggagacacagtgtcagacagaaaataagtacgattcagtgtccggggaggctaacgatagcagctggaacgatatcaaaaatagcggctatatcagtcggtatctgacggactttgaaccgattcagtgcctaggaaggggtggcttcggcgtggtattcgaggccaaaaataaggtggacgactgtaactacgctatcaagagaataagactacccaaccgcgaactcgctcgggagaaggtcatgagggaagtgaaagcactggccaagctggaacatccaggcattgttcgctacttcaacgcctggctggaagcccctcctgagaaatggcaggagaaaatggacgaaatctggctgaaggatgagtccactgattggccactcagcagccccagcccaatggacgcgccttctgtaaaaattcgtcggatggaccctttcgccaccaaggaacacattgagatcatcgccccctctccccagaggtcccgttccttttcggtggggataagttgtgaccagacgagcagctctgagtctcagttttcccctctggaattttccggaatggatcatgaggacatctctgaatccgtagacgctgcttacaatctccaggactcgtgtctgactgactgcgatgtagaagacgggaccatggacggaaacgacgaggggcacagcttcgaattgtgtccttccgaggcatccccgtacgtacgctcccgggagcggactagcagttcgattgtgttcgaggactcaggatgtgataatgcctcatccaaggaggagcccaagactaaccgtctgcatattggaaaccattgtgcgaacaaattgacggcctttaaacccactagttcaaaaagcagttcggaagcaaccttgtcaatttcccctcctagacctaccacactgtctctggatctgactaaaaacacgacggaaaagctgcaaccttcttctcccaaagtttacctatacatccagatgcaactgtgccggaaagaaaacctgaaagactggatgaacgggcgctgcactattgaagagcgcgaacgttccgtctgtctacacattttcttgcaaattgcagaggccgttgagttcctacactctaaggggcttatgcacagggatcttaaaccttctaatatctttttcacaatggacgatgtggtgaaggtgggagactttgggctcgtcaccgctatggatcaagacgaggaggaacaaaccgtcctcactccgatgcccgcatatgccaggcacacaggccaggtgggtactaagctgtacatgtccccggagcagattcacgggaatagctattcccacaaggtagacattttctcattgggcctgatcctttttgaactgttatatcccttctctacacaaatggagcgtgtgagaaccctgactgacgtccgaaacctgaagtttccacctttatttactcagaaatatccttgcgaatacgtcatggtccaggacatgcttagcccctcccccatggaaaggcccgaggccattaatataattgaaaatgcagtttttgaggatcttgatttccctggaaaaacagtcctcagacagcggtctcgctctctgtccagctctgggacaaagcactcgaggcaatccaataattctcattctccccttccctcaaactag

SEQ ID NO: 150114 - DNA, 3351 bp, Artificial Sequence
  derived and/or modified sequence
atggaacgagccatttctccgggacttctggtccgggcactgctgctcctgttgcttctccttggacttgccgcacgtaccgtagccgctggcagagctcgcggtcttcccgcaccgaccgccgaagccgcatttggccttggagcggctgccgctccaacgagcgcaacaagagttccagcagcaggcgcagtggctgctgccgaagtgaccgtcgaggatgccgaggccttgccagccgctgccggagagcaagagccaagaggcccagaacctgacgatgagaccgaacttaggccgagaggcaggagcctcgtcatcatatcaaccctcgacggaagaatcgctgctctcgacccagagaaccatggcaaaaagcagtgggacttagatgttggatcaggatccttggtgagcagctccctgagtaagcctgaggtcttcggcaacaagatgattatcccctctcttgacggagctctgttccagtgggatcaagatagggaatccatggagactgtacccttcacagtagaatctctcctggaatcgtcatacaagttcggagatgatgtggtgctagtaggcggtaagtcactgactacatatggactgtctgcctattccggaaaagtccgctacatttgctcagctctggggtgccggcaatgggacagtgatgaaatggaacaggaggaagacattcttttgctgcagaggacccagaagaccgttagggcagtcggacccagatctggcaacgaaaagtggaatttctcagtgggtcactttgaactgcgctatatccccgatatggagaccagggcgggtttcatcgaaagtactttcaagccaaacgagaacacagaggaaagtaagataattagcgacgttgaggaacaggaggcagcgatcatggatatcgtgatcaaagtgtcagtagctgactggaaggttatggcttttagcaagaagggcggacatctggagtgggaataccagttctgcacacctatcgctagcgcgtggctgcttaaggatgggaaggttatacctatttcgttgttcgacgacacatcgtatacaagcaacgacgatgtgctcgaagacgaggaggatatcgtggaagctgccagaggagcaacagagaactccgtctacctagggatgtacaggggccaactctacctgcaatccagtgtaagaatttctgaaaagttcccatcttccccgaaggcactggagtccgtaaccaatgagaatgcaattattcctctcccaacaatcaagtggaaaccactgatccattccccctccagaaccccggtgctggtgggatctgacgaatttgataagtgcttatctaatgacaaattttcccacgaggagtactcaaacggggctctctccatcctgcagtacccatacgataacgggtactacctgccgtattacaagcgtgagagaaacaagagatccacccagattacagttcgattcctggacaatccacattataataagaatattcgaaagaaagatcccgtgctgctgctgcattggtggaaggaaatcgtcgcaacaatactgttctgtatcatcgccaccacattcatagtgaggcggctctttcatcctcacccacaccgacagagaaaggagtccgaaacacagtgccagacagagaataaatacgatagtgttagtggagaagctaacgattcaagctggaacgacatcaagaatagtgggtacatatcccgctacttaactgatttcgagcctatacagtgtctgggaagaggcggtttcggtgttgtgttcgaagcgaaaaacaaagttgacgactgtaactacgcaatcaaaagaatccggctgcctaatagagagctcgcaagagagaaagtaatgagggaggtcaaggccctggcaaagctcgaacacccaggtatagtgcgttattttaacgcgtggctggaggccccacccgagaaatggcaggaaaagatggatgagatatggctgaaggatgaatctaccgattggcccctgtcgtcaccaagtcccatggatgccccttctgtgaagattcgcagaatggatcctttcgccactaaagagcatatagagatcatcgcaccctccccacagaggtcaagaagttttagcgtagggatcagttgtgatcagacaagctccagtgagagtcagttctcaccgctcgagttctccgggatggaccacgaggacatctctgaatcagtggatgctgcctataatctccaggatagttgtctcacagactgtgatgtggaggatggcactatggacggaaacgacgagggccattcttttgagctgtgcccaagcgaagctagtccatacgtgcgtagccgcgagagaacttcttcatccattgtgttcgaagacagcgggtgcgataatgccagctctaaggaggaacctaaaaccaaccgtcttcatattggcaaccattgcgcgaataagctgactgccttcaagcccaccagctccaagagctcatctgaggccactctcagcatctcgcccccacgtcctaccacattgtccctcgaccttacaaagaacacgaccgagaaactccaacctagctcccccaaagtgtacctttacatacaaatgcagctttgcaggaaagagaatctgaaggactggatgaatggtagatgcactatagaggagcgcgaacggagcgtgtgcctccacatcttcctacagattgcagaggccgtcgaattcctgcactctaagggactgatgcaccgcgatcttaagcccagcaacatcttcttcacaatggatgatgtcgtaaaagtgggtgatttcggcctcgtgacagccatggatcaagacgaggaagaacagacagtcctgacccctatgcctgcgtacgcacggcacacggggcaggtgggaacgaagctctacatgtctcctgaacagatacatggcaattcgtacagtcataaggtggatatcttttccctgggactgatactctttgagctgttatatcccttcagtacccaaatggagcgcgtgcgtacattgacagacgtcagaaatctgaaattccccccattgtttacccagaagtatccatgtgagtatgtgatggtgcaggatatgttatccccctcacctatggagcgacccgaggccattaacatcattgaaaacgccgtgttcgaggatttggattttcctgggaaaacggttctgagacagagatcccgaagtctgtccagctctggaactaagcactcgaggcagagtaacaactcccatagcccgctgccgtctaattag

SEQ ID NO: 150115 - DNA, 2898 bp, Artificial Sequence
  derived and/or modified sequence
atgattataccttctctggatggcgctcttttccaatgggaccaagatagagagagcatggaaactgtacctttcacggtagagagtctcctagaatcctcttacaaattcggggacgacgtggttctggtcggcggtaagagtctgacaacctacggtctctccgcctacagcgggaaggtgcgttacatttgctcagctctaggatgtaggcagtgggactcggatgagatggaacaagaggaggacattctcttgttgcagcgaacccagaagacagttagagcggtgggcccaaggtccggaaatgaaaaatggaatttctcagtcgggcattttgagctgaggtatatacccgatatggaaactagggctggtttcattgaaagcacttttaagccaaacgaaaacaccgaagagtcgaagatcattagtgacgtagaagagcaggaggcggctattatggacatcgtgatcaaggtctctgtagccgactggaaggtcatggcgttcagtaagaagggcggtcaccttgagtgggagtaccagttctgtaccccaattgcgtcagcctggctgctgaaggacggaaaggtgatccctatcagcctgtttgatgacacctcttacacaagcaatgatgacgtgttagaagacgaggaggacatagtggaggccgctagaggagcaaccgagaactccgtatacttaggcatgtacagaggtcagctctatctccagagttcggtaaggatttctgaaaaatttccatctagtcctaaggctctcgaatcagttaccaatgagaacgcgattatcccactgccaacgataaaatggaagccactaatccactctccaagtaggacaccggtgctagtaggatctgacgaattcgacaagtgcctaagcaatgacaagttttcgcatgaggagtactctaacggcgctctgtccatattgcagtatccatacgacaacggttactatctgccttactacaagcgggaacggaacaagagatcaactcagatcactgtccggttcttggataacccacactataacaagaatatcaggaagaaagacccagtgctgctgctccattggtggaaagagatcgtggccacaatacttttctgtatcatcgcaactacttttattgtgcggcgactgttccatccgcacccacatcgccagcgaaaagaatccgagacccagtgtcagactgagaacaaatacgactccgtatcaggcgaggccaatgactcctcttggaacgacataaagaattctggatacatcagcaggtacctgaccgattttgaaccgattcaatgcctaggccgtggagggtttggggtggtctttgaagccaaaaataaagttgatgactgtaattatgccattaagaggatccgcctgccaaatagggaactggcaagagagaaagtaatgagggaagtgaaggccctggccaaacttgagcatccaggcattgttcgttactttaacgcctggctcgaggctccaccagagaagtggcaagagaagatggacgagatctggttaaaagacgagtcaactgattggcccctctctagtcctagcccaatggatgccccttccgtaaaaattcgaaggatggatccctttgctacaaaggaacacattgagataatcgctcccagcccgcagcggtcccgctcatttagcgtgggtatctcatgtgaccagactagctcaagcgaaagtcaattttccccgctggaattcagcggcatggatcatgaagatataagcgagtcagtggacgccgcttacaatttacaggatagctgtctgactgactgcgatgttgaagatggaaccatggacggtaacgatgaaggtcactccttcgaactttgcccaagtgaggcctccccctatgtgaggtccagggaacggacctcctccagtatagtcttcgaggactccggttgtgacaacgcatccagcaaagaagagcccaaaactaatcgcctgcacatcgggaaccactgtgccaataaacttaccgctttcaagcccacttcctccaagagctcctcagaggccacactgagcattagcccgcctcgccctactactctgtcacttgacctgacaaagaacaccaccgagaaactgcagcctagttctccgaaagtgtatttatacattcaaatgcagttgtgtcggaaggagaacctgaaagattggatgaatggcaggtgcactattgaggagcgagagaggagcgtgtgtcttcatattttcctgcagattgctgaggccgttgagtttctgcacagcaaagggttgatgcaccgggatcttaaaccctcaaacattttctttacgatggacgatgtggtgaaggtgggcgactttggactggtcaccgcgatggaccaggacgaggaagaacaaaccgtgctaacgcccatgcccgcttatgcacgacatactggacaagttgggaccaagctgtacatgagccctgaacagatccatggaaatagctatagccataaggttgacatctttagcttgggcttaatccttttcgagctattgtatccattttcaacccagatggagcgtgtgcgcaccctgaccgatgtccgcaatctgaaattcccccctctcttcacacagaagtacccttgcgaatatgtgatggtgcaggacatgctatcgccatcaccaatggaacgcccagaggccataaacattatcgaaaatgccgtctttgaggatctcgatttccccggtaaaaccgtgctccggcagaggagtagaagtctgtcctcttccggcaccaagcactcacgccaaagcaataatagtcacagccctttaccaagcaattag

SEQ ID NO: 150116 - DNA, 3351 bp, Artificial Sequence
  derived and/or modified sequence
atggagagagccatcagccccggcctgctggtgagagccctgctgctgctgctgctgctgctgggcctggccgccagaaccgtggccgccggcagagccagaggcctgcccgcccccaccgccgaggccgccttcggcctgggcgccgccgccgcccccaccagcgccaccagagtgcccgccgccggcgccgtggccgccgccgaggtgaccgtggaggacgccgaggccctgcccgccgccgccggcgagcaggagcccagaggccccgagcccgacgacgagaccgagctgagacccagaggcagaagcctggtgatcatcagcaccctggacggcagaatcgccgccctggaccccgagaaccacggcaagaagcagtgggacctggacgtgggcagcggcagcctggtgagcagcagcctgagcaagcccgaggtgttcggcaacaagatgatcatccccagcctggacggcgccctgttccagtgggaccaggacagagagagcatggagaccgtgcccttcaccgtggagagcctgctggagagcagctacaagttcggcgacgacgtggtgctggtgggcggcaagagcctgaccacctacggcctgagcgcctacagcggcaaggtgagatacatctgcagcgccctgggctgcagacagtgggacagcgacgagatggagcaggaggaggacatcctgctgctgcagagaacccagaagaccgtgagagccgtgggccccagaagcggcaacgagaagtggaacttcagcgtgggccacttcgagctgagatacatccccgacatggagaccagagccggcttcatcgagagcaccttcaagcccaacgagaacaccgaggagagcaagatcatcagcgacgtggaggagcaggaggccgccatcatggacatcgtgatcaaggtgagcgtggccgactggaaggtgatggccttcagcaagaagggcggccacctggagtgggagtaccagttctgcacccccatcgccagcgcctggctgctgaaggacggcaaggtgatccccatcagcctgttcgacgacaccagctacaccagcaacgacgacgtgctggaggacgaggaggacatcgtggaggccgccagaggcgccaccgagaacagcgtgtacctgggcatgtacagaggccagctgtacctgcagagcagcgtgagaatcagcgagaagttccccagcagccccaaggccctggagagcgtgaccaacgagaacgccatcatccccctgcccaccatcaagtggaagcccctgatccacagccccagcagaacccccgtgctggtgggcagcgacgagttcgacaagtgcctgagcaacgacaagttcagccacgaggagtacagcaacggcgccctgagcatcctgcagtacccctacgacaacggctactacctgccctactacaagagagagagaaacaagagaagcacccagatcaccgtgagattcctggacaacccccactacaacaagaacatcagaaagaaggaccccgtgctgctgctgcactggtggaaggagatcgtggccaccatcctgttctgcatcatcgccaccaccttcatcgtgagaagactgttccacccccacccccacagacagagaaaggagagcgagacccagtgccagaccgagaacaagtacgacagcgtgagcggcgaggccaacgacagcagctggaacgacatcaagaacagcggctacatcagcagatacctgaccgacttcgagcccatccagtgcctgggcagaggcggcttcggcgtggtgttcgaggccaagaacaaggtggacgactgcaactacgccatcaagagaatcagactgcccaacagagagctggccagagagaaggtgatgagagaggtgaaggccctggccaagctggagcaccccggcatcgtgagatacttcaacgcctggctggaggccccccccgagaagtggcaggagaagatggacgagatctggctgaaggacgagagcaccgactggcccctgagcagccccagccccatggacgcccccagcgtgaagatcagaagaatggaccccttcgccaccaaggagcacatcgagatcatcgcccccagcccccagagaagcagaagcttcagcgtgggcatcagctgcgaccagaccagcagcagcgagagccagttcagccccctggagttcagcggcatggaccacgaggacatcagcgagagcgtggacgccgcctacaacctgcaggacagctgcctgaccgactgcgacgtggaggacggcaccatggacggcaacgacgagggccacagcttcgagctgtgccccagcgaggccagcccctacgtgagaagcagagagagaaccagcagcagcatcgtgttcgaggacagcggctgcgacaacgccagcagcaaggaggagcccaagaccaacagactgcacatcggcaaccactgcgccaacaagctgaccgccttcaagcccaccagcagcaagagcagcagcgaggccaccctgagcatcagcccccccagacccaccaccctgagcctggacctgaccaagaacaccaccgagaagctgcagcccagcagccccaaggtgtacctgtacatccagatgcagctgtgcagaaaggagaacctgaaggactggatgaacggcagatgcaccatcgaggagagagagagaagcgtgtgcctgcacatcttcctgcagatcgccgaggccgtggagttcctgcacagcaagggcctgatgcacagagacctgaagcccagcaacatcttcttcaccatggacgacgtggtgaaggtgggcgacttcggcctggtgaccgccatggaccaggacgaggaggagcagaccgtgctgacccccatgcccgcctacgccagacacaccggccaggtgggcaccaagctgtacatgagccccgagcagatccacggcaacagctacagccacaaggtggacatcttcagcctgggcctgatcctgttcgagctgctgtaccccttcagcacccagatggagagagtgagaaccctgaccgacgtgagaaacctgaagttcccccccctgttcacccagaagtacccctgcgagtacgtgatggtgcaggacatgctgagccccagccccatggagagacccgaggccatcaacatcatcgagaacgccgtgttcgaggacctggacttccccggcaagaccgtgctgagacagagaagcagaagcctgagcagcagcggcaccaagcacagcagacagagcaacaacagccacagccccctgcccagcaactag

SEQ ID NO: 150117 - DNA, 2898 bp, Artificial Sequence
  derived and/or modified sequence
atgatcatccccagcctggacggcgccctgttccagtgggaccaggacagagagagcatggagaccgtgcccttcaccgtggagagcctgctggagagcagctacaagttcggcgacgacgtggtgctggtgggcggcaagagcctgaccacctacggcctgagcgcctacagcggcaaggtgagatacatctgcagcgccctgggctgcagacagtgggacagcgacgagatggagcaggaggaggacatcctgctgctgcagagaacccagaagaccgtgagagccgtgggccccagaagcggcaacgagaagtggaacttcagcgtgggccacttcgagctgagatacatccccgacatggagaccagagccggcttcatcgagagcaccttcaagcccaacgagaacaccgaggagagcaagatcatcagcgacgtggaggagcaggaggccgccatcatggacatcgtgatcaaggtgagcgtggccgactggaaggtgatggccttcagcaagaagggcggccacctggagtgggagtaccagttctgcacccccatcgccagcgcctggctgctgaaggacggcaaggtgatccccatcagcctgttcgacgacaccagctacaccagcaacgacgacgtgctggaggacgaggaggacatcgtggaggccgccagaggcgccaccgagaacagcgtgtacctgggcatgtacagaggccagctgtacctgcagagcagcgtgagaatcagcgagaagttccccagcagccccaaggccctggagagcgtgaccaacgagaacgccatcatccccctgcccaccatcaagtggaagcccctgatccacagccccagcagaacccccgtgctggtgggcagcgacgagttcgacaagtgcctgagcaacgacaagttcagccacgaggagtacagcaacggcgccctgagcatcctgcagtacccctacgacaacggctactacctgccctactacaagagagagagaaacaagagaagcacccagatcaccgtgagattcctggacaacccccactacaacaagaacatcagaaagaaggaccccgtgctgctgctgcactggtggaaggagatcgtggccaccatcctgttctgcatcatcgccaccaccttcatcgtgagaagactgttccacccccacccccacagacagagaaaggagagcgagacccagtgccagaccgagaacaagtacgacagcgtgagcggcgaggccaacgacagcagctggaacgacatcaagaacagcggctacatcagcagatacctgaccgacttcgagcccatccagtgcctgggcagaggcggcttcggcgtggtgttcgaggccaagaacaaggtggacgactgcaactacgccatcaagagaatcagactgcccaacagagagctggccagagagaaggtgatgagagaggtgaaggccctggccaagctggagcaccccggcatcgtgagatacttcaacgcctggctggaggccccccccgagaagtggcaggagaagatggacgagatctggctgaaggacgagagcaccgactggcccctgagcagccccagccccatggacgcccccagcgtgaagatcagaagaatggaccccttcgccaccaaggagcacatcgagatcatcgcccccagcccccagagaagcagaagcttcagcgtgggcatcagctgcgaccagaccagcagcagcgagagccagttcagccccctggagttcagcggcatggaccacgaggacatcagcgagagcgtggacgccgcctacaacctgcaggacagctgcctgaccgactgcgacgtggaggacggcaccatggacggcaacgacgagggccacagcttcgagctgtgccccagcgaggccagcccctacgtgagaagcagagagagaaccagcagcagcatcgtgttcgaggacagcggctgcgacaacgccagcagcaaggaggagcccaagaccaacagactgcacatcggcaaccactgcgccaacaagctgaccgccttcaagcccaccagcagcaagagcagcagcgaggccaccctgagcatcagcccccccagacccaccaccctgagcctggacctgaccaagaacaccaccgagaagctgcagcccagcagccccaaggtgtacctgtacatccagatgcagctgtgcagaaaggagaacctgaaggactggatgaacggcagatgcaccatcgaggagagagagagaagcgtgtgcctgcacatcttcctgcagatcgccgaggccgtggagttcctgcacagcaagggcctgatgcacagagacctgaagcccagcaacatcttcttcaccatggacgacgtggtgaaggtgggcgacttcggcctggtgaccgccatggaccaggacgaggaggagcagaccgtgctgacccccatgcccgcctacgccagacacaccggccaggtgggcaccaagctgtacatgagccccgagcagatccacggcaacagctacagccacaaggtggacatcttcagcctgggcctgatcctgttcgagctgctgtaccccttcagcacccagatggagagagtgagaaccctgaccgacgtgagaaacctgaagttcccccccctgttcacccagaagtacccctgcgagtacgtgatggtgcaggacatgctgagccccagccccatggagagacccgaggccatcaacatcatcgagaacgccgtgttcgaggacctggacttccccggcaagaccgtgctgagacagagaagcagaagcctgagcagcagcggcaccaagcacagcagacagagcaacaacagccacagccccctgcccagcaactag

SEQ ID NO: 150118 - protein, 288 aa, Artificial Sequence
  derived and/or modified sequence
MGEQPIFTTRAHVFQIDPNTKKNWMPASKQAVTVSYFYDVTRNSYRIISVDGAKVIINSTITPNMTFTKTSQKFGQWADSRANTVFGLGFSSEQQLTKFAEKFQEVKEAAKIAKDKTQEKIETSSNHSQASSVNGTDDEKASHAGPANTHLKSENDKLKIALTQSAANVKNEINREKEKNTQLKRRIEELEAELREKETELKDLRKQSEIIPQLMSECEYVSEKLEAAERDNQNLEDKVRSLKTDIEESKYRQRHLKVELKSFLEVLDGKIDDLHDFRRGLSKLGTDN

SEQ ID NO: 150119 - protein, 343 aa, Artificial Sequence
  derived and/or modified sequence
MGEQPIFTTRAHVFQIDPNTKKNWMPASKQAVTVSYFYDVTRNSYRIISVDGAKVIINSTITPNMTFTKTSQKFGQWADSRANTVFGLGFSSEQQLTKFAEKFQEVKEAAKIAKDKTQEKIETSSNHSQASSVNGTDDEKASHAGPANTHLKSENDKLKIALTQSAANVKKWEIELQTLRESNARLTTALQESAASVEQWKRQFSICRDENDRLRNKIDELEEQCSEINREKEKNTQLKRRIEELEAELREKETELKDLRKQSEIIPQLMSECEYVSEKLEAAERDNQNLEDKVRSLKTDIEESKYRQRHLKVELKSFLEVLDGKIDDLHDFRRGLSKLGTDN

SEQ ID NO: 150120 - DNA, 867 bp, Artificial Sequence
  derived and/or modified sequence
atgggcgagcagcccatttttacaactcgggcacacgtttttcaaatcgaccccaatactaaaaagaactggatgcctgccagtaaacaggcagtcacagtctcctatttctacgatgtaacacgcaatagctatagaattattagcgtagatggagccaaggttatcatcaattcgactattaccccaaacatgacttttacaaagacttcccagaaattcgggcagtgggccgattcacgtgcaaatacggtgttcggcctgggcttcagctctgagcagcaactgacgaagtttgcggaaaagttccaggaagtcaaggaggccgcaaagatagcaaaagataagacccaggaaaaaattgaaactagctccaaccacagccaggcatcctcggttaacggtaccgacgacgaaaaggcgtcccacgccggcccggccaacacgcacttgaagtcggagaatgacaaactaaagatcgctttgacccagtctgcagccaacgttaagaatgagattaacagagaaaaggaaaagaacacacagcttaaaagaagaattgaagagctagaagctgaattacgggagaaagaaaccgagctcaaagatctgcgaaagcaatcggaaatcatccctcagcttatgtctgaatgtgagtacgtgtcagagaaactagaggcagctgaacgggacaaccaaaaccttgaggataaggtgcggtcccttaaaaccgacattgaagaaagcaagtatcgccagaggcacctcaaagtggagctcaagtcatttcttgaggttctggacggaaagatcgacgacctacatgactttaggaggggactcagtaaactgggcaccgacaactag

SEQ ID NO: 150121 - DNA, 1032 bp, Artificial Sequence
  derived and/or modified sequence
atgggggagcagcctattttcaccacgcgcgcacatgtctttcagattgaccctaatacgaagaagaactggatgcctgcctctaaacaggctgttaccgttagttatttttatgacgttactcggaacagctataggatcatttctgttgacggagccaaggtcatcataaattctacaataacaccaaatatgacctttacaaaaacctctcaaaagttcggccagtgggccgattctcgggctaatacagttttcggcttaggattcagtagcgagcagcagctcactaagtttgcagaaaaattccaagaggtaaaggaagccgccaaaattgccaaagataagacccaggagaagattgaaacctcgtcgaaccactcccaggcgagcagtgttaacggcactgacgatgaaaaggcctcccatgctggccccgccaatacccacctgaaaagtgagaatgacaagctgaaaattgcattaacccaatccgctgccaacgtcaagaaatgggagatcgagttacagactctgcgcgaatccaatgctcggcttaccaccgccctgcaggagagcgccgcctccgtggaacagtggaaacggcagttcagcatctgcagggacgagaacgaccgactaagaaataaaatagatgaactggaagaacagtgtagcgaaatcaaccgcgagaaggagaagaatacacagcttaagaggaggattgaggaactggaagccgaactccgggagaaagaaacagagctgaaggacctaagaaagcagtcagagatcatccctcagctgatgagcgagtgtgagtacgtgagtgagaagctggaggcggctgaacgagataatcagaatctcgaagacaaggtccgatctctaaagacagatattgaagagagtaagtataggcagcgtcatcttaaagtggaactgaagagcttccttgaagtattggacggcaagatcgacgacctgcacgatttccgccgaggcctctctaaattgggaactgataactag

SEQ ID NO: 150122 - DNA, 1782 bp, Artificial Sequence
  derived and/or modified sequence
cgcgcctggcggcggtggcggcagtggcagcagtggcagccgcgcagccccgcggaatggagcggcgccggggctgagccgggcgcgcacgggccgccgcatgtgccgcgcggggagcggctgccgagcgggcggagagcgagcgcgagaggccccgtcggagcggccgccggagcagcgccggagatgggagaacagcccatcttcaccacccgagcgcatgtcttccagattgaccccaacaccaagaagaactggatgcctgcgagcaagcaggcggtcaccgtttcctacttctatgatgtcacaaggaacagctatcggatcatcagtgtggacggagccaaggtgatcataaacagcacaatcacaccgaatatgaccttcaccaaaacgtcacagaagtttgggcagtgggccgacagcagagccaacacagtgtttggtttggggttttcctctgagcagcagctgacaaagtttgcagagaaattccaggaggtgaaagaagctgccaagatagccaaagacaagacgcaggagaaaatcgagacctcaagtaatcattcccaagcatccagtgtcaacgggacggacgatgaaaaggcctctcacgccggtccagccaacacacacctgaagtctgagaatgacaagctgaagattgccttgacgcagagcgcagccaacgtgaagaatgagatcaacagagagaaggagaagaacacgcagctgaagaggaggatcgaggagctggaggcagagctccgagaaaaggagacagagctgaaagatctccgaaaacaaagtgaaatcatacctcagctcatgtcagagtgcgaatatgtctctgagaagctagaggcggcagagagagacaatcaaaacctggaagacaaagtgcgttccttaaagacagacattgaggagagcaaataccgacagcgccacctgaaggtggagttgaagagcttcctggaggtgctggacgggaagattgacgacctgcatgacttccgccgagggctctccaagctgggcaccgataactagggctggccgaggcccaggccccgcccgtgagtcccaagcgtgtgtgcgagaccagatagctctaggacgttcttctgtgtgcattgcttctgtaaatgcaggcgcagtttgtcgtgtttccaaaccagttgtgccgtccactcactccttttcagaatagaaatctcctctcgcttctctggccttgtgaggttgtggacaactggaagattctgactcaggaatccagaactaggtctaccttcaacatttatgcagtcagggcagggatgtttatatctttcataagggctgttgcaaccatatgaactgaaaaaacacgcattttgtaatccaaatattgatattctttacaccaagccatcaggctccttttatcaaatagcattcagagtatttgaatgtccaccagacaccagccccggggggcacagagagaacaacattcctctctgtcaacatcgagaggctttaaaacaactgtttagtggaaactttctgagagatggaaaacaagcttctggtgggtgcattttctggcccggagttgcctgcatccacgctactgccccctgccccccgcccccccagtttgtacggttgcaacagtgttccttttcttggttttaatttctgagcagatgattgtgctgtgggaacagcacacagtgagggtgcctagcacaatgtctggcacaaagtaggtgcttaataaatatttgttcaatt

SEQ ID NO: 150123 - DNA, 1950 bp, Artificial Sequence
  derived and/or modified sequence
cgcgcctggcggcggtggcggcagtggcagcagtggcagccgcgcagccccgcggaatggagcggcgccggggctgagccgggcgcgcacgggccgccgcatgtgccgcgcggggagcggctgccgagcgggcggagagcgagcgcgagaggccccgtcggagcggccgccggagcagcgccggagatgggagaacagcccatcttcaccacccgagcgcatgtcttccagattgaccccaacaccaagaagaactggatgcctgcgagcaagcaggcggtcaccgtttcctacttctatgatgtcacaaggaacagctatcggatcatcagtgtggacggagccaaggtgatcataaacagcacaatcacaccgaatatgaccttcaccaaaacgtcacagaagtttgggcagtgggccgacagcagagccaacacagtgtttggtttggggttttcctctgagcagcagctgacaaagtttgcagagaaattccaggaggtgaaagaagctgccaagatagccaaagacaagacgcaggagaaaatcgagacctcaagtaatcattcccaagcatccagtgtcaacgggacggacgatgaaaaggcctctcacgccggtccagccaacacacacctgaagtctgagaatgacaagctgaagattgccttgacgcagagcgcagccaacgtgaagaagtgggagatcgagctgcagacccttcgggagagcaatgcacggctgaccacagcactgcaggagtcggcagccagtgtggagcagtggaagaggcagttctccatctgccgtgatgagaatgaccggctccgcaacaagattgatgagctggaagaacaatgcagtgagatcaacagagagaaggagaagaacacgcagctgaagaggaggatcgaggagctggaggcagagctccgagaaaaggagacagagctgaaagatctccgaaaacaaagtgaaatcatacctcagctcatgtcagagtgcgaatatgtctctgagaagctagaggcggcagagagagacaatcaaaacctggaagacaaagtgcgttccttaaagacagacattgaggagagcaaataccgacagcgccacctgaaggtggagttgaagagcttcctggaggtgctggacgggaagattgacgacctgcatgacttccgccgagggctctccaagctgggcaccgataactagggctggccgaggcccaggccccgcccgtgagtcccaagcgtgtgtgcgagaccagatagctctaggacgttcttctgtgtgcattgcttctgtaaatgcaggcgcagtttgtcgtgtttccaaaccagttgtgccgtccactcactccttttcagaatagaaatctcctctcgcttctctggccttgtgaggttgtggacaactggaagattctgactcaggaatccagaactaggtctaccttcaacatttatgcagtcagggcagggatgtttatatctttcataagggctgttgcaaccatatgaactgaaaaaacacgcattttgtaatccaaatattgatattctttacaccaagccatcaggctccttttatcaaatagcattcagagtatttgaatgtccaccagacaccagccccggggggcacagagagaacaacattcctctctgtcaacatcgagaggctttaaaacaactgtttagtggaaactttctgagagatggaaaacaagcttctggtgggtgcattttctggcccggagttgcctgcatccacgctactgccccctgccccccgcccccccagtttgtacggttgcaacagtgttccttttcttggttttaatttctgagcagatgattgtgctgtgggaacagcacacagtgagggtgcctagcacaatgtctggcacaaagtaggtgcttaataaatatttgttcaattaaa

SEQ ID NO: 150124 - DNA, 867 bp, Artificial Sequence
  derived and/or modified sequence
atgggagagcagcccatcttcaccacccgggcccacgtgttccagattgaccccaacaccaagaagaactggatgcctgccagcaagcaggccgtgacagtgtcctacttctatgatgtgaccaggaacagctaccgcatcatctctgtggatggagccaaggtgatcatcaacagcaccatcacccccaacatgaccttcaccaagaccagccagaagtttggccagtgggccgacagccgggccaacacagtgtttggcctgggcttcagcagcgagcagcagctgaccaagtttgctgagaagttccaggaggtgaaggaggccgccaagatcgccaaggacaagacccaggagaagattgagaccagcagcaaccacagccaggccagctctgtgaatggaacagatgatgagaaggccagccacgccggccctgccaacacccacctgaagtcagaaaatgacaagctgaagatcgccctgacccagagcgctgccaacgtgaagaatgagatcaaccgggagaaggagaagaacacccagctgaagagaagaattgaggagctggaggccgagctgcgggagaaggagacagagctgaaggacctgaggaagcagagcgagatcatcccccagctgatgtctgaatgtgaatatgtgtctgagaagctggaggccgctgagcgggacaaccagaacctggaggacaaggtgcgcagcctgaagacagacatcgaggagagcaagtaccggcagaggcacctgaaggtggagctgaagagcttcctggaggtgctggatggcaagattgatgacctgcatgacttccggcggggcctgagcaagctgggcacagacaactag

SEQ ID NO: 150125 - DNA, 1032 bp, Artificial Sequence
  derived and/or modified sequence
atgggagagcagcccatcttcaccacccgggcccacgtgttccagattgaccccaacaccaagaagaactggatgcctgccagcaagcaggccgtgacagtgtcctacttctatgatgtgaccaggaacagctaccgcatcatctctgtggatggagccaaggtgatcatcaacagcaccatcacccccaacatgaccttcaccaagaccagccagaagtttggccagtgggccgacagccgggccaacacagtgtttggcctgggcttcagcagcgagcagcagctgaccaagtttgctgagaagttccaggaggtgaaggaggccgccaagatcgccaaggacaagacccaggagaagattgagaccagcagcaaccacagccaggccagctctgtgaatggaacagatgatgagaaggccagccacgccggccctgccaacacccacctgaagtcagaaaatgacaagctgaagatcgccctgacccagagcgctgccaacgtgaagaagtgggagattgagctgcagaccctgcgggagagcaatgcccggctgaccacagccctgcaggagagcgctgcctctgtggagcagtggaagaggcagttcagcatctgcagagatgaaaatgaccggctgaggaacaagattgatgagctggaggagcagtgcagcgagatcaaccgggagaaggagaagaacacccagctgaagaggcgcatcgaggagctggaggccgagctgcgggagaaggagacagagctgaaggacctgaggaagcagagcgagatcatcccccagctgatgtctgaatgtgaatatgtgtctgagaagctggaggccgctgagcgggacaaccagaacctggaggacaaggtgcgcagcctgaagacagacatcgaggagagcaagtaccggcagaggcacctgaaggtggagctgaagagcttcctggaggtgctggatggcaagattgatgacctgcatgacttcagaagaggcctgagcaagctgggcacagacaactag

SEQ ID NO: 150126 - DNA, 867 bp, Artificial Sequence
  derived and/or modified sequence
atgggcgagcagcccatcttcaccacccgggcccacgtgttccagattgaccctaatactaaaaaaaactggatgccagcatcaaagcaggctgttaccgtctcctacttttatgatgttacccggaattcctaccgtatcatttctgtggacggggccaaagtcattattaactcaacgattacgcctaacatgaccttcaccaaaacaagccagaaattcgggcaatgggctgattcccgcgccaacaccgtctttggcctcggattttctagtgagcagcagctaaccaagttcgcagaaaagttccaggaggttaaggaggcggcgaagattgctaaggataagactcaggaaaagatcgagacttcaagcaatcattcacaagcgtcaagcgtgaacggtaccgatgacgaaaaagcctcccacgcaggcccagcgaacacccatcttaagagcgagaatgataagctcaagatcgctctgactcagtccgccgccaacgttaagaacgagatcaaccgggaaaaggagaagaacacacagctcaaaaggcgcatcgaggaactggaggccgagctgcgagagaaggagacggaattgaaggatctgcgaaagcagtccgaaatcataccccagttgatgagcgagtgtgagtacgtgagcgaaaagcttgaggcagccgagcgcgacaaccagaatttggaagataaggtgcggtcattaaaaaccgacattgaggagagcaagtacaggcagagacacctgaaagtggagttgaagagcttccttgaagtcctcgatggaaaaattgatgacttgcatgatttccgaagagggttgtctaagttgggaacagacaactag

SEQ ID NO: 150127 - DNA, 1032 bp, Artificial Sequence
  derived and/or modified sequence
atgggcgagcagcccatcttcaccacccgggcccacgtgttccagattgatcctaataccaagaaaaactggatgccagcgtccaagcaagccgtgactgtgagctacttctatgatgtaacaagaaactcttacagaattatctccgttgacggggctaaagtgatcattaactctactatcaccccaaatatgacttttacaaagacatctcaaaagttcggtcagtgggcagattctagagccaacacagtctttggattggggttcagtagcgagcagcaactcactaagttcgcagagaagtttcaggaagtgaaagaagcagcgaaaattgcaaaagataagacacaggagaaaatagagacgagctccaaccacagtcaggcgtcatctgtaaacggaaccgacgacgagaaggcttctcatgccgggcccgccaacactcatctgaaaagcgaaaatgacaagttaaagattgcattgacccaatccgccgctaacgtgaagaagtgggagattgaattgcagactttacgggagagtaatgcccgcctgacaacagcgctgcaggagtctgctgcaagtgtggagcagtggaaaagacagttttcaatctgccgggatgagaacgataggcttcggaataagattgatgaactggaggagcagtgctctgagatcaacagggagaaggaaaagaatacacagttgaagagacgaatcgaggaacttgaggctgagttacgtgaaaaagagacagaactgaaggacctgaggaagcaaagcgaaattattccacaactgatgtcggagtgcgagtacgttagcgagaaacttgaggctgctgagcgtgataatcagaacctcgaagataaggtgagatccctgaagaccgacatcgaggagtcgaagtaccgccagcgccatctcaaggtcgaactcaaaagcttcctcgaggttcttgacggtaagatcgatgacctgcacgatttcagacggggattgagtaagctaggcaccgataactag

SEQ ID NO: 150128 - DNA, 867 bp, Artificial Sequence
  derived and/or modified sequence
atgggcgaacagcccatctttactactcgagcccatgttttccagatcgatccgaacaccaagaagaactggatgcccgctagcaagcaggctgtgacagtctcttacttctacgacgtcacacgtaatagctacaggataatttcagtggatggcgctaaagtgatcatcaacagcactatcactccgaatatgacctttaccaagactagccagaagttcgggcagtgggcagactctcgggcaaatacggtgttcggtctgggcttctccagcgagcagcaactcacgaagtttgctgaaaaattccaggaggtgaaagaggcggcaaagatagctaaagataagacacaggagaagatcgagacctcttcaaatcatagccaggcttcctcagtaaatggcacggatgacgagaaagcttcccatgccggtcctgctaacacccacctcaagtccgaaaatgataaattgaaaatcgccctaacacaatcagctgccaacgtgaagaacgagattaatcgggaaaaagaaaaaaatacacaattaaaacgcaggattgaggagctggaagcagagttacgggagaaagagacagagctcaaagacctgcgaaaacagtctgagatcattccacagttgatgagcgaatgtgaatacgttagtgaaaagctcgaagcagccgagcgcgacaatcagaatttagaagataaggttaggagtcttaaaaccgacatcgaagagtccaaataccggcaacgccatttaaaagtggaactcaaatccttcttagaggttttggatggcaaaatagatgatttacacgacttcaggcggggtttatcaaagttaggcaccgacaattag

SEQ ID NO: 150129 - DNA, 1032 bp, Artificial Sequence
  derived and/or modified sequence
atgggggagcagcctatattcacgacacgcgctcacgtgttccaaatcgatcctaatacaaaaaaaaattggatgcctgcttccaagcaggctgtgactgtctcttacttttatgatgtcacacgaaactcatataggatcatcagcgttgatggtgccaaggtgatcatcaattccacgattacccctaacatgacattcaccaaaacatcgcagaagttcggacaatgggctgattcgagagctaacacagtttttgggctgggcttcagctctgaacagcagcttaccaagttcgccgagaagtttcaggaggtgaaggaggccgcaaaaattgccaaggacaaaactcaggaaaaaattgaaacgtcttctaaccacagccaggcctctagcgttaatggcaccgacgatgaaaaagcctcacacgcgggaccggcaaacacacatctgaagagtgagaacgacaagctgaaaattgccctgacccagagcgccgctaatgtcaaaaagtgggaaatcgagcttcagaccctgagggagtccaatgccagactcacaacagccttgcaggaaagtgccgcttcagtggaacagtggaaaaggcagttttcaatctgcagggacgaaaacgatcgcctgagaaacaagatcgacgagctggaagagcaatgcagcgagatcaatcgcgaaaaagagaagaatacccagttgaaacggaggatcgaagaactggaggccgagctcagggagaaagagacagaacttaaggatctgagaaaacagtcagagattattccacaactaatgtccgagtgcgagtatgtctccgagaagttggaagcagccgaacgagataaccagaaccttgaagacaaggtgcgttctctcaagacagacattgaggagtccaaataccggcaaaggcatctaaaagtggagctcaaaagcttcttagaggtgctggacggtaagatcgatgaccttcacgactttcgcagaggcctgtccaagctgggaacagataactag

SEQ ID NO: 150130 - DNA, 867 bp, Artificial Sequence
  derived and/or modified sequence
atgggcgagcagcccatcttcaccaccagagcccacgtgttccagatcgaccccaacaccaagaagaactggatgcccgccagcaagcaggccgtgaccgtgagctacttctacgacgtgaccagaaacagctacagaatcatcagcgtggacggcgccaaggtgatcatcaacagcaccatcacccccaacatgaccttcaccaagaccagccagaagttcggccagtgggccgacagcagagccaacaccgtgttcggcctgggcttcagcagcgagcagcagctgaccaagttcgccgagaagttccaggaggtgaaggaggccgccaagatcgccaaggacaagacccaggagaagatcgagaccagcagcaaccacagccaggccagcagcgtgaacggcaccgacgacgagaaggccagccacgccggccccgccaacacccacctgaagagcgagaacgacaagctgaagatcgccctgacccagagcgccgccaacgtgaagaacgagatcaacagagagaaggagaagaacacccagctgaagagaagaatcgaggagctggaggccgagctgagagagaaggagaccgagctgaaggacctgagaaagcagagcgagatcatcccccagctgatgagcgagtgcgagtacgtgagcgagaagctggaggccgccgagagagacaaccagaacctggaggacaaggtgagaagcctgaagaccgacatcgaggagagcaagtacagacagagacacctgaaggtggagctgaagagcttcctggaggtgctggacggcaagatcgacgacctgcacgacttcagaagaggcctgagcaagctgggcaccgacaactag

SEQ ID NO: 150131 - DNA, 1032 bp, Artificial Sequence
  derived and/or modified sequence
atgggcgagcagcccatcttcaccaccagagcccacgtgttccagatcgaccccaacaccaagaagaactggatgcccgccagcaagcaggccgtgaccgtgagctacttctacgacgtgaccagaaacagctacagaatcatcagcgtggacggcgccaaggtgatcatcaacagcaccatcacccccaacatgaccttcaccaagaccagccagaagttcggccagtgggccgacagcagagccaacaccgtgttcggcctgggcttcagcagcgagcagcagctgaccaagttcgccgagaagttccaggaggtgaaggaggccgccaagatcgccaaggacaagacccaggagaagatcgagaccagcagcaaccacagccaggccagcagcgtgaacggcaccgacgacgagaaggccagccacgccggccccgccaacacccacctgaagagcgagaacgacaagctgaagatcgccctgacccagagcgccgccaacgtgaagaagtgggagatcgagctgcagaccctgagagagagcaacgccagactgaccaccgccctgcaggagagcgccgccagcgtggagcagtggaagagacagttcagcatctgcagagacgagaacgacagactgagaaacaagatcgacgagctggaggagcagtgcagcgagatcaacagagagaaggagaagaacacccagctgaagagaagaatcgaggagctggaggccgagctgagagagaaggagaccgagctgaaggacctgagaaagcagagcgagatcatcccccagctgatgagcgagtgcgagtacgtgagcgagaagctggaggccgccgagagagacaaccagaacctggaggacaaggtgagaagcctgaagaccgacatcgaggagagcaagtacagacagagacacctgaaggtggagctgaagagcttcctggaggtgctggacggcaagatcgacgacctgcacgacttcagaagaggcctgagcaagctgggcaccgacaactag

SEQ ID NO: 150132 - protein, 776 aa, Artificial Sequence
  derived and/or modified sequence
MNPEEQIVTWLISLGVLESPKKTICDPEEFLKSSLKNGVVLCKLINRLMPGSVEKFCLDPQTEADCINNINDFLKGCATLQVEIFDPDDLYSGVNFSKVLSTLLAVNKATEDQLSERPCGRSSSLSAANTSQTNPQGAVSSTVSGLQRQSKTVEMTENGSHQLIVKARFNFKQTNEDELSVCKGDIIYVTRVEEGGWWEGTLNGRTGWFPSNYVREIKSSERPLSPKAVKGFETAPLTKNYYTVVLQNILDTEKEYAKELQSLLVTYLRPLQSNNNLSTVEVTSLLGNFEEVCTFQQTLCQALEECSKFPENQHKVGGCLLSLMPHFKSMYLAYCANHPSAVNVLTQHSDELEQFMENQGASSPGILILTTNLSKPFMRLEKYVTLLQELERHMEDTHPDHQDILKAIVAFKTLMGQCQDLRKRKQLELQILSEPIQAWEGEDIKNLGNVIFMSQVMVQYGACEEKEERYLMLFSNVLIMLSASPRMSGFIYQGKIPIAGTVVTRLDEIEGNDCTFEITGNTVERIVVHCNNNQDFQEWLEQLNRLIRGPASCSSLSKTSSSSCSAHSSFSSTGQPRGPLEPPQIIKPWSLSCLRPAPPLRPSAALGYKERMSYILKESSKSPKTMKKFLHKRKTERKPSEEEYVIRKSTAALEEDAQILKVIEAYCTSANFQQGHGSSTRKDSIPQVLLPEEEKLIIEETRSNGQTIMEEKSLVDTVYALKDEVRELKQENKRMKQCLEEELKSRRDLEKLVRRLLKQTDECIRGESSSKTSILP

SEQ ID NO: 150133 - protein, 622 aa, Artificial Sequence
  derived and/or modified sequence
MTENGSHQLIVKARFNFKQTNEDELSVCKGDIIYVTRVEEGGWWEGTLNGRTGWFPSNYVREIKSSERPLSPKAVKGFETAPLTKNYYTVVLQNILDTEKEYAKELQSLLVTYLRPLQSNNNLSTVEVTSLLGNFEEVCTFQQTLCQALEECSKFPENQHKVGGCLLSLMPHFKSMYLAYCANHPSAVNVLTQHSDELEQFMENQGASSPGILILTTNLSKPFMRLEKYVTLLQELERHMEDTHPDHQDILKAIVAFKTLMGQCQDLRKRKQLELQILSEPIQAWEGEDIKNLGNVIFMSQVMVQYGACEEKEERYLMLFSNVLIMLSASPRMSGFIYQGKIPIAGTVVTRLDEIEGNDCTFEITGNTVERIVVHCNNNQDFQEWLEQLNRLIRGPASCSSLSKTSSSSCSAHSSFSSTGQPRGPLEPPQIIKPWSLSCLRPAPPLRPSAALGYKERMSYILKESSKSPKTMKKFLHKRKTERKPSEEEYVIRKSTAALEEDAQILKVIEAYCTSANFQQGHGSSTRKDSIPQVLLPEEEKLIIEETRSNGQTIMEEKSLVDTVYALKDEVRELKQENKRMKQCLEEELKSRRDLEKLVRRLLKQTDECIRGESSSKTSILP

SEQ ID NO: 150134 - protein, 622 aa, Artificial Sequence
  derived and/or modified sequence
MTENGSHQLIVKARFNFKQTNEDELSVCKGDIIYVTRVEEGGWWEGTLNGRTGWFPSNYVREIKSSERPLSPKAVKGFETAPLTKNYYTVVLQNILDTEKEYAKELQSLLVTYLRPLQSNNNLSTVEVTSLLGNFEEVCTFQQTLCQALEECSKFPENQHKVGGCLLSLMPHFKSMYLAYCANHPSAVNVLTQHSDELEQFMENQGASSPGILILTTNLSKPFMRLEKYVTLLQELERHMEDTHPDHQDILKAIVAFKTLMGQCQDLRKRKQLELQILSEPIQAWEGEDIKNLGNVIFMSQVMVQYGACEEKEERYLMLFSNVLIMLSASPRMSGFIYQGKIPIAGTVVTRLDEIEGNDCTFEITGNTVERIVVHCNNNQDFQEWLEQLNRLIRGPASCSSLSKTSSSSCSAHSSFSSTGQPRGPLEPPQIIKPWSLSCLRPAPPLRPSAALGYKEAFTFVFEESSKSPKTMKKFLHKRKTERKPSEEEYVIRKSTAALEEDAQILKVIEAYCTSANFQQGHGSSTRKDSIPQVLLPEEEKLIIEETRSNGQTIMEEKSLVDTVYALKDEVRELKQENKRMKQCLEEELKSRRDLEKLVRRLLKQTDECIRGESSSKTSILP

SEQ ID NO: 150135 - DNA, 2331 bp, Artificial Sequence
  derived and/or modified sequence
atgaatccagaggagcagatcgtcacttggctgatatccctgggtgtgctggagagtccaaagaaaaccatctgtgatcccgaagagtttctgaagagtagcttgaagaatggcgtggtcctctgcaaacttattaaccgcctaatgccaggctccgtggaaaagttctgtctggacccccagacagaagccgactgcatcaataacatcaacgactttctaaaggggtgcgctactctgcaggtggagatttttgaccccgacgatctctatagcggcgtcaatttttccaaggtgctctctactctgctggccgtgaacaaggcaaccgaggaccagctgagcgagcggccgtgtggcagatcctcatccctgtccgccgcgaacacatcccagaccaacccccaaggggccgtgtcttccaccgtgagcggcctgcagcgacagagcaaaaccgtggagatgactgagaacggctctcaccaactcattgtgaaagcccggttcaatttcaagcagacgaacgaggatgaactgtcggtttgcaagggcgacatcatttacgttaccagggtggaggaaggcggttggtgggagggaaccctcaacgggagaactggctggtttccaagcaattatgtgagagaaatcaaaagtagcgagagacctttgagcccgaaggccgtcaagggatttgagacagctcctttaaccaagaactattataccgtagtgttgcagaacattctcgacaccgaaaaggagtacgccaaggagctgcagagcctccttgtgacctacctccgaccattgcagtccaacaacaatttatccaccgtcgaagtgaccagcctgctgggcaattttgaggaggtgtgcacgttccaacagaccctgtgccaggcactggaggagtgtagcaagtttcctgaaaatcaacacaaggtggggggctgcttgctttcactgatgccccactttaagagcatgtacttggcctactgcgccaaccatccaagtgctgtgaatgttctgacacaacacagtgatgaactggagcaattcatggaaaaccaaggagcgtcctcccccggtatcttgatcctgactactaacctctctaaaccatttatgcggctggagaagtatgtcactttactccaggagttggagcgccatatggaagatacgcatcccgaccatcaagatatattgaaagctatcgtagccttcaagaccctaatgggacagtgccaggatcttcggaagcgaaagcagctggagctgcagatcctgtcagagccaattcaggcttgggagggagaggatattaagaatctgggcaatgttatttttatgagtcaggtgatggttcagtacggcgcgtgcgaagaaaaagaggagcgttatctgatgctgttttccaacgtcctgattatgcttagtgcctcacctaggatgagtgggttcatttatcaaggcaagataccaattgctgggactgtcgttactcgactcgatgagatcgagggcaatgattgtacgtttgaaatcaccggcaataccgtggagagaatcgttgtccattgtaacaacaaccaggatttccaggaatggttagagcaactaaataggctgatacgaggcccagcttcttgcagttctctgtcaaaaacatcgtcttctagctgtagtgcgcattctagcttcagctcgactggtcagcctcggggccctctcgagccccctcagataattaagccttggtccctatcttgtctccggcctgccccccccctccggcctagtgctgcactgggatacaaggaacggatgagctacattctgaaagagagtagcaagtcgcctaagactatgaagaagtttctgcacaagagaaagaccgagagaaaaccttccgaggaagaatacgtgattcgcaaaagtacagcagcacttgaagaggacgcccagatcctcaaagtcatcgaggcttattgtaccagcgcaaattttcaacaaggtcacggctcgagtactcgcaaagactcaatccctcaggtgctcctaccagaagaggagaagctgattattgaggaaacccggagcaatggacagaccatcatggaagaaaaaagtctggttgataccgtatatgccttgaaagatgaggtacgtgaacttaaacaggagaataagaggatgaagcaatgtctcgaagaagaactcaagtctcggagggatctcgagaaattagttcgacgacttttgaagcaaaccgacgagtgcataagaggcgagagctccagtaagactagcatcctgccgtag

SEQ ID NO: 150136 - DNA, 2331 bp, Artificial Sequence
  derived and/or modified sequence
atgaaccctgaggagcagatcgtgacctggctgatcagcctgggcgtgctggagagccccaagaagaccatctgtgaccctgaggagttcctgaagagcagcctgaagaatggagtggtgctgtgcaagctgatcaaccggctgatgcctggctctgtggagaagttctgcctggacccccagacagaggccgactgcatcaacaacatcaatgacttcctgaagggctgtgccaccctgcaggtggagatctttgatcctgatgacctgtacagcggcgtgaacttcagcaaggtgctgagcaccctgctggccgtgaacaaggccacagaggaccagctgtctgagcggccctgtggccgcagcagcagcctgtctgctgccaacaccagccagaccaacccccagggcgctgtgagcagcacagtgtctggcctgcagaggcagagcaagacagtggagatgacagaaaatggcagccaccagctgattgtgaaggcccgcttcaacttcaagcagaccaatgaagatgagctgtctgtgtgcaagggggacatcatctacgtgaccagggtggaggagggcggctggtgggagggcaccctgaatggaagaacaggctggttccccagcaactacgtgcgggagatcaagagcagcgagcggcccctgagccccaaggctgtgaagggctttgaaacagcccccctgaccaagaactactacacagtggtgctgcagaacatcctggacacagagaaggagtatgccaaggagctgcagagcctgctggtgacctacctgcggcccctgcagagcaacaacaacctgagcacagtggaggtgaccagcctgctgggcaactttgaggaggtgtgcaccttccagcagaccctgtgccaggccctggaggagtgcagcaagtttcctgagaaccagcacaaggtgggcggctgcctgctgagcctgatgccccacttcaagtccatgtacctggcctactgtgccaaccaccccagcgctgtgaatgtgctgacccagcacagtgatgagctggagcagttcatggagaaccagggcgccagcagccctggcatcctgatcctgaccaccaacctgagcaagcccttcatgaggctggagaagtatgtgaccctgctgcaggagctggagcggcacatggaggacacccacccagaccaccaggacatcctgaaggccatcgtggccttcaagaccctgatgggccagtgccaggacctgaggaagaggaagcagctggagctgcagatcctgtctgagcccatccaggcctgggagggggaggacatcaagaacctgggcaatgtcatcttcatgagccaggtgatggtgcagtacggggcctgtgaggagaaggaggagcgctacctgatgctgttcagcaatgtgctgatcatgctgagcgccagccccaggatgagcggcttcatctaccagggcaagatccccatcgccggcaccgtggtgacccggctggatgaaattgagggcaatgactgcacctttgagatcactggaaacacagtggagcgcatcgtggtgcactgcaacaacaaccaggacttccaggagtggctggagcagctgaacagactcatccggggccctgccagctgcagcagcctgagcaagaccagcagcagcagctgcagcgcccacagcagcttcagcagcacaggccagccccggggccccctggagcccccccagatcatcaagccctggagcctgagctgcctgcggcctgccccacccctgcggcccagcgctgccctgggctacaaggagaggatgagctacatcctgaaggagagcagcaagagccccaagaccatgaagaagttcctgcacaagaggaagacagagaggaagcccagcgaggaggagtatgtgatcaggaagagcacagctgccctggaggaggatgcccagatcctgaaggtgattgaggcctactgcaccagcgccaacttccagcagggccacggcagcagcaccaggaaggacagcatcccccaggtgctgctgcctgaggaggagaagctgatcatcgaggagaccaggagcaatggccagaccatcatggaggagaagagcctggtggacacagtgtatgccctgaaggatgaggtgcgggagctgaagcaggagaacaagaggatgaagcagtgcctggaggaggagctgaagagccggcgggacctggagaagctggtgcggcggctgctgaagcagacagatgagtgcatccggggggagagcagcagcaagaccagcatcctgccctag

SEQ ID NO: 150137 - DNA, 2331 bp, Artificial Sequence
  derived and/or modified sequence
atgaaccccgaggagcagatcgtgacctggctgatcagcctgggcgttctcgagagccccaagaagactatttgcgatcccgaagagtttctcaagtcctctctgaaaaatggtgtcgtcctgtgcaaactgataaatcgcctgatgcctggctccgttgagaagttctgcttagaccctcagacggaggccgactgtatcaacaacataaacgattttctcaaaggttgcgccacactgcaagtagagattttcgatccagacgacctgtatagcggtgttaacttcagtaaggtgctaagtacattactcgcggtgaacaaggccaccgaggatcagctgtccgagaggccctgcggacgctcgtcttccctgagcgctgctaacactagccagaccaacccccagggagctgtgtcttccaccgtctccgggcttcagaggcagagcaagaccgttgaaatgaccgagaacggctctcaccagctcatcgtcaaagcaaggttcaacttcaagcaaactaacgaggacgagcttagcgtgtgtaagggagacatcatctatgtaacccgagtggaggaagggggctggtgggagggtacgttaaatgggaggacgggttggttcccaagcaattacgtgagagagataaagtccagcgagcgtcccctgtctcccaaggcagtcaaagggtttgagacagctccactcacaaagaactactatacagtggtgctccagaacattctggacactgaaaaggagtatgcaaaggaattacaatcattactagtgacgtacttgcggccattgcagtccaataacaatctgtcaaccgtggaagtgacctctctcctggggaatttcgaggaagtttgcacctttcagcaaacactgtgccaggcattggaagagtgctcgaaatttcccgaaaatcagcacaaagtgggcggatgtcttctgtcgctcatgcctcacttcaagtctatgtatctcgcatactgtgccaatcatccctctgctgtgaacgttctgactcagcacagcgatgagctggagcagtttatggaaaaccaaggcgcctcctcccctggcatcctgattctgaccaccaatctctcaaagccctttatgagactggagaaatacgttaccttgctccaggagttggaacgccatatggaagatacacaccccgaccatcaggatatactgaaagctatagtggcatttaagacgctaatgggtcaatgccaggacctgcggaagaggaagcagttggagctgcagattttaagcgagccaatccaagcgtgggagggtgaagatatcaaaaaccttggcaacgtgatcttcatgagtcaagtcatggtccaatacggtgcatgtgaggaaaaagaggagcggtacctgatgttatttagcaatgtgttgatcatgctgtccgccagtccaaggatgagcgggttcatttaccagggcaaaattccaatcgccggcactgttgtgacacgcttggacgaaatcgagggtaacgattgtacattcgagattaccggcaacaccgtggagcgcatcgtcgtccactgcaacaacaaccaggatttccaggagtggttagagcaactcaaccggctgatcagaggcccggctagctgctcttcgttaagtaagacaagtagcagtagctgttccgcccacagctctttctctagcaccggacaacctcggggcccactggaaccacctcaaatcatcaagccatggtccctgagctgtctgaggcctgctcccccactgaggccgtcagcagctttgggctataaggaacgcatgtcctacatcctaaaagagtcaagcaagtcccccaaaacaatgaagaaattcctccacaagagaaaaacggaacgtaagccctctgaggaagaatacgtgattaggaaaagcaccgccgccttggaggaggacgcccagatactgaaagtaatagaggcttactgtacctccgccaattttcagcagggccatgggagttcaacaaggaaagatagcatcccacaagtgcttctgccagaggaggagaagctgataattgaggagacccggtccaatggccagacgatcatggaggaaaagtccctggtagatacagtttatgctttgaaagacgaggtgagagagctgaagcaggaaaacaagagaatgaagcaatgcctggaggaagaactgaaaagtaggcgggatctggagaaactcgtacgccgcctgctaaagcaaacagatgagtgtatcaggggggagagctcctctaagacttccatcctcccctag

SEQ ID NO: 150138 - DNA, 2331 bp, Artificial Sequence
  derived and/or modified sequence
atgaaccctgaggagcagattgtgacgtggctcatatccctgggtgttctcgagtcgcccaaaaagaccatctgtgaccccgaagaatttctgaagagctctctgaagaacggagtcgtcctgtgtaagctaattaatcggcttatgcctggaagcgtagagaaattctgcctggacccccaaacagaagccgactgcatcaataatatcaacgactttttgaagggctgtgcaaccttgcaggtcgagattttcgacccagatgatctttactcaggcgtgaatttcagtaaagtcctgtccactcttctggctgtcaacaaggccacagaagaccagctgagcgaacgcccttgcggaaggagttcatctttgagcgccgctaacacttcacagactaatcctcagggtgctgtatcatcaaccgtgagtggcctgcagcgtcaaagtaagaccgtggagatgactgaaaatggaagccaccagctgatcgtgaaggctcgcttcaacttcaaacaaaccaatgaagatgagctaagcgtctgcaagggcgacataatttacgtgacacgcgttgaggagggcggatggtgggagggcaccttgaacgggaggactggctggtttcctagtaactacgtgcgggagattaaatcgtctgaacgacccctctcccctaaagcagtcaaaggcttcgaaaccgccccactcactaaaaactactacaccgtggtgctgcagaacatcctagacaccgaaaaggagtacgcaaaagagctgcagtcgcttttggtaacatacctgcggcctctccagagtaacaataatctgtctactgtggaggtgactagtctgctgggaaatttcgaggaggtgtgcactttccagcagactctgtgccaggccttggaggagtgttccaaatttccagaaaatcaacataaggtggggggatgtctgctgagtctgatgccacacttcaagagcatgtacctggcttattgtgctaaccacccctccgctgtaaatgttctcacccaacatagcgacgaactggagcagtttatggaaaaccagggagcctcctcacccggaatacttattctcaccacgaatctgtctaagccattcatgagattagaaaagtacgttaccctgcttcaggagctggagaggcacatggaagatacccatcctgaccatcaggacattctcaaggctattgtggcttttaaaacactgatgggccagtgtcaggacctgaggaaaaggaaacaattggagcttcagatcttaagtgagcctatacaggcctgggagggcgaggatatcaagaatcttggcaatgtcatttttatgtcccaagtcatggttcagtatggagcttgcgaggaaaaggaggaaaggtacctgatgctcttctccaatgtccttattatgctatccgcgtctcctcggatgtctgggttcatataccaggggaagatccctattgcagggacagtggttacccgcttggacgagattgaggggaacgactgtacgttcgagattaccggaaatacagttgaaaggatagtggtgcactgcaataacaaccaggattttcaagagtggctggagcagctgaatcgccttatccggggacccgcatcttgctccagtcttagtaagaccagcagctcttcctgttccgcacatagtagttttagctctacgggacagccccgtggcccactggaaccgccacagatcataaagccatggtctctgtcatgcctaagacctgctccccctctgcgtccgtcggctgccctcgggtataaggaacgcatgtcatacatactgaaagagagcagtaagtcccctaaaaccatgaagaaattcctgcacaagcgtaagaccgagagaaagccctccgaggaggaatacgtcattcgtaagtccaccgctgctctcgaggaagacgcacagatcctgaaggtgattgaagcttattgtacgtccgcaaactttcagcagggacatggatcaagtactaggaaagattctattccacaggtgcttctccccgaggaagaaaagctgatcatcgaagagacccgctccaatggtcagaccatcatggaagaaaagagccttgtggacacagtctacgcactcaaggacgaggtccgagagcttaaacaggagaacaaaaggatgaaacagtgcctggaagaagagctcaagtccagaagagacctggaaaaactcgtgagacgacttcttaagcaaactgatgaatgcatccgaggggagtcatcctccaagacaagcatcctcccatag

SEQ ID NO: 150139 - DNA, 6019 bp, Artificial Sequence
  derived and/or modified sequence
attaaagttggccttatcataaatttcccaatagtatgcctatttcaagtggttctgaaaatgtttgagaatgatgaagatctcttgttatagacagtttttttttcagagcagtattttaagtgcaaagtgtttttttgttgttgttgttgttgggaaaataagaatcttccatattgtagtgtagacagaggacaagtgctcttttgttctcaaacattctattttttcaagtgtattttacccacttatgtgactgagtctgagcctttgctaagggtactgcagctggattatgtagtggaaccaggtccagaaaaagaattgctaaagaatgcaagtaaacaggatgtcagatgttatccttagcctatttccctaaacatagctttttggctgcaaagtaaaatgccattcttctagcttctgcttatacacagtgatggctgacagcaggcataatcttcgtttgcttggcacgttgtcaccatgcaactcaacgtgttttgcaaggaatgatcgtgacacaccatctctgggagatactatgaggacatccggctatttcttggaagaattttctgtctaccttctttgagccctgttgtgccagcacatctccccatgaggctcagatctgtctgacctaagagccagttggcatcgtcctcctaacagaagccagattttcactggggctagactatttattgacagtgttttcccagactggcccatgagtgtctcatttccaaggtcccctgaagtgctggctcacctctgtttcccaaagcacttgcttgcttgtctctcctccctccccagcatccttttcactttcttcccttataacttcttgcactctgtgtgcgtgtgtgtgtatgcgtgtgtgcatgtgcgtttcttctttttttttatcctaacgaatttgttttgcaggttttgaaaaggaaaaaccagcgttatccaggattgttaaattaattcttatctgtttccacatcttggaccgtgatctctgtggttttaaaatcccatattttgagtgggttccgctgttgtttaagaaaagttgctttaaacctttgctctgcaagcacccgaagagaactcataaaaaggaagacaacagcagatgcaatcgcggatgtggcttagtccttgcagctgccccagagtgctgtttggagtgtaccgtcctcagtaatgaatccagaagaacaaatcgtgacatggcttatatctttgggagttttagagtcccctaaaaagaccatctgtgatccggaggagtttttaaagtcctcgctgaaaaatggggtagttctgtgcaaactgatcaacagactcatgcctggctctgtggaaaagttttgtctggatccccaaactgaagctgactgcatcaacaacatcaatgacttcctgaaaggatgtgcaaccctccaagtggaaatatttgatcctgatgacctttattcaggggtcaatttctccaaggtactgagtactcttttagctgtcaacaaagcaacagaagatcagctatcagaaagaccatgtggacgttcctcttctcttagtgctgctaatacttctcagacaaacccacagggagcagtttctagcacagtttcagggctgcaaaggcagtcaaagacagtggagatgacggaaaatggaagtcatcagttgatagtaaaagcaagattcaactttaagcagactaatgaggatgaactgtcagtttgtaagggggacatcatttacgtcacacgagttgaagaaggaggctggtgggaaggcacattaaatgggagaacaggctggttccccagtaattatgtccgtgaaattaaatccagtgagagacctctctccccaaaagccgtcaaaggatttgaaactgctccacttaccaagaattattatactgtggtgttacagaacatcctggacactgaaaaagaatatgctaaagaacttcagtctcttcttgttacttacttaagacccctgcagtccaataacaatctgagtactgtggaggttacatctttactgggaaacttcgaggaagtatgcacatttcaacagacactctgccaagccttggaagaatgttcaaagtttccagaaaaccagcacaaagtaggaggttgtctactgagtctcatgcctcattttaaatctatgtatctggcttactgtgcaaaccatccttcagctgtaaatgtgctcactcagcacagtgatgagttggaacaattcatggaaaatcaaggtgcatcgagcccaggtatcctcattttaacaacaaacctcagcaaaccattcatgcgactggagaaatatgttactctcttgcaagagttagaacggcatatggaggatactcatccagatcatcaggatattctgaaagcaatcgtagcattcaaaactctcatggggcaatgtcaagatctgaggaagagaaaacagctggagttacagatactgtccgaacctattcaggcatgggaaggagaagatattaaaaacttgggaaatgtgatttttatgtcacaagtaatggtgcagtatggagcatgtgaggaaaaagaggagcggtaccttatgttattttcaaatgtcctgataatgttatctgcaagtcctcggatgagtggctttatctatcagggaaaaataccaatagcaggaacggtggtgactagattagatgaaattgaagggaatgactgcacatttgaaatcactggtaacacagtggagagaattgtggtccattgtaacaacaaccaggacttccaggaatggttggagcagctgaacagactgatcagaggacctgcctcttgcagttcattatccaaaacctcatcgtcatcatgtagtgctcattcttcttttagctctaccggacagccccgaggacccttggagcctcctcaaattataaaaccgtggagtttaagttgtctacgacctgcacctccacttagaccatcagcagcactaggttataaagagaggatgtcttatatcttaaaggagtctagtaaaagccctaaaacgatgaagaaatttcttcataaaaggaagactgagagaaaaccatcggaggaggaatatgtgattaggaaaagtacagctgctctggaagaggatgctcaaatccttaaagtgatcgaagcctactgcaccagcgcaaattttcaacaaggccatggctcaagtactcgaaaagattccattccacaagtcctactccctgaggaagagaaactcatcattgaagaaaccagaagcaacggccagaccatcatggaagaaaagagccttgttgatactgtttacgccttgaaggacgaggtcagagaactgaagcaggaaaataaaagaatgaagcaatgcctggaagaagaactgaaatcaagaagggacctagaaaagctggtgcggaggcttttgaagcaaacagatgagtgtattcgaggcgagtccagtagcaagacctcaattcttccataaccatcactgtgccactgggtggagtgtgccttcagggcatcttgaaatgtcccgctgaatgatttgactcagtttgctcacttctttggcttttgttttgtgtttgagtctctctctctctctccctctctcttctctttctctccccgctgtgtgcatatgtgtgtgcgtgcacgtgcgcgcttgggcatttgctgttgtttggttattggttggttgttcattttttttttcaacaggtgaaaaagcaggaagtggtggtagagatggcctcagagtcttttccattcagtaagaaagagaaagggaatgcaggccagttacttaaaaggtcttcagattgccttcagttcacagtgcctctgcaacagccattgccctcaggtcacattctttgggctggctgcccttgcaaagcagctggccaaggcttattaaatgtgaacccaacttttccccagggctttcctgtacctgcaagcctcttagtacttaatttaccgaaggcaaatcttccagactatggcttgagtaggatgaaagacaaacacatctgcccaatgatccagctgcccttccttagaccatcacatgcctcccctcaatcacaggttttaaaattactgccctatgttgtctataagaccaagaaaactgtagtacccttattccttttgtgtcatgtaaattgtaactcaggggggcagaagctctggtcacccacaccaacaccaaatccatcagcaaattctactggacaatcctcccttttagtagcagagttgaccgccttttcccattgcatgataggtttctttccctcattctgcctagtgtgtaagttttctatttccccagtacttttagccaaccttaccaagtggtgtgtaaactagtatgtatgtgctttgcttactttttaaaaaaatgtagttagactgtgaggagttactttatgtacgttgcatattcaaactgtgatgttttatccttcaaaacaatctgcattaagaagatattgtgccctactagacagctttcattcactttattactctctcatatatgctgtgagaagttgtaatattaattggcctctttgggtgggactctaagcagtatttgcagaaatatgcttctggtccaacttgtacatccagaacaaaagggcccctctagtagctgtgtgctggattattcaggactgattaactcaagttgctcattgaatcacatcatccactttatcccagaaactagaactgtgagaaaccaggtttagaagacagtcacagaacagcacacatccaaattcagcgccattgaaagttggcctaaggctcagtgccactcacccctccctccccaaaagacaagagaaatttggccagatggggaaggtcactggaaattgaggccaaagggctgatcagaattgcctttataatatatttgatggatgcctataaatgtgggttttgcaaatattgtttaaaaaccaaacttgaagccaggcatggtggcccacacctgtggtcccagctactcaggaggctgaggtgggaggatcatttgagcccaggaggtcaaggctgcagtgagctgtgatgacaccactgcactccaacctaggtaacagagagacacctctgtctctgaaaaaacaaaacttgaagtttgaaacccccagcttgctgaggagccctttttatttttggtactgagagtctcaaggtcccatagctacatggtacagggctgttgtctgcttgctgcacagcagaaattacaccatccacaggaaatggactatttttgcagtccaacatcagccaaccacacacagccgtgtttggaagctgaagagtaaagaaatttctaggaatggctgttgttctgttttttagcacagccatttagatataacatccttcacttaaaaattaaaaacatcagtactaccaccaccaccaacaacatcaacacagatcttcacatctgcccattctgtggttagtcaatggcttgcaataaatgtgcaaactgcatctataggaaacatttttgtgattacggaatactttagttgattgctgaaaatattgaaaggtcttcattttacagtgatgagtacatatgcatgtttcggggacttggcccttctgatgaggggccctcggtactctggataacgaagcttgtgcagagtggtaaccatgcttacacactaaactataatataaaggaaatgaagccatgttaatctgagagcagtgtcgccatagttgtgttgtttacaatactctataaatgggttcctgttgccctgtaattaaactgctgcccgtagaggcctttcagttccttttctgtccttccccttcttaacacaagctcaaattttctaacttgtttttattttgaagacttttaaaatggacattttcaatacataaaaataaacagtgctttataaaaataa

SEQ ID NO: 150140 - DNA, 4764 bp, Artificial Sequence
  derived and/or modified sequence
agtttcgccctggtggcggccgcgctcagggcagggtcccagctccggctgggttgatctgttcccgcagccttggcacaggcttgcccgcccgctcgccggccccgtgactcgggagggcgaacggcttccaggaggcggcggcggcgcggctggagtgagggagcagctggaggacaggcgggcagcggccgagccagatatttgatcctgatgacctttattcaggggtcaatttctccaaggtactgagtactcttttagctgtcaacaaagcaacagaagatcagctatcagaaagaccatgtggacgttcctcttctcttagtgctgctaatacttctcagacaaacccacagggagcagtttctagcacagtttcagggctgcaaaggcagtcaaagacagtggagatgacggaaaatggaagtcatcagttgatagtaaaagcaagattcaactttaagcagactaatgaggatgaactgtcagtttgtaagggggacatcatttacgtcacacgagttgaagaaggaggctggtgggaaggcacattaaatgggagaacaggctggttccccagtaattatgtccgtgaaattaaatccagtgagagacctctctccccaaaagccgtcaaaggatttgaaactgctccacttaccaagaattattatactgtggtgttacagaacatcctggacactgaaaaagaatatgctaaagaacttcagtctcttcttgttacttacttaagacccctgcagtccaataacaatctgagtactgtggaggttacatctttactgggaaacttcgaggaagtatgcacatttcaacagacactctgccaagccttggaagaatgttcaaagtttccagaaaaccagcacaaagtaggaggttgtctactgagtctcatgcctcattttaaatctatgtatctggcttactgtgcaaaccatccttcagctgtaaatgtgctcactcagcacagtgatgagttggaacaattcatggaaaatcaaggtgcatcgagcccaggtatcctcattttaacaacaaacctcagcaaaccattcatgcgactggagaaatatgttactctcttgcaagagttagaacggcatatggaggatactcatccagatcatcaggatattctgaaagcaatcgtagcattcaaaactctcatggggcaatgtcaagatctgaggaagagaaaacagctggagttacagatactgtccgaacctattcaggcatgggaaggagaagatattaaaaacttgggaaatgtgatttttatgtcacaagtaatggtgcagtatggagcatgtgaggaaaaagaggagcggtaccttatgttattttcaaatgtcctgataatgttatctgcaagtcctcggatgagtggctttatctatcagggaaaaataccaatagcaggaacggtggtgactagattagatgaaattgaagggaatgactgcacatttgaaatcactggtaacacagtggagagaattgtggtccattgtaacaacaaccaggacttccaggaatggttggagcagctgaacagactgatcagaggacctgcctcttgcagttcattatccaaaacctcatcgtcatcatgtagtgctcattcttcttttagctctaccggacagccccgaggacccttggagcctcctcaaattataaaaccgtggagtttaagttgtctacgacctgcacctccacttagaccatcagcagcactaggttataaagagaggatgtcttatatcttaaaggagtctagtaaaagccctaaaacgatgaagaaatttcttcataaaaggaagactgagagaaaaccatcggaggaggaatatgtgattaggaaaagtacagctgctctggaagaggatgctcaaatccttaaagtgatcgaagcctactgcaccagcgcaaattttcaacaaggccatggctcaagtactcgaaaagattccattccacaagtcctactccctgaggaagagaaactcatcattgaagaaaccagaagcaacggccagaccatcatggaagaaaagagccttgttgatactgtttacgccttgaaggacgaggtcagagaactgaagcaggaaaataaaagaatgaagcaatgcctggaagaagaactgaaatcaagaagggacctagaaaagctggtgcggaggcttttgaagcaaacagatgagtgtattcgaggcgagtccagtagcaagacctcaattcttccataaccatcactgtgccactgggtggagtgtgccttcagggcatcttgaaatgtcccgctgaatgatttgactcagtttgctcacttctttggcttttgttttgtgtttgagtctctctctctctctccctctctcttctctttctctccccgctgtgtgcatatgtgtgtgcgtgcacgtgcgcgcttgggcatttgctgttgtttggttattggttggttgttcattttttttttcaacaggtgaaaaagcaggaagtggtggtagagatggcctcagagtcttttccattcagtaagaaagagaaagggaatgcaggccagttacttaaaaggtcttcagattgccttcagttcacagtgcctctgcaacagccattgccctcaggtcacattctttgggctggctgcccttgcaaagcagctggccaaggcttattaaatgtgaacccaacttttccccagggctttcctgtacctgcaagcctcttagtacttaatttaccgaaggcaaatcttccagactatggcttgagtaggatgaaagacaaacacatctgcccaatgatccagctgcccttccttagaccatcacatgcctcccctcaatcacaggttttaaaattactgccctatgttgtctataagaccaagaaaactgtagtacccttattccttttgtgtcatgtaaattgtaactcaggggggcagaagctctggtcacccacaccaacaccaaatccatcagcaaattctactggacaatcctcccttttagtagcagagttgaccgccttttcccattgcatgataggtttctttccctcattctgcctagtgtgtaagttttctatttccccagtacttttagccaaccttaccaagtggtgtgtaaactagtatgtatgtgctttgcttactttttaaaaaaatgtagttagactgtgaggagttactttatgtacgttgcatattcaaactgtgatgttttatccttcaaaacaatctgcattaagaagatattgtgccctactagacagctttcattcactttattactctctcatatatgctgtgagaagttgtaatattaattggcctctttgggtgggactctaagcagtatttgcagaaatatgcttctggtccaacttgtacatccagaacaaaagggcccctctagtagctgtgtgctggattattcaggactgattaactcaagttgctcattgaatcacatcatccactttatcccagaaactagaactgtgagaaaccaggtttagaagacagtcacagaacagcacacatccaaattcagcgccattgaaagttggcctaaggctcagtgccactcacccctccctccccaaaagacaagagaaatttggccagatggggaaggtcactggaaattgaggccaaagggctgatcagaattgcctttataatatatttgatggatgcctataaatgtgggttttgcaaatattgtttaaaaaccaaacttgaagccaggcatggtggcccacacctgtggtcccagctactcaggaggctgaggtgggaggatcatttgagcccaggaggtcaaggctgcagtgagctgtgatgacaccactgcactccaacctaggtaacagagagacacctctgtctctgaaaaaacaaaacttgaagtttgaaacccccagcttgctgaggagccctttttatttttggtactgagagtctcaaggtcccatagctacatggtacagggctgttgtctgcttgctgcacagcagaaattacaccatccacaggaaatggactatttttgcagtccaacatcagccaaccacacacagccgtgtttggaagctgaagagtaaagaaatttctaggaatggctgttgttctgttttttagcacagccatttagatataacatccttcacttaaaaattaaaaacatcagtactaccaccaccaccaacaacatcaacacagatcttcacatctgcccattctgtggttagtcaatggcttgcaataaatgtgcaaactgcatctataggaaacatttttgtgattacggaatactttagttgattgctgaaaatattgaaaggtcttcattttacagtgatgagtacatatgcatgtttcggggacttggcccttctgatgaggggccctcggtactctggataacgaagcttgtgcagagtggtaaccatgcttacacactaaactataatataaaggaaatgaagccatgttaatctgagagcagtgtcgccatagttgtgttgtttacaatactctataaatgggttcctgttgccctgtaattaaactgctgcccgtagaggcctttcagttccttttctgtccttccccttcttaacacaagctcaaattttctaacttgtttttattttgaagacttttaaaatggacattttcaatacataaaaataaacagtgctttataaaaataa

SEQ ID NO: 150141 - DNA, 4779 bp, Artificial Sequence
  derived and/or modified sequence
gccctgaccctgccacttgtgtgaagtcaggatctcctttcccaggcctcagttgagtcatctgtaaaatgaggagactagagtaggggttgggtaatgtctaatggttgtaatgtctgtttttaacttgcccatttccatcagtttccgctaggcaaagctttgcatatttagctgctcagttggaactagtaggaagaccaaagaggattttgatatttgatcctgatgacctttattcaggggtcaatttctccaaggtactgagtactcttttagctgtcaacaaagcaacagaagatcagctatcagaaagaccatgtggacgttcctcttctcttagtgctgctaatacttctcagacaaacccacagggagcagtttctagcacagtttcagggctgcaaaggcagtcaaagacagtggagatgacggaaaatggaagtcatcagttgatagtaaaagcaagattcaactttaagcagactaatgaggatgaactgtcagtttgtaagggggacatcatttacgtcacacgagttgaagaaggaggctggtgggaaggcacattaaatgggagaacaggctggttccccagtaattatgtccgtgaaattaaatccagtgagagacctctctccccaaaagccgtcaaaggatttgaaactgctccacttaccaagaattattatactgtggtgttacagaacatcctggacactgaaaaagaatatgctaaagaacttcagtctcttcttgttacttacttaagacccctgcagtccaataacaatctgagtactgtggaggttacatctttactgggaaacttcgaggaagtatgcacatttcaacagacactctgccaagccttggaagaatgttcaaagtttccagaaaaccagcacaaagtaggaggttgtctactgagtctcatgcctcattttaaatctatgtatctggcttactgtgcaaaccatccttcagctgtaaatgtgctcactcagcacagtgatgagttggaacaattcatggaaaatcaaggtgcatcgagcccaggtatcctcattttaacaacaaacctcagcaaaccattcatgcgactggagaaatatgttactctcttgcaagagttagaacggcatatggaggatactcatccagatcatcaggatattctgaaagcaatcgtagcattcaaaactctcatggggcaatgtcaagatctgaggaagagaaaacagctggagttacagatactgtccgaacctattcaggcatgggaaggagaagatattaaaaacttgggaaatgtgatttttatgtcacaagtaatggtgcagtatggagcatgtgaggaaaaagaggagcggtaccttatgttattttcaaatgtcctgataatgttatctgcaagtcctcggatgagtggctttatctatcagggaaaaataccaatagcaggaacggtggtgactagattagatgaaattgaagggaatgactgcacatttgaaatcactggtaacacagtggagagaattgtggtccattgtaacaacaaccaggacttccaggaatggttggagcagctgaacagactgatcagaggacctgcctcttgcagttcattatccaaaacctcatcgtcatcatgtagtgctcattcttcttttagctctaccggacagccccgaggacccttggagcctcctcaaattataaaaccgtggagtttaagttgtctacgacctgcacctccacttagaccatcagcagcactaggttataaagagaggatgtcttatatcttaaaggagtctagtaaaagccctaaaacgatgaagaaatttcttcataaaaggaagactgagagaaaaccatcggaggaggaatatgtgattaggaaaagtacagctgctctggaagaggatgctcaaatccttaaagtgatcgaagcctactgcaccagcgcaaattttcaacaaggccatggctcaagtactcgaaaagattccattccacaagtcctactccctgaggaagagaaactcatcattgaagaaaccagaagcaacggccagaccatcatggaagaaaagagccttgttgatactgtttacgccttgaaggacgaggtcagagaactgaagcaggaaaataaaagaatgaagcaatgcctggaagaagaactgaaatcaagaagggacctagaaaagctggtgcggaggcttttgaagcaaacagatgagtgtattcgaggcgagtccagtagcaagacctcaattcttccataaccatcactgtgccactgggtggagtgtgccttcagggcatcttgaaatgtcccgctgaatgatttgactcagtttgctcacttctttggcttttgttttgtgtttgagtctctctctctctctccctctctcttctctttctctccccgctgtgtgcatatgtgtgtgcgtgcacgtgcgcgcttgggcatttgctgttgtttggttattggttggttgttcattttttttttcaacaggtgaaaaagcaggaagtggtggtagagatggcctcagagtcttttccattcagtaagaaagagaaagggaatgcaggccagttacttaaaaggtcttcagattgccttcagttcacagtgcctctgcaacagccattgccctcaggtcacattctttgggctggctgcccttgcaaagcagctggccaaggcttattaaatgtgaacccaacttttccccagggctttcctgtacctgcaagcctcttagtacttaatttaccgaaggcaaatcttccagactatggcttgagtaggatgaaagacaaacacatctgcccaatgatccagctgcccttccttagaccatcacatgcctcccctcaatcacaggttttaaaattactgccctatgttgtctataagaccaagaaaactgtagtacccttattccttttgtgtcatgtaaattgtaactcaggggggcagaagctctggtcacccacaccaacaccaaatccatcagcaaattctactggacaatcctcccttttagtagcagagttgaccgccttttcccattgcatgataggtttctttccctcattctgcctagtgtgtaagttttctatttccccagtacttttagccaaccttaccaagtggtgtgtaaactagtatgtatgtgctttgcttactttttaaaaaaatgtagttagactgtgaggagttactttatgtacgttgcatattcaaactgtgatgttttatccttcaaaacaatctgcattaagaagatattgtgccctactagacagctttcattcactttattactctctcatatatgctgtgagaagttgtaatattaattggcctctttgggtgggactctaagcagtatttgcagaaatatgcttctggtccaacttgtacatccagaacaaaagggcccctctagtagctgtgtgctggattattcaggactgattaactcaagttgctcattgaatcacatcatccactttatcccagaaactagaactgtgagaaaccaggtttagaagacagtcacagaacagcacacatccaaattcagcgccattgaaagttggcctaaggctcagtgccactcacccctccctccccaaaagacaagagaaatttggccagatggggaaggtcactggaaattgaggccaaagggctgatcagaattgcctttataatatatttgatggatgcctataaatgtgggttttgcaaatattgtttaaaaaccaaacttgaagccaggcatggtggcccacacctgtggtcccagctactcaggaggctgaggtgggaggatcatttgagcccaggaggtcaaggctgcagtgagctgtgatgacaccactgcactccaacctaggtaacagagagacacctctgtctctgaaaaaacaaaacttgaagtttgaaacccccagcttgctgaggagccctttttatttttggtactgagagtctcaaggtcccatagctacatggtacagggctgttgtctgcttgctgcacagcagaaattacaccatccacaggaaatggactatttttgcagtccaacatcagccaaccacacacagccgtgtttggaagctgaagagtaaagaaatttctaggaatggctgttgttctgttttttagcacagccatttagatataacatccttcacttaaaaattaaaaacatcagtactaccaccaccaccaacaacatcaacacagatcttcacatctgcccattctgtggttagtcaatggcttgcaataaatgtgcaaactgcatctataggaaacatttttgtgattacggaatactttagttgattgctgaaaatattgaaaggtcttcattttacagtgatgagtacatatgcatgtttcggggacttggcccttctgatgaggggccctcggtactctggataacgaagcttgtgcagagtggtaaccatgcttacacactaaactataatataaaggaaatgaagccatgttaatctgagagcagtgtcgccatagttgtgttgtttacaatactctataaatgggttcctgttgccctgtaattaaactgctgcccgtagaggcctttcagttccttttctgtccttccccttcttaacacaagctcaaattttctaacttgtttttattttgaagacttttaaaatggacattttcaatacataaaaataaacagtgctttataaaaataa

SEQ ID NO: 150142 - DNA, 5265 bp, Artificial Sequence
  derived and/or modified sequence
ctcatttccaaggtcccctgaagtgctggctcacctctgtttcccaaagcacttgcttgcttgtctctcctccctccccagcatccttttcactttcttcccttataacttcttgcactctgtgtgcgtgtgtgtgtatgcgtgtgtgcatgtgcgtttcttctttttttttatcctaacgaatttgttttgcaggttttgaaaaggaaaaaccagcgttatccaggattgttaaattaattcttatctgtttccacatcttggaccgtgatctctgtggttttaaaatcccatattttgagtgggttccgctgttgtttaagaaaagttgctttaaacctttgctctgcaagcacccgaagagaactcataaaaaggaagacaacagcagatgcaatcgcggatgtggcttagtccttgcagctgccccagagtgctgtttggagtgtaccgtcctcagtaatgaatccagaagaacaaatcgtgacatggcttatatctttgggagttttagagtcccctaaaaagaccatctgtgatccggaggagtttttaaagtcctcgctgaaaaatggggtagttctgtgcaaactgatcaacagactcatgcctggctctgtggaaaagttttgtctggatccccaaactgaagctgactgcatcaacaacatcaatgacttcctgaaaggatgtgcaaccctccaagtggaaatatttgatcctgatgacctttattcaggggtcaatttctccaaggtactgagtactcttttagctgtcaacaaagcaacagaagatcagctatcagaaagaccatgtggacgttcctcttctcttagtgctgctaatacttctcagacaaacccacagggagcagtttctagcacagtttcagggctgcaaaggcagtcaaagacagtggagatgacggaaaatggaagtcatcagttgatagtaaaagcaagattcaactttaagcagactaatgaggatgaactgtcagtttgtaagggggacatcatttacgtcacacgagttgaagaaggaggctggtgggaaggcacattaaatgggagaacaggctggttccccagtaattatgtccgtgaaattaaatccagtgagagacctctctccccaaaagccgtcaaaggatttgaaactgctccacttaccaagaattattatactgtggtgttacagaacatcctggacactgaaaaagaatatgctaaagaacttcagtctcttcttgttacttacttaagacccctgcagtccaataacaatctgagtactgtggaggttacatctttactgggaaacttcgaggaagtatgcacatttcaacagacactctgccaagccttggaagaatgttcaaagtttccagaaaaccagcacaaagtaggaggttgtctactgagtctcatgcctcattttaaatctatgtatctggcttactgtgcaaaccatccttcagctgtaaatgtgctcactcagcacagtgatgagttggaacaattcatggaaaatcaaggtgcatcgagcccaggtatcctcattttaacaacaaacctcagcaaaccattcatgcgactggagaaatatgttactctcttgcaagagttagaacggcatatggaggatactcatccagatcatcaggatattctgaaagcaatcgtagcattcaaaactctcatggggcaatgtcaagatctgaggaagagaaaacagctggagttacagatactgtccgaacctattcaggcatgggaaggagaagatattaaaaacttgggaaatgtgatttttatgtcacaagtaatggtgcagtatggagcatgtgaggaaaaagaggagcggtaccttatgttattttcaaatgtcctgataatgttatctgcaagtcctcggatgagtggctttatctatcagggaaaaataccaatagcaggaacggtggtgactagattagatgaaattgaagggaatgactgcacatttgaaatcactggtaacacagtggagagaattgtggtccattgtaacaacaaccaggacttccaggaatggttggagcagctgaacagactgatcagaggacctgcctcttgcagttcattatccaaaacctcatcgtcatcatgtagtgctcattcttcttttagctctaccggacagccccgaggacccttggagcctcctcaaattataaaaccgtggagtttaagttgtctacgacctgcacctccacttagaccatcagcagcactaggttataaagaggcttttacttttgtttttgaggagtctagtaaaagccctaaaacgatgaagaaatttcttcataaaaggaagactgagagaaaaccatcggaggaggaatatgtgattaggaaaagtacagctgctctggaagaggatgctcaaatccttaaagtgatcgaagcctactgcaccagcgcaaattttcaacaaggccatggctcaagtactcgaaaagattccattccacaagtcctactccctgaggaagagaaactcatcattgaagaaaccagaagcaacggccagaccatcatggaagaaaagagccttgttgatactgtttacgccttgaaggacgaggtcagagaactgaagcaggaaaataaaagaatgaagcaatgcctggaagaagaactgaaatcaagaagggacctagaaaagctggtgcggaggcttttgaagcaaacagatgagtgtattcgaggcgagtccagtagcaagacctcaattcttccataaccatcactgtgccactgggtggagtgtgccttcagggcatcttgaaatgtcccgctgaatgatttgactcagtttgctcacttctttggcttttgttttgtgtttgagtctctctctctctctccctctctcttctctttctctccccgctgtgtgcatatgtgtgtgcgtgcacgtgcgcgcttgggcatttgctgttgtttggttattggttggttgttcattttttttttcaacaggtgaaaaagcaggaagtggtggtagagatggcctcagagtcttttccattcagtaagaaagagaaagggaatgcaggccagttacttaaaaggtcttcagattgccttcagttcacagtgcctctgcaacagccattgccctcaggtcacattctttgggctggctgcccttgcaaagcagctggccaaggcttattaaatgtgaacccaacttttccccagggctttcctgtacctgcaagcctcttagtacttaatttaccgaaggcaaatcttccagactatggcttgagtaggatgaaagacaaacacatctgcccaatgatccagctgcccttccttagaccatcacatgcctcccctcaatcacaggttttaaaattactgccctatgttgtctataagaccaagaaaactgtagtacccttattccttttgtgtcatgtaaattgtaactcaggggggcagaagctctggtcacccacaccaacaccaaatccatcagcaaattctactggacaatcctcccttttagtagcagagttgaccgccttttcccattgcatgataggtttctttccctcattctgcctagtgtgtaagttttctatttccccagtacttttagccaaccttaccaagtggtgtgtaaactagtatgtatgtgctttgcttactttttaaaaaaatgtagttagactgtgaggagttactttatgtacgttgcatattcaaactgtgatgttttatccttcaaaacaatctgcattaagaagatattgtgccctactagacagctttcattcactttattactctctcatatatgctgtgagaagttgtaatattaattggcctctttgggtgggactctaagcagtatttgcagaaatatgcttctggtccaacttgtacatccagaacaaaagggcccctctagtagctgtgtgctggattattcaggactgattaactcaagttgctcattgaatcacatcatccactttatcccagaaactagaactgtgagaaaccaggtttagaagacagtcacagaacagcacacatccaaattcagcgccattgaaagttggcctaaggctcagtgccactcacccctccctccccaaaagacaagagaaatttggccagatggggaaggtcactggaaattgaggccaaagggctgatcagaattgcctttataatatatttgatggatgcctataaatgtgggttttgcaaatattgtttaaaaaccaaacttgaagccaggcatggtggcccacacctgtggtcccagctactcaggaggctgaggtgggaggatcatttgagcccaggaggtcaaggctgcagtgagctgtgatgacaccactgcactccaacctaggtaacagagagacacctctgtctctgaaaaaacaaaacttgaagtttgaaacccccagcttgctgaggagccctttttatttttggtactgagagtctcaaggtcccatagctacatggtacagggctgttgtctgcttgctgcacagcagaaattacaccatccacaggaaatggactatttttgcagtccaacatcagccaaccacacacagccgtgtttggaagctgaagagtaaagaaatttctaggaatggctgttgttctgttttttagcacagccatttagatataacatccttcacttaaaaattaaaaacatcagtactaccaccaccaccaacaacatcaacacagatcttcacatctgcccattctgtggttagtcaatggcttgcaataaatgtgcaaactgcatctataggaaacatttttgtgattacggaatactttagttgattgctgaaaatattgaaaggtcttcattttacagtgatgagtacatatgcatgtttcggggacttggcccttctgatgaggggccctcggtactctggataacgaagcttgtgcagagtggtaaccatgcttacacactaaactataatataaaggaaatgaagccatgttaatctgagagcagtgtcgccatagttgtgttgtttacaatactctataaatgggttcctgttgccctgtaattaaactgctgcccgtagaggcctttcagttccttttctgtccttccccttcttaacacaagctcaaattttctaacttgtttttattttgaagacttttaaaatggacattttcaatacataaaaataaacagtgcttt

SEQ ID NO: 150143 - DNA, 2331 bp, Artificial Sequence
  derived and/or modified sequence
atgaaccccgaggagcagatcgtgacctggctgatcagcctgggcgtgctggagagccccaagaagaccatctgcgaccccgaggagttcctgaagagcagcctgaagaacggcgtggtgctgtgcaagctgatcaacagactgatgcccggcagcgtggagaagttctgcctggacccccagaccgaggccgactgcatcaacaacatcaacgacttcctgaagggctgcgccaccctgcaggtggagatcttcgaccccgacgacctgtacagcggcgtgaacttcagcaaggtgctgagcaccctgctggccgtgaacaaggccaccgaggaccagctgagcgagagaccctgcggcagaagcagcagcctgagcgccgccaacaccagccagaccaacccccagggcgccgtgagcagcaccgtgagcggcctgcagagacagagcaagaccgtggagatgaccgagaacggcagccaccagctgatcgtgaaggccagattcaacttcaagcagaccaacgaggacgagctgagcgtgtgcaagggcgacatcatctacgtgaccagagtggaggagggcggctggtgggagggcaccctgaacggcagaaccggctggttccccagcaactacgtgagagagatcaagagcagcgagagacccctgagccccaaggccgtgaagggcttcgagaccgcccccctgaccaagaactactacaccgtggtgctgcagaacatcctggacaccgagaaggagtacgccaaggagctgcagagcctgctggtgacctacctgagacccctgcagagcaacaacaacctgagcaccgtggaggtgaccagcctgctgggcaacttcgaggaggtgtgcaccttccagcagaccctgtgccaggccctggaggagtgcagcaagttccccgagaaccagcacaaggtgggcggctgcctgctgagcctgatgccccacttcaagagcatgtacctggcctactgcgccaaccaccccagcgccgtgaacgtgctgacccagcacagcgacgagctggagcagttcatggagaaccagggcgccagcagccccggcatcctgatcctgaccaccaacctgagcaagcccttcatgagactggagaagtacgtgaccctgctgcaggagctggagagacacatggaggacacccaccccgaccaccaggacatcctgaaggccatcgtggccttcaagaccctgatgggccagtgccaggacctgagaaagagaaagcagctggagctgcagatcctgagcgagcccatccaggcctgggagggcgaggacatcaagaacctgggcaacgtgatcttcatgagccaggtgatggtgcagtacggcgcctgcgaggagaaggaggagagatacctgatgctgttcagcaacgtgctgatcatgctgagcgccagccccagaatgagcggcttcatctaccagggcaagatccccatcgccggcaccgtggtgaccagactggacgagatcgagggcaacgactgcaccttcgagatcaccggcaacaccgtggagagaatcgtggtgcactgcaacaacaaccaggacttccaggagtggctggagcagctgaacagactgatcagaggccccgccagctgcagcagcctgagcaagaccagcagcagcagctgcagcgcccacagcagcttcagcagcaccggccagcccagaggccccctggagcccccccagatcatcaagccctggagcctgagctgcctgagacccgccccccccctgagacccagcgccgccctgggctacaaggagagaatgagctacatcctgaaggagagcagcaagagccccaagaccatgaagaagttcctgcacaagagaaagaccgagagaaagcccagcgaggaggagtacgtgatcagaaagagcaccgccgccctggaggaggacgcccagatcctgaaggtgatcgaggcctactgcaccagcgccaacttccagcagggccacggcagcagcaccagaaaggacagcatcccccaggtgctgctgcccgaggaggagaagctgatcatcgaggagaccagaagcaacggccagaccatcatggaggagaagagcctggtggacaccgtgtacgccctgaaggacgaggtgagagagctgaagcaggagaacaagagaatgaagcagtgcctggaggaggagctgaagagcagaagagacctggagaagctggtgagaagactgctgaagcagaccgacgagtgcatcagaggcgagagcagcagcaagaccagcatcctgccctag

SEQ ID NO: 150144 - protein, 1139 aa, Artificial Sequence
  derived and/or modified sequence
MQTPEVPAERSPRRRSISGTSTSEKPNSMDTANTSPFKVPGFFSKRLKGSIKRTKSQSKLDRNTSFRLPSLRSTDDRSRGLPKLKESRSHESLLSPCSTVECLDLGRGEPVSVKPLHSSILGQDFCFEVTYLSGSKCFSCNSASERDKWMENLRRTVQPNKDNCRRAENVLRLWIIEAKDLAPKKKYFCELCLDDTLFARTTSKTKADNIFWGEHFEFFSLPPLHSITVHIYKDVEKKKKKDKNNYVGLVNIPTASVTGRQFVEKWYPVSTPTPNKGKTGGPSIRIKSRFQTITILPMEQYKEFAEFVTSNYTMLCSVLEPVISVRNKEELACALVHILQSTGRAKDFLTDLVMSEVDRCGEHDVLIFRENTIATKSIEEYLKLVGQQYLHDALGEFIKALYESDENCEVDPSKCSSSELIDHQSNLKMCCELAFCKIINSYCVFPRELKEVFASWKQQCLNRGKQDISERLISASLFLRFLCPAIMSPSLFNLMQEYPDDRTSRTLTLIAKVIQNLANFAKFGNKEEYMAFMNDFLEHEWGGMKRFLLEISNPDTISNTPGFDGYIDLGRELSVLHSLLWEVVSQLDKGENSFLQATVAKLGPLPRVLADITKSLTNPTPIQQQLRRFTEHNSSPNVSGSLSSGLQKIFEDPTDSDLHKLKSPSQDNTDSYFRGKTLLLVQQASSQSMTYSEKDERESSLPNGRSVSLMDLQDTHAAQVEHASVMLDVPIRLTGSQLSITQVASIKQLRETQSTPQSAPQVRRPLHPALNQPGGLQPLSFQNPVYHLNNPIPAMPKASIDSSLENLSTASSRSQSNSEDFKLSGPSNSSMEDFTKRSTQSEDFSRRHTVPDRHIPLALPRQNSTGQAQIRKVDQGGLGARAKAPPSLPHSASLRSTGSMSVVSAALVAEPVQNGSRSRQQSSSSRESPVPKVRAIQRQQTQQVQSPVDSATMSPVERTAAWVLNNGQYEEDVEETEQNLDEAKHAEKYEQEITKLKERLRVSSRRLEEYERRLLVQEQQMQKLLLEYKARLEDSEERLRRQQEEKDSQMKSIISRLMAVEEELKKDHAEMQAVIDAKQKIIDAQEKRIVSLDSANTRLMSALTQVKERYSMQVRNGISPTNPTKLSITENGEFKNSSC

SEQ ID NO: 150145 - DNA, 3420 bp, Artificial Sequence
  derived and/or modified sequence
atgcagacccccgaggtgcccgccgagagaagccccagaagaagaagcatcagcggcaccagcaccagcgagaagcccaacagcatggacaccgccaacaccagccccttcaaggtgcccggcttcttcagcaagagactgaagggcagcatcaagagaaccaagagccagagcaagctggacagaaacaccagcttcagactgcccagcctgagaagcaccgacgacagaagcagaggcctgcccaagctgaaggagagcagaagccacgagagcctgctgagcccctgcagcaccgtggagtgcctggacctgggcagaggcgagcccgtgagcgtgaagcccctgcacagcagcatcctgggccaggacttctgcttcgaggtgacctacctgagcggcagcaagtgcttcagctgcaacagcgccagcgagagagacaagtggatggagaacctgagaagaaccgtgcagcccaacaaggacaactgcagaagagccgagaacgtgctgagactgtggatcatcgaggccaaggacctggcccccaagaagaagtacttctgcgagctgtgcctggacgacaccctgttcgccagaaccaccagcaagaccaaggccgacaacatcttctggggcgagcacttcgagttcttcagcctgccccccctgcacagcatcaccgtgcacatctacaaggacgtggagaagaagaagaagaaggacaagaacaactacgtgggcctggtgaacatccccaccgccagcgtgaccggcagacagttcgtggagaagtggtaccccgtgagcacccccacccccaacaagggcaagaccggcggccccagcatcagaatcaagagcagattccagaccatcaccatcctgcccatggagcagtacaaggagttcgccgagttcgtgaccagcaactacaccatgctgtgcagcgtgctggagcccgtgatcagcgtgagaaacaaggaggagctggcctgcgccctggtgcacatcctgcagagcaccggcagagccaaggacttcctgaccgacctggtgatgagcgaggtggacagatgcggcgagcacgacgtgctgatcttcagagagaacaccatcgccaccaagagcatcgaggagtacctgaagctggtgggccagcagtacctgcacgacgccctgggcgagttcatcaaggccctgtacgagagcgacgagaactgcgaggtggaccccagcaagtgcagcagcagcgagctgatcgaccaccagagcaacctgaagatgtgctgcgagctggccttctgcaagatcatcaacagctactgcgtgttccccagagagctgaaggaggtgttcgccagctggaagcagcagtgcctgaacagaggcaagcaggacatcagcgagagactgatcagcgccagcctgttcctgagattcctgtgccccgccatcatgagccccagcctgttcaacctgatgcaggagtaccccgacgacagaaccagcagaaccctgaccctgatcgccaaggtgatccagaacctggccaacttcgccaagttcggcaacaaggaggagtacatggccttcatgaacgacttcctggagcacgagtggggcggcatgaagagattcctgctggagatcagcaaccccgacaccatcagcaacacccccggcttcgacggctacatcgacctgggcagagagctgagcgtgctgcacagcctgctgtgggaggtggtgagccagctggacaagggcgagaacagcttcctgcaggccaccgtggccaagctgggccccctgcccagagtgctggccgacatcaccaagagcctgaccaaccccacccccatccagcagcagctgagaagattcaccgagcacaacagcagccccaacgtgagcggcagcctgagcagcggcctgcagaagatcttcgaggaccccaccgacagcgacctgcacaagctgaagagccccagccaggacaacaccgacagctacttcagaggcaagaccctgctgctggtgcagcaggccagcagccagagcatgacctacagcgagaaggacgagagagagagcagcctgcccaacggcagaagcgtgagcctgatggacctgcaggacacccacgccgcccaggtggagcacgccagcgtgatgctggacgtgcccatcagactgaccggcagccagctgagcatcacccaggtggccagcatcaagcagctgagagagacccagagcaccccccagagcgccccccaggtgagaagacccctgcaccccgccctgaaccagcccggcggcctgcagcccctgagcttccagaaccccgtgtaccacctgaacaaccccatccccgccatgcccaaggccagcatcgacagcagcctggagaacctgagcaccgccagcagcagaagccagagcaacagcgaggacttcaagctgagcggccccagcaacagcagcatggaggacttcaccaagagaagcacccagagcgaggacttcagcagaagacacaccgtgcccgacagacacatccccctggccctgcccagacagaacagcaccggccaggcccagatcagaaaggtggaccagggcggcctgggcgccagagccaaggccccccccagcctgccccacagcgccagcctgagaagcaccggcagcatgagcgtggtgagcgccgccctggtggccgagcccgtgcagaacggcagcagaagcagacagcagagcagcagcagcagagagagccccgtgcccaaggtgagagccatccagagacagcagacccagcaggtgcagagccccgtggacagcgccaccatgagccccgtggagagaaccgccgcctgggtgctgaacaacggccagtacgaggaggacgtggaggagaccgagcagaacctggacgaggccaagcacgccgagaagtacgagcaggagatcaccaagctgaaggagagactgagagtgagcagcagaagactggaggagtacgagagaagactgctggtgcaggagcagcagatgcagaagctgctgctggagtacaaggccagactggaggacagcgaggagagactgagaagacagcaggaggagaaggacagccagatgaagagcatcatcagcagactgatggccgtggaggaggagctgaagaaggaccacgccgagatgcaggccgtgatcgacgccaagcagaagatcatcgacgcccaggagaagagaatcgtgagcctggacagcgccaacaccagactgatgagcgccctgacccaggtgaaggagagatacagcatgcaggtgagaaacggcatcagccccaccaaccccaccaagctgagcatcaccgagaacggcgagttcaagaacagcagctgctag

SEQ ID NO: 150146 - DNA, 3420 bp, Artificial Sequence
  derived and/or modified sequence
atgcagactcccgaggtgccagccgaacggtctccacgtcggcgatctatctccggtacgtcgacgagcgagaaacccaattccatggatactgccaatacgagtcccttcaaggtgccaggtttttttagcaagaggctcaagggcagtatcaagcgcacaaagtcccagtccaagttggaccggaatacctcttttcgacttccatccctgcgttcgaccgacgaccgatcccgcggcctgcctaaactaaaggagtcgcgctctcacgagtctctactctccccctgcagtacagtcgagtgtttagatttaggtagaggagaaccggtgtccgtaaaaccactccattcgtccattctggggcaggatttctgtttcgaagtgacttatttgtccgggagcaaatgctttagctgtaacagtgcatccgaacgggataagtggatggagaacctcaggcgcacagtgcagcccaacaaggacaattgtcgtcgcgccgaaaacgtgcttcgactgtggatcatcgaagcgaaggacttggcgcccaaaaagaaatacttttgtgaattgtgcttagacgacacccttttcgctagaactacctcaaaaaccaaggccgacaatattttctggggcgagcacttcgaattctttagcttgccacctctgcacagcatcaccgtgcatatctacaaggatgtggagaagaaaaaaaagaaggacaaaaataactacgttggactagtgaatattcccacagcctccgtgactggacggcagtttgttgagaaatggtaccctgtctctaccccaactccaaataaaggcaaaacaggaggcccttcaatccggatcaaatcacggttccaaactatcaccattcttcccatggagcaatacaaagaattcgctgagttcgtgacatcaaattacactatgctgtgcagcgtgctcgaacctgtgatcagcgtcaggaataaagaagaactagcatgtgccctggttcacatcctgcagtcaaccgggcgggctaaggactttctgactgatttggtcatgagtgaggtcgacagatgtggcgaacacgacgtgctcatttttcgagaaaatacaatagcaacaaagtccatcgaagagtatctcaagctggtaggacagcagtatcttcacgatgctttgggtgagttcataaaagcattatatgaaagcgacgagaattgtgaagtggaccccagcaagtgctcttcatccgagttaatcgaccatcagtcgaaccttaaaatgtgttgtgaactggcattttgcaaaatcatcaatagctattgcgtctttcccagggaactgaaagaggtcttcgcctcttggaaacagcaatgcctgaatcgcggcaagcaggacatctctgagagacttatatctgcctccctgttcctccgctttttgtgtcccgctatcatgtcaccttcactgttcaatttgatgcaggagtatcctgatgatcgcaccagcagaaccctgacccttatcgcgaaagtgatccagaatctggccaactttgcaaaatttgggaacaaagaagagtacatggcctttatgaacgatttcttagaacatgagtggggggggatgaaacgattcctactggaaatctctaatccggacactatctcaaatacccctgggtttgatggttacattgatctgggcagagagctctcagtactccactctttgctctgggaggtggtctctcagcttgacaagggagagaattcatttctgcaggcgaccgtcgcgaagttgggaccgctcccacgggtgcttgctgacatcaccaaatcattaactaacccaacgccgattcagcagcagctgcggcgcttcacagaacacaactcatccccgaacgttagcggctcactgtcctcaggactacagaaaatttttgaggaccctaccgactccgacctgcacaagttgaagagtcccagtcaggataatacagacagctattttaggggcaagactttgctcttagtgcagcaggcatcctcccagagtatgacatattcagaaaaggatgagcgcgaatccagcttgccgaatggaagaagtgtctcccttatggatctccaggatacacatgcggcacaggtagaacatgcatctgtcatgctggacgtgccaatcaggttaactggatcccagctgtcgattactcaagttgccagcattaaacaactccgggagacacagtccactccgcaatccgcacctcaggtccgccgtcccctgcacccggctctcaaccagccaggcggactccagccactcagcttccaaaatccagtttaccacctgaacaatccaataccggctatgccaaaagcttcaattgattcctcactggagaacctgtccaccgccagttccagatctcagtccaatagcgaggattttaagctctctgggccatccaacagctcaatggaggatttcacgaagaggtctacacagtctgaagacttttcaagaaggcatacagtgcccgacagacatattcctctggccctgccccgacaaaacagtactggccaagcacagatcagaaaggtggatcaaggtggcctcggtgcccgggcaaaggcgccaccatccttaccacacagcgcatcgctgcgctctacaggcagcatgagtgtcgtgtccgcggctctggtggcagaaccagtgcagaacggaagtcggagtagacagcagtccagctcgagtcgcgaaagccccgtcccgaaggtccgcgccatccagcggcagcagacacagcaggttcaatcccctgtggactcagcaacgatgtctccggtggagaggacagccgcctgggtcctcaacaacgggcagtacgaagaagacgtagaagagaccgaacagaacctcgacgaagccaaacatgcggagaaatacgagcaggagattacgaagctgaaagaacgcttaagggtgtcatctcggagattagaagagtatgaaagaaggctcctcgtgcaggaacagcagatgcagaagctgctcttggagtacaaggctcgcttggaggactcagaagaaagactaaggcggcagcaagaggaaaaagactcacagatgaagagcataatctcacggctaatggcagtcgaagaggaactgaaaaaggatcatgctgagatgcaggccgtcatcgacgcaaagcagaaaataattgacgcgcaggagaaacgtattgtgtcactggattctgcaaacacacgtctgatgagcgcactcacccaagtgaaagagaggtatagcatgcaggtacggaacggtatctctccaactaatcccaccaaactgtctatcaccgaaaacggggagttcaagaactctagctgttag

SEQ ID NO: 150147 - DNA, 3420 bp, Artificial Sequence
  derived and/or modified sequence
atgcagaccccagaggtgcctgctgagaggagcccccggcggcgcagcatcagcggcaccagcaccagcgagaagcccaacagcatggacacagccaacaccagccccttcaaggtgcccggcttcttcagcaagaggctgaagggcagcatcaagaggaccaagagccagagcaagctggacaggaacaccagcttccggctgcccagcctgcggagcacagatgacaggagccggggcctgcccaagctgaaggagagccgcagccatgagagcctgctgagcccctgcagcacagtggagtgcctggacctgggccgcggggagcctgtgtctgtgaagcccctgcacagcagcatcctgggccaggacttctgctttgaggtgacctacctgagcggcagcaagtgcttcagctgcaacagcgccagcgagcgggacaagtggatggagaacctgcggaggacagtgcagcccaacaaggacaactgcagaagagcagaaaatgtgctgcggctgtggatcatcgaggccaaggacctggcccccaagaagaagtacttctgtgagctgtgcctggatgacaccctgtttgcccggaccaccagcaagaccaaggctgacaacatcttctggggcgagcactttgagttcttcagcctgccccccctgcacagcatcaccgtgcacatctacaaggatgtggagaagaagaagaagaaggacaagaacaactacgtgggcctggtgaacatccccacagcctctgtgacaggccggcagtttgtggagaagtggtaccctgtgtccacccccacccccaacaagggcaagacaggaggccccagcatccgcatcaagagccgcttccagaccatcaccatcctgcccatggagcagtacaaggagtttgctgagtttgtgaccagcaactacaccatgctgtgcagcgtgctggagcctgtgatctctgtgaggaacaaggaggagctggcctgtgccctggtgcacatcctgcagagcacaggccgggccaaggacttcctgacagacctggtgatgtctgaggtggacagatgtggggagcatgatgtgctgatcttccgggagaacaccatcgccaccaagagcattgaggagtacctgaagctggtgggccagcagtacctgcatgatgccctgggggagttcatcaaggccctgtatgaaagtgatgagaactgtgaggtggaccccagcaagtgcagcagcagcgagctgattgaccaccagagcaacctgaagatgtgctgtgagctggccttctgcaagatcatcaacagctactgtgtgttcccccgggagctgaaggaggtgtttgcctcctggaagcagcagtgcctgaacagaggcaagcaggacatcagcgagcggctcatcagcgccagcctcttcctgcgcttcctgtgcccagccatcatgagccccagcctcttcaacctgatgcaggagtacccagatgacaggaccagcaggaccctgaccctcatcgccaaggtgatccagaacctggccaactttgccaagtttggaaacaaggaggagtacatggccttcatgaatgacttcctggagcacgagtggggcggcatgaagcgcttcctgctggagatcagcaacccagacaccatcagcaacaccccaggctttgatggctacatcgacctgggccgggagctgtctgtgctgcacagcctgctgtgggaggtggtgtcccagctggacaagggagaaaattccttcctgcaggccaccgtggccaagctgggccccctgccccgggtgctggccgacatcaccaagagcctgaccaaccccacccccatccagcagcagctgcggcgcttcacagagcacaacagcagccccaacgtgtctggcagcctgagcagcggcctgcagaagatctttgaggaccccacagacagcgacctgcacaagctgaagagccccagccaggacaacacagacagctacttccggggcaagaccctgctgctggtgcagcaggccagcagccagagcatgacctacagcgagaaggatgagcgggagagcagcctgcccaacggccgctctgtgtccctgatggacctgcaggacacccatgctgcccaggtggagcacgcctctgtgatgctggatgtgcccatccggctgaccggcagccagctgagcatcacccaggtggccagcatcaagcagctgcgggagacccagagcaccccccagagcgccccccaggtgagaagacccctgcacccagccctgaaccagcccggcggcctgcagcccctgtccttccagaaccctgtgtaccacctgaacaaccccatcccagccatgcccaaggccagcattgacagcagcctggagaacctgagcacagccagcagccgcagccagagcaacagcgaggacttcaagctgagcggccccagcaacagctccatggaggacttcaccaagaggagcacccagagcgaggacttcagccgccgccacacagtgcctgacagacacatccccctggccctgccccggcagaacagcacaggccaggcccagatcaggaaggtggaccagggcggcctgggcgcccgggccaaggccccacccagcctgccccacagcgccagcctgcggagcacaggctccatgtctgtggtgtctgctgccctggtggccgagcctgtgcagaatggcagccgcagccggcagcagagcagcagcagccgggagagccctgtgcccaaggtgcgggccatccagaggcagcagacccagcaggtgcagagccctgtggacagcgccaccatgagccctgtggagaggacagctgcctgggtgctgaacaacggccagtatgaagaagatgtggaggagacagagcagaacctggatgaggccaagcacgccgagaagtatgagcaggagatcaccaagctgaaggagcggctgcgggtgagcagccggcggctggaggagtatgaaagaaggctgctggtgcaggagcagcagatgcagaagctgctgctggagtacaaggcccggctggaggacagcgaggagcggctgcggcggcagcaggaggagaaggacagccagatgaagagcatcatcagccggctgatggctgtggaggaggagctgaagaaggaccatgctgagatgcaggccgtgattgatgccaagcagaagatcattgatgcccaggagaagagaattgtgtccctggacagcgccaacacccggctgatgtctgccctgacccaggtgaaggagcgctacagcatgcaggtgagaaatggcatcagccccaccaaccccaccaagctgagcatcacagaaaatggagagttcaagaacagcagctgctag

SEQ ID NO: 150148 - DNA, 3420 bp, Artificial Sequence
  derived and/or modified sequence
atgcagacccccgaggtgcccgccgagcggagcccccggcggcggtctattagtggtacaagtacgtctgaaaaacctaattctatggacacggcaaatactagtccattcaaggttcccggcttttttagtaagcgactaaagggctccatcaagagaacgaagagtcagtctaagctggatcgcaacacatctttccgcctgccatcgttacggtcaaccgatgataggagccggggacttcctaaacttaaagaatctcgcagccacgaatcactcctgtcgccgtgttccacagtagagtgcctggatctaggacggggggagcctgtgagcgtcaagcctctgcattctagtatcctagggcaggacttttgtttcgaggtaacctacctatcaggctccaaatgtttcagttgcaactccgctagcgagcgcgacaaatggatggagaacctacggcggactgttcagcctaataaggataattgtcgaagagccgagaacgtgctgagattgtggataattgaagcaaaagacctcgctcccaagaagaaatatttctgtgagttgtgcctggatgacacactttttgcccgcacgacaagtaaaactaaggccgacaacatcttctggggggagcacttcgagttctttagtttgcctcctctgcactcgataacggtgcacatctacaaggatgtggaaaaaaagaaaaaaaaggataagaataactacgtcgggctggtgaacattcccacagcttcagtcacggggaggcaattcgtagagaaatggtatccggtgtctacacccacgcccaacaagggcaagaccggcggaccatccattcggattaagtctcgcttccagactattacaatcctgcctatggaacaatacaaggaattcgcggaattcgtgacatcaaattacaccatgctgtgttctgtgctcgaacctgtcatatctgtaaggaacaaagaggaacttgcctgcgcgctcgtgcacatcttacagtccaccggcagggccaaggatttccttaccgatctggtgatgtccgaggttgacaggtgtggggaacacgatgtgctgatttttagggaaaataccatcgctaccaaaagcatcgaagaatacctaaaactcgtcgggcagcagtacttgcatgacgcccttggtgagttcatcaaggccctgtatgagtctgacgagaactgtgaggtcgacccatcaaagtgcagctcctcagaactgattgatcaccaaagcaacctgaaaatgtgctgtgaactagcattttgcaagattattaattcctattgcgtgtttccaagggagctgaaagaggtgttcgctagttggaagcaacaatgtctgaatcgtggaaaacaggacatctctgagaggctgattagcgcatctctatttctgagattcctatgtcctgcaattatgagcccgagtctgttcaacctcatgcaggaatatccagacgatcggactagtcggactttgacgctcatcgctaaagtgatccagaacctggcaaactttgcaaagttcggcaacaaggaggaatacatggctttcatgaatgacttcctcgagcatgaatggggagggatgaagaggttcctcctggaaatcagtaacccagatacaatcagcaacactccggggttcgacggatatatagaccttggaagagaattgagtgttttgcatagtttgctttgggaagtggtgtctcagctggacaagggcgaaaattcctttcttcaggcgacagtggcaaaattgggacctttaccaagggtcttggcagatatcacaaaatcattaacaaaccctacaccaattcagcagcaactgcgtagatttaccgagcataactcatctccaaacgtgtccggatccctgtcctctggattacagaaaatcttcgaggatcctacggattcagatttgcacaagttaaagtccccaagccaagacaatacagattcctatttccggggaaagacactgctgctggtgcaacaagccagtagccagtctatgacctacagcgagaaggacgaaagggaatcttccctacccaacggtcggtccgtctcactcatggacctccaagatactcatgctgcccaggtcgagcatgcctccgtcatgctcgacgtacccattcgtctgacaggatcacagctgagcatcacccaggttgctagtattaagcaactgagagaaacacaatccactccacagtctgctcctcaggttcggcgcccactgcatcctgcgttgaatcagcccgggggtctccagcctctatcctttcagaaccccgtgtaccacctcaacaatccgatcccagccatgcccaaagcatccatagactcctcgctggagaatttatccacagcgtctagtagatcccagagcaattctgaagattttaagctgagcggccctagcaatagtagcatggaagatttcaccaagagatcaacacagtctgaagactttagtcggaggcacacagttcccgataggcacatcccactggccctgcccagacaaaactcaactgggcaggctcagattcgtaaagtagatcagggtggactaggcgcacgggcaaaggcgcctccatctctgccccatagtgcctccctgagatctaccggcagtatgtcagtcgtatccgccgctctcgtagcggaaccagtgcagaacggctcccgtagcaggcaacagagtagctctagccgagagtcccccgtccccaaggtgcgagcaatccaacgacagcagactcagcaggtgcagagccccgtcgactctgcaacaatgtcaccagtggagaggacagcagcatgggttctgaacaacggccagtacgaagaagatgtggaggagacagagcagaacttagatgaggcgaagcacgcagaaaagtacgaacaggaaattaccaaactcaaggaacgccttcgggtgtcatccaggagacttgaggaatatgagcgtcgcttgctggtgcaggaacagcagatgcagaagctgcttttggagtacaaggctcgcttggaagactctgaagagaggttgcgccgccaacaggaggagaaggacagccagatgaaatccattatttcaagattgatggccgtggaagaagaactgaagaaggaccacgccgagatgcaggccgtcatcgatgctaagcagaaaatcatagatgcgcaggaaaaacgtatcgtgagtctcgactctgccaatacaaggctgatgtctgcactcactcaagtgaaagagcggtacagtatgcaagtgcgaaacggaatctccccaaccaatccaaccaagctatctattactgaaaatggagagtttaagaacagctcatgctag

SEQ ID NO: 150149 - DNA, 3420 bp, Artificial Sequence
  derived and/or modified sequence
atgcagactcccgaggtccctgctgagcggtctccaaggcgcaggagtatcagtggcacgagcaccagcgagaagcccaattctatggacaccgccaacacctccccgttcaaagtccctggctttttttccaagagactgaaaggctccatcaaaagaactaagtcccagagtaagttggaccgcaacacttctttcagactgccaagccttagatctacagacgacaggagccggggattacccaagctcaaagagtcccgaagccatgagtctctccttagcccatgttcaacagtggaatgcttggacctcggtagaggcgagcctgtgtcggtcaaacccctccactcctctatcctcgggcaggacttctgctttgaggttacctacctgtccggaagcaaatgtttttcctgcaacagcgcctcggagagagacaagtggatggagaatctccggaggaccgtacagcctaacaaggacaactgccgtcgcgctgagaacgtgctgaggctatggatcatcgaagcaaaagatctcgcgcctaaaaagaagtacttctgtgaattgtgtctagatgataccttgtttgcacgcaccaccagtaagactaaagcagacaacatcttctggggcgaacacttcgaattctttagcctgcccccactccactctattactgtgcacatttacaaggatgttgaaaaaaaaaagaagaaagacaaaaataactacgtcgggctcgtcaatattcctaccgcctccgtgactggtcggcagttcgtggagaaatggtacccagtctctactcccacccccaacaagggaaaaactggtggccctagcataagaatcaaatcccgtttccagactatcaccatactgccaatggaacagtacaaggaatttgctgagttcgttacgtctaactacactatgctgtgttccgtcctagaacccgtcatttccgtgaggaataaagaggagttagcctgcgccctggtccacattcttcagtcaaccgggcgtgctaaagatttcctgaccgacttagtgatgagtgaggtcgatagatgtggggagcatgatgtgttaatcttcagggagaataccattgctaccaagtctatagaagaatacttgaaacttgtcggccagcagtacctgcacgatgcactgggggaatttataaaagcactctacgagtctgacgagaactgcgaggtggatccttcaaagtgttcctcctccgagcttatcgaccaccaaagtaacctaaaaatgtgctgtgagctggccttctgcaaaatcattaacagctattgcgtctttcctcgggaactcaaagaagtctttgccagctggaagcaacagtgcctcaatcgtggaaagcaggacatttctgagaggttgatttccgctagcctcttcttgaggtttttgtgtcctgcaattatgagtccaagtctattcaaccttatgcaggagtacccggacgatagaacaagccggacgttaactcttatagccaaggtgatacagaacctggccaattttgccaagttcggcaacaaagaagagtatatggcttttatgaacgattttctggaacacgagtggggcggaatgaagagattcctgcttgaaatcagcaaccctgacacaatttctaacacacccggtttcgacggatatatcgatttgggccgtgagctgtcagtgctgcattctctgctgtgggaagtcgtaagccagctggataaaggcgagaactcctttttacaggcgacggtagcaaaactcggacctctcccaagggttctggctgacatcaccaaatctcttaccaaccccacccccatccagcaacagttacggcgtttcacggagcacaactcctcccctaatgtcagtggcagcctctcttctggcctgcagaagatcttcgaagatcctacggactcagaccttcacaagctgaagagtcccagccaagacaacacagactcctattttcgcggtaagaccctgctgttggtccagcaagcgagcagccaatcaatgacatactctgaaaaggacgagcgtgaaagctccttgccaaatgggcgaagtgtcagcttgatggatttgcaggacacacacgccgcacaggttgagcacgcaagtgtgatgcttgatgtgcccattcggctgacaggctcgcagctgagcattacccaagttgcttccataaaacagctgagggaaacccagtccacccctcagtcggcgcctcaggtcagaagaccgctccaccccgctttgaaccagcctggagggcttcagccgctttccttccagaaccccgtgtaccacctcaataacccgatacctgccatgcccaaggctagtattgattccagcctcgagaatctatcaactgcctcctctcgcagccaatccaatagcgaggacttcaagttgtcagggccttctaactccagtatggaagattttactaaaagaagtacgcagtctgaagattttagccggagacacacagtgcctgaccggcatattccactggctctgcctcggcaaaattctactggacaggcccagatccgcaaagtggatcaagggggactgggcgctagggctaaagcccctccctcccttccacacagcgcaagtctgaggtctacaggctctatgagcgtggttagtgccgcattggtggctgaacctgtgcaaaatggatcccggtctcgacagcagagcagcagcagtcgggaaagcccagttccgaaggtgagagcaatccagcgacaacagacacagcaggtacaaagtcctgtggacagtgctaccatgagcccagtagagcgcaccgccgcatgggtgcttaataatggtcagtacgaagaagatgttgaagaaacagagcagaatcttgacgaggcaaaacatgctgagaagtacgagcaggaaatcaccaaactaaaagaaagactgcgcgtgagctctagacgactggaagagtacgagagacggttgctcgtgcaagagcagcagatgcagaagctgctcttagagtataaagccaggctggaagattctgaagagcggctcagacgtcagcaggaggaaaaagatagtcagatgaagtcgatcatttccagactcatggcagtagaggaggagctgaagaaggaccacgcggagatgcaggctgtaattgacgccaagcagaagataatcgacgctcaggagaaacgcatagtaagcctggactcagctaacactcggcttatgagcgcgttgacccaggttaaggaacggtatagcatgcaggtacgaaatggcatctccccgacaaatccaacaaagctgtccattactgagaacggcgaattcaagaattcctcatgctag

SEQ ID NO: 150150 - DNA, 9156 bp, Artificial Sequence
  derived and/or modified sequence
cgaaatgagagcaaaaagggagagagcaggaaagcgagcacaggcgagtacagtatacaaagtgttttgagtttctgactggcgtgccggaaagatcatgttagcacacccagaaacttcacacgatgcagaccccagaggtaccagcagaaaggtcccctcgtagacggagtatctcagggaccagtacatcagagaaacccaactccatggacactgcaaatacctcacccttcaaagtaccaggattcttcagcaagcgcctgaaaggctccatcaagaggaccaaaagccagtcaaagcttgacagaaacacgagctttcggcttccatcccttcgcagtacagatgacaggtctcgtgggctgcctaaactaaaagagtcacgttcccatgaatccttgctgagcccatgcagcacagtggaatgtctggatcttggtagaggggaacctgtatcagtgaaaccacttcatagtagcatccttggacaagacttctgctttgaggttacctacttaagtggaagtaaatgcttcagctgtaattctgcttctgagagagacaagtggatggaaaaccttcgcaggacagttcaacctaataaggacaattgcaggcgagctgaaaatgttcttcgtttatggatcattgaagccaaggaccttgcccctaaaaagaaatatttctgcgaactgtgccttgatgataccctctttgctcgtacaaccagcaagaccaaagcagacaatattttctggggcgaacattttgaattcttcagccttccacctcttcatagtatcacagttcacatttacaaggatgtggaaaaaaagaaaaaaaaggacaagaataattatgtagggctagtcaacatccccactgccagtgtgactggtcgccaatttgtagaaaagtggtatccagtgagtacacctacacccaacaaaggaaagacaggaggaccttctattcggattaaatcacgtttccaaactatcaccattctgcctatggagcaatacaaagaatttgcagaatttgtcaccagcaactacaccatgctgtgttctgtccttgagccagtaattagtgtgagaaataaagaggagttggcttgtgccttagtgcacattcttcaaagtactggcagagccaaggattttctgactgacttggtgatgtctgaggtggatcgttgtggagagcatgatgtcttgatcttcagagagaacactattgccaccaaatccattgaggaatacctcaagttggtgggacaacagtatcttcatgacgcactgggggagtttatcaaagctttgtatgagtccgatgagaactgtgaagtggatcccagcaaatgttcatctagtgaactgatagaccatcagagcaacctgaaaatgtgctgtgagctggctttctgcaagatcatcaactcttactgtgttttccctcgtgagttgaaagaagtgtttgcatcatggaagcagcagtgcctgaaccgtggcaagcaagacatcagcgagaggctcatcagtgcctcattatttctccgttttctgtgtccagccattatgtctcccagtcttttcaaccttatgcaggagtatcctgatgaccgcacatctcggactctaactcttattgccaaggtcattcagaacctggccaactttgccaagtttggtaacaaagaggaatacatggcattcatgaatgattttttagaacatgaatggggtggaatgaagcgctttcttttggagatctctaatccagacaccatctcaaacaccccaggctttgatggttacattgatctgggccgagagctttcagttttgcattccttactgtgggaagtagtttcccaacttgataagggtgaaaattccttcctacaggcgaccgtggcaaaattggggcctctccctcgtgttcttgctgatattaccaagtcattgactaatcctacgccaatacaacagcaactgagacgcttcactgaacataactccagtccaaatgtcagtggaagcctctcctctgggctgcagaaaatatttgaagaccccactgacagtgatttgcataaactaaaatctccaagccaggacaacacagacagctacttcagagggaaaacattattgctggttcagcaagcctcctctcagagcatgacttattctgaaaaggatgaaagggaaagtagccttcctaatggtcggagcgtctccctcatggacctccaggacactcatgctgctcaagtggagcatgcatctgtcatgcttgatgtgcctatacgcttgaccggaagccagctttccataacccaggtggccagcatcaaacagctgcgggaaacccagagcactccccaaagtgcaccccaagtgagaaggcccctgcacccagccttgaaccagccaggtggccttcagcccttgtcgttccagaaccctgtctatcacctcaataacccaattccagcaatgccaaaggcctctatagattccagtttggagaacctaagcactgccagttccagaagccaaagtaacagtgaagacttcaagctcagtggacccagcaatagcagcatggaagatttcactaaacgtagcactcagagtgaggacttctccaggcggcacacggtgccagatagacacatacctcttgctttgccacgacaaaatagtactgggcaggcccagatccgaaaagtggaccagggtgggttaggtgcccgagccaaagccccaccatccctgccacacagtgcttctttacgtagcaccgggagcatgtcagtggtgtccgcagccctggtggccgaacctgtgcagaatgggagccggtcccggcagcagtcctcttcctccagagagagccctgttcccaaagttagagcaatccagagacaacagacacagcaggttcagtcacctgtggactctgccacaatgtccccagtagagaggacagcagcctgggttctgaacaatgggcagtatgaagaggatgtggaagaaactgagcaaaatctagatgaagccaagcatgctgagaagtatgaacaagaaattactaaactgaaggagcgcctgagagtttccagccggcgactggaggaatatgaacgccgcttgctggtgcaggagcagcagatgcagaagctgctgctggaatacaaggcccgactggaggacagcgaggagcggctccgaagacagcaggaagaaaaagatagccagatgaaaagcatcatcagcaggctaatggctgtggaagaggaactgaagaaggatcatgctgagatgcaagcagttattgatgcaaagcagaaaataattgatgcacaggaaaaacggatcgtgtccctggattcagccaacaccagactgatgagcgcgctgacccaagtgaaggagcggtacagcatgcaggtccgcaatggcatctcccccaccaaccccaccaagctttccatcacggagaatggtgaattcaaaaacagcagctgctgacgggctttgtctgtggaaggagacagaaggaaattgacccactctcctatctccagacctttacctagcccctccaggtttacagaatgttgctacttcacaatggcgatgtggtgagaaactcctgaatgaagaaaggaaccttgtctttcagggcataaggcggcgacttccaaggtcaatgcttttcccccacatctctatgtacatagggaacttagttctgggccatgtacagaaaatatcactgtaatataccaaaaggaagttaataatgtagattacctttttgattattgctatttttattattgttttcctcttgttgaaagcactgcagttgttacaggaagtaaagtaggaactgttgtgtgagcgagacatgagcctgtaggttcagtaggtagagaccaagcatctatctgatagaagcacatggagtgcaataggacattgtgagaaggaatttttcagggattcatctactagtttaaaaaccccactctggccctcttgtcctttcagaaaacatgcaaataccaagatccatacaaaacaataatttattccactgatcaaccaagactggttctggttggacagctaatctgatttggggattcactgtttcagaggacacagacaaaagctgttgcatcaaaactggactttaggagtaatttctattgaactcctgtcaatatgtttatttcctctgtctacagcagatgggagtcttctcttttagacaggggctttttgtttttaaccccaattgtaataaagggtgttctttttcctctttagagtttacaaaactataaatatttgtgtctccacataccatcttcatcttcacacattcactgtgctttcctccccatagtgggagctgtcatcaccaacagggtttactctcccctggagaggttatttaaatagctgtccataagccatccagatcaacaccctttcttccatacagaaaagggctaaccataccacagctggaatctctgaatatttcctattaaaaattttttctatgtgttgttataatttttgtttgggataaagactctatccattgtactagcaaatctatggggggtaattttatctccatctttaacttttaaagtacttcttccccttatcccctcaataaagaaaggaaatccaaatttgaagcatcactctcttaaaagaaaaagaaaataatggaaagtgtcaggatggcacattccagttattattccaatgctcgtagatctgacaataatgacccaatttcaacacttgtcatccatagccttattattatagaacagaaaaagtcatggaaacgaattcatttccttttttccagaggtgtgcaatgtcatcttgaatgcaaccttgattaccagaagtatggaaggttacatgttaaacagacattatatatacaaatatatatataatatatattcacacatatgtacatataactgcacaaataggaaaagttcatgccttctatgctgttcagatataatgttaaaagggtctcaaacctctttaagcaagatctaagtagttgttttatattgagaaagcaacaatgtttctcgaataagttgatgttgattttaaattataagctttaaagaattttttttctagaaaaaggggatggaaaaaaaaggacctgagggagccatatgcatcaagtgagtgtttctccataacagaatatttataagagaacatgtatagtgccctcttttgagtgatgccgacagacaccaagccctccttttcaccaagtcccaggcttgcattccagcctcttgagctctgccctctctcaggtggatctttgtgttggaccttacgtttcagcaacctcaccatggccacataacccacaaccttttaaaacagtttctttcatagcaatccctgtttctgccagacagatctaaaatgggagtttctcactgtgtttatctgatctgcacactttatatccagctgttttggcacttttacgttttcttcacctttggttttggtttgcaaattcttacaccttctctccaagcggagggcacactgtggtcaaaatcacttattttattaggaaaaagaggtaactgttccaaagtgtagtgtcctttgttgaaggaggagggatgtaagcatagatttgttcttgtttctggctattctcagctcaagccatgtttaattcattctttgtaaaagccttcaattgtgccacagaaaacctggtaagagaattgtcagtttcattggccataagtatgtaatgtgggtgatgtcttgccattgaggtttggaagctcttaagtgccgattatggattacagagggctgataaaattacttatattgggaattgagagaagccccaaaaaatcaaatgtgcttttgatggatagagtgtatcttattagcattatgggagctccttagagggctgtcttcactgaaagatttaatgcccaaaacatttggacagattatgcagccttctactaccaggttatcttgaatgaagaagaaatagtaaaaaataataataatagagcattaccaataagctaaaagttcagagttgctgatagatgttaaatgttaagttatcctgtgagcctactcctgtccaaccttttttctcagtatttctttagagaatgctgcaatctgtataagttactctgaaggattttttaagaagagaagccaccaacaggtgataatttttatggagatgtttcttaattggctttccctcagttcaagtaggtaaataactttgtttgctgggaggaggtacatggctgaagagaggcaaatagattaagatagcaatgtcttgcacttcctgtttccctcaaaacaacaccacattgtggggcgcaggatagatcagggttgagtggaatttggaattcaggtgaagtgcttgtaaagtgcatgtctagctgacaacagacttgaccattaatgaggacagtgttggtaggagtcagaaaagagcttcatattccccttttatattactgaagcaataagcaatctgagctgaagcagcaaaaagagtcacatttccatcaggtcatcatattccctgagtctctgcagcaaaagccatgtcagaggggagattataactaggtaactataacaagcacttgagcacttaccatgttccaagcactatcaccaaggtactgttggggtttatggcagtctaacggtaagaaaaatgtggtaaaatgaggtaatcatgctgctatagctttttgctttttttcatatagtatcaagttggtcagaattagctttctctgactggtctgcttccgtgtttctctgtgatggtgttaagattatgaaagaaaaagaagattacctaagactgctacaagtgttaactatatgcccttaagaatgagcttgactttggaagtaaagcttttcagatcttagtctacccggggcctttgttgatgggtctgtggttctgtagacccctggctttcactgtgttctcagaggtacaccagattgagagcagagttcttctttggaagtcccagagcaaaataactgccatcaagtgagtttgcattcgtatttgtttccccttccatagagggttagttttagttacctctagcttggagttcctgagaaggctggttataggactgagcgtgggaaaggaaccctcttcaggattacctcagtcccatcagtctaccccattgtgacattgagcccaacacacacgcttgacaccagactagacttgtcacagggccaaacccaacagccacatgccatagcttcactgcattttcagctacacctttggaggccaccttctcctatcaactgtggaaagccagaagggctcccttctccattctccttccctttttcaagtctaatagtgaaatctcctgcttaccccagcagtaaatagttgccttcctaccccttacctgggggccgataatttgagatactttgttttttcaatgcgtcagttgaaggatttagtttcttaaaagcaagaaatgttggagtgttgaatttttaaatagaatctcttttcatgtttgaatgattgttattagttctagaagcattctctttgtcatgacccgattatgtatactcttgggtttaggaaggacaaaagtgatgaaatttgcatgagatagaataaatatcttaggaggagtgaaagaacctgaggaagagacacgaccctaagggaatgaatgcataagcagtcttctcagtagcccagagtttccaggaaacaggaatatttatatcccttgcccactcttaaaatacatagatacataaaaaggcagtctctgtagacaacacatgcacacacccacacaaaacataattcctggggcttcctttttctgaatgttaatccattttatcgagcagtgattcccaaactttgagattttcagattttatgctctcgtctgttagattttatgacattctatcatcctaaaaaatgtactatatgtgttatatgtatatataagttaaagcaacttgaaattgacttggtttggcattgtctcaagaaccctagatatcattattgataccatggggaatcatagaaataaagttgaatatcattgatctgagagtaggatccagaaataagtagtttcagttcctgatcagttaagcctcaagtgtttgagtaaccaacacagcaagacttgggaaatgcagtgagcacccgaggaaaggaaagtggtagtctttgcctgcatttcagcatgcattttcctttcctactcagttgctatcttccacttaaataccctcatttgaccctaggaagttttttgtttttttttttagtttgagacttaaaaccagatttatttgttgttgtagagagatttccacagaagttgtgttttagggacctccatcatctttgtgggggtacagatatttatgtgtaaatatcattttatgtgatttccaaattttcgagggaaacatttcaattcccagttcaacaaaaggttaaatactaattgactcaatgaccaccttcaggaaagttaaatagtaaattaggttaaattttgactggtgcttagacatttcctagttatattaacttaagcagacagcagcacattaacctgagttacacctgtgaggaaatgaccttctaaatttgattttgtttttcatctccagggccttaataagagtgtgttaacacacgactattttacaatgatagctctaaataatttattttttatttcaagaaagagaaatacaccttagaaaaacaaaacccaagattttattttatttttaaagccatatttttgtgctagtagcatttagattattccgtatgtgagatccgtatcagcatttcattacctgggtttgttctaaagaagatttatttttgttctgtgaataatttttgacagttcttgtacatgtacagatatagatacgtttgaggtcttttattgatattcctacaaagaatacaaataaactttaactttaaaca

SEQ ID NO: 150151 - protein, 81 aa, Artificial Sequence
  derived and/or modified sequence
MGQLCCFPFSRDEGKISEKNGGEPDDAELVRLSKRLVENAVLKAVQQYLEETQNKNKPGEGSSVKTEAADQNGNDNENNRK

SEQ ID NO: 150152 - DNA, 246 bp, Artificial Sequence
  derived and/or modified sequence
atgggccagctgtgctgcttccccttcagcagagacgagggcaagatcagcgagaagaacggcggcgagcccgacgacgccgagctggtgagactgagcaagagactggtggagaacgccgtgctgaaggccgtgcagcagtacctggaggagacccagaacaagaacaagcccggcgagggcagcagcgtgaagaccgaggccgccgaccagaacggcaacgacaacgagaacaacagaaagtag

SEQ ID NO: 150153 - DNA, 2461 bp, Artificial Sequence
  derived and/or modified sequence
aattactgcagttgtctgtaggagaaagggctcattgtggtttttctcgactacctttcttaaagacatatgcaaatagccagacagaacacatggcactgacctatggccagggactcacagttttgtgagaatacgggagcgtatagccacttccttcactgaatgccagtcccagagcagttgcattaggctggaggactggaggtggagccttttttgctcacggcagcaagttcccttctcctttctctcccccggcggcgtgtgcattggctcttcaagctgcctgtgctgctccgtggagtgaaaaaggcagggtgtgctcgcagactgtgctataaactgcaatttctatttggggtcctcacggagaagaacaccaggaaagacagacaggaccagtgccatgggccagctttgctgctttcctttctcaagagatgaaggaaaaatcagtgaaaagaacggaggggagcccgatgacgctgaactagtaaggctcagtaagaggctggtggagaacgcggtgctcaaggctgtccagcagtatctggaggaaacacagaataaaaacaagccgggggaggggagctctgtgaaaaccgaagcagctgatcagaatggcaatgacaatgagaacaacaggaaatgagcccggaacgcaggcccccatgtctctgtgcaaagcctccctgcttccctctgctgagtctagggactgacttgcagcgtgctgtttaagttaagtttctctggtgcaatctgtgaagattgcctaatacttttcatgatcgatgtgttcgcattgctgaaacacaacagaagaaaaatggagtgctgggactggcagaggaaattaattgatgaaagaagaatggcccaagtttcattcgccctcagccacgcacaagggaaagggaactttgggttatgcctcctggacgcaaattaaaggccgagaaagaggccttgccatcaatggaatactgccatttatattgcttagcagggcatttgactactttatctgaggccagaactctcacacacagctatcaagtgctaagtttaaaataatcactgttggaattgtcatctgtacaattagtccataatgtttcatgtttgtcctaagtgtgctgttgctatgcagtgtgatctttatttatagtaaattatgtttcatgtaaatgatatatttttggtgaaatgcaaccttttctataaaatgtgggcaacattttaaagtttttttaaaatcctattttgataagtcagtatgccatatttaatgaaatgttattatataatttttttttcttaggcaagaaacctattggaattcgagacttaattaatgaagctttgcatcgagaaacgatgggtctgaagtccaaagtgaaacagataaaggaacttttattaaagcctgagactcaggccagaattaggagggagctttttgaaggaagacttattaacaacagtaattcagcaaatgacgttgatttcagcacaactttgacataagctctacattgcgattgtgacaacatagcttatgaaatcttttcagcttattaagtagctctttggtaaacaccaaagaagtttctgatagtgtctgcacaacagcaaaccaacatttggtgaggaattagcaatttcttgccaaagaaaattgattctgcccaattattttttgagctacacttgtgttttagaatatctgtttctgtaatattgagagttattttatagaaatgatttcttaattagctgttgtgagatatttctcgggtccttgcagaaaaaaacatacagactgtgaacaaatcattcacaaacagaataaaacagagccaacaacagtattttaagggtcacttgcctcctgttgacacaattgttgctaaatcaaaagaagcgttgtccaggtgtgtctacatctagtgttacttttaatgagaatttgaatgtttattgaacaatagtacttgaatgaacatttataaatgtaattattgcgatcactggttaagaatgttttatatatccttataatatttttcactgatcaaaatgttgttctgctttttcatttcttaaggaatacatgtttgggatttttattttttacgtgtccgaagataagctccaggtcttatcgtatcccttgccatctgaacttgtttgcactgcttctgtttgaaagagcatcttgaaaaacttccccggtatgatgattgttggtaacaactttttctatagtcattgatggagtagatcatgatggaggggaaatcactggagatcaaatatgtaaaatcatttcaaatataaaatccagtttactcatggattttagctattttttcactgggtaaattatactacatttatttacaaatgagtttatgcattttcatggctcttaataaacatattgttttccctt

SEQ ID NO: 150154 - DNA, 246 bp, Artificial Sequence
  derived and/or modified sequence
atgggccagctctgctgtttcccattttctagagatgaaggaaagatttcagagaagaacggcggggagccagatgatgcagagttagttcgcctcagcaaaaggctggtggaaaacgcggtgctgaaggctgtccaacagtatctcgaagaaacccagaataaaaataaaccaggagaagggtcatcggttaagactgaggcagccgatcagaatgggaatgacaacgagaataataggaagtag

SEQ ID NO: 150155 - DNA, 246 bp, Artificial Sequence
  derived and/or modified sequence
atgggccagctgtgctgcttccccttcagcagagatgagggcaagatcagcgagaagaatggaggagagccagatgatgctgagctggtgcggctgagcaagaggctggtggagaatgctgtgctgaaggctgtgcagcagtacctggaggagacccagaacaagaacaagccaggagagggcagctctgtgaagacagaggccgctgaccagaatggaaatgacaatgaaaacaacaggaagtag

SEQ ID NO: 150156 - DNA, 246 bp, Artificial Sequence
  derived and/or modified sequence
atgggccagctgtgctgcttccccttcagccgggacgagggcaagatatcagaaaagaacggcggggaaccagatgatgctgagctcgtgagactgtccaagaggctggtggagaatgccgtactgaaggctgtgcaacagtacctggaagagacacagaacaagaacaagccaggcgagggtagctcagtgaagaccgaggcagctgatcagaatggaaatgataacgagaacaaccgcaagtag

SEQ ID NO: 150157 - DNA, 246 bp, Artificial Sequence
  derived and/or modified sequence
atgggccagctgtgctgctttcccttcagtagagacgaggggaagatctctgagaagaacggaggtgagcccgacgacgcagaactagtgcgtcttagtaagcgtcttgttgagaatgcagtactgaaggcagttcaacaatatctggaagagactcagaacaaaaacaagcctggggagggtagctcagtaaagaccgaggccgcagaccagaacggaaatgataatgagaataataggaaatag

SEQ ID NO: 150158 - protein, 636 aa, Artificial Sequence
  derived and/or modified sequence
MRGGRGAPFWLWPLPKLALLPLLWVLFQRTRPQGSAGPLQCYGVGPLGDLNCSWEPLGDLGAPSELHLQSQKYRSNKTQTVAVAAGRSWVAIPREQLTMSDKLLVWGTKAGQPLWPPVFVNLETQMKPNAPRLGPDVDFSEDDPLEATVHWAPPTWPSHKVLICQFHYRRCQEAAWTLLEPELKTIPLTPVEIQDLELATGYKVYGRCRMEKEEDLWGEWSPILSFQTPPSAPKDVWVSGNLCGTPGGEEPLLLWKAPGPCVQVSYKVWFWVGGRELSPEGITCCCSLIPSGAEWARVSAVNATSWEPLTNLSLVCLDSASAPRSVAVSSIAGSTELLVTWQPGPGEPLEHVVDWARDGDPLEKLNWVRLPPGNLSALLPGNFTVGVPYRITVTAVSASGLASASSVWGFREELAPLVGPTLWRLQDAPPGTPAIAWGEVPRHQLRGHLTHYTLCAQSGTSPSVCMNVSGNTQSVTLPDLPWGPCELWVTASTIAGQGPPGPILRLHLPDNTLRWKVLPGILFLWGLFLLGCGLSLATSGRCYHLRHKVLPRWVWEKVPDPANSSSGQPHMEQVPEAQPLGDLPILEVEEMEPPPVMESSQPAQATAPLDSGYEKHFLPTPEELGLLGPPRPQVLA

SEQ ID NO: 150159 - DNA, 1911 bp, Artificial Sequence
  derived and/or modified sequence
atgagaggcggcagaggcgcccccttctggctgtggcccctgcccaagctggccctgctgcccctgctgtgggtgctgttccagagaaccagaccccagggcagcgccggccccctgcagtgctacggcgtgggccccctgggcgacctgaactgcagctgggagcccctgggcgacctgggcgcccccagcgagctgcacctgcagagccagaagtacagaagcaacaagacccagaccgtggccgtggccgccggcagaagctgggtggccatccccagagagcagctgaccatgagcgacaagctgctggtgtggggcaccaaggccggccagcccctgtggccccccgtgttcgtgaacctggagacccagatgaagcccaacgcccccagactgggccccgacgtggacttcagcgaggacgaccccctggaggccaccgtgcactgggccccccccacctggcccagccacaaggtgctgatctgccagttccactacagaagatgccaggaggccgcctggaccctgctggagcccgagctgaagaccatccccctgacccccgtggagatccaggacctggagctggccaccggctacaaggtgtacggcagatgcagaatggagaaggaggaggacctgtggggcgagtggagccccatcctgagcttccagaccccccccagcgcccccaaggacgtgtgggtgagcggcaacctgtgcggcacccccggcggcgaggagcccctgctgctgtggaaggcccccggcccctgcgtgcaggtgagctacaaggtgtggttctgggtgggcggcagagagctgagccccgagggcatcacctgctgctgcagcctgatccccagcggcgccgagtgggccagagtgagcgccgtgaacgccaccagctgggagcccctgaccaacctgagcctggtgtgcctggacagcgccagcgcccccagaagcgtggccgtgagcagcatcgccggcagcaccgagctgctggtgacctggcagcccggccccggcgagcccctggagcacgtggtggactgggccagagacggcgaccccctggagaagctgaactgggtgagactgccccccggcaacctgagcgccctgctgcccggcaacttcaccgtgggcgtgccctacagaatcaccgtgaccgccgtgagcgccagcggcctggccagcgccagcagcgtgtggggcttcagagaggagctggcccccctggtgggccccaccctgtggagactgcaggacgccccccccggcacccccgccatcgcctggggcgaggtgcccagacaccagctgagaggccacctgacccactacaccctgtgcgcccagagcggcaccagccccagcgtgtgcatgaacgtgagcggcaacacccagagcgtgaccctgcccgacctgccctggggcccctgcgagctgtgggtgaccgccagcaccatcgccggccagggcccccccggccccatcctgagactgcacctgcccgacaacaccctgagatggaaggtgctgcccggcatcctgttcctgtggggcctgttcctgctgggctgcggcctgagcctggccaccagcggcagatgctaccacctgagacacaaggtgctgcccagatgggtgtgggagaaggtgcccgaccccgccaacagcagcagcggccagccccacatggagcaggtgcccgaggcccagcccctgggcgacctgcccatcctggaggtggaggagatggagcccccccccgtgatggagagcagccagcccgcccaggccaccgcccccctggacagcggctacgagaagcacttcctgcccacccccgaggagctgggcctgctgggcccccccagaccccaggtgctggcctag

SEQ ID NO: 150160 - DNA, 1911 bp, Artificial Sequence
  derived and/or modified sequence
atgagaggggggcgaggcgcaccgttctggctctggcctctgccaaagctggcactgctgcccttgttgtgggtcctgttccagcggacccgaccccagggcagcgctggccctctgcagtgctacggggtgggcccgctcggagacctgaattgttcttgggagccactgggggacttgggcgcaccaagtgagctgcatcttcagtcccaaaagtataggtccaataaaacccagaccgtcgccgtggctgcggggagatcctgggttgcgatcccccgagaacagctgactatgtctgacaagctgctggtgtggggcaccaaagcaggtcagccactctggccccccgtgttcgtgaacctggaaacgcaaatgaaacccaatgctcccagacttggacctgacgtggactttagcgaggacgacccgctcgaggcaactgtacattgggcccccccaacttggccttcccataaagttttaatttgtcaattccattataggcggtgtcaggaggcagcttggacattgctagagccagagctcaaaacgattccacttacccctgtggagattcaagatcttgagttagccacaggctacaaggtgtacgggaggtgccgcatggaaaaagaggaagacctctggggggaatggtcccccattttatcatttcaaacgccaccctcggcccctaaagacgtgtgggtttcaggcaacctgtgcggcactcctggcggggaggagcccttactgctgtggaaagctccaggcccgtgtgtgcaggtcagttataaggtttggttctgggtgggagggcgcgagttgtctcctgaaggcattacctgttgctgttccctgatcccatccggcgccgaatgggcccgcgtgagcgctgtcaacgctacaagctgggagcctctcaccaatctctcgctcgtttgtctggattcggcgtctgcaccaagatcagtggcggtctctagcatcgccggctccactgaactcctggtgacctggcagcctggccctggagaacctctggagcatgtcgtggactgggctcgcgacggggaccctctggagaaattaaactgggtgcgcctgcccccaggcaatctgtccgcgcttctgccgggcaacttcaccgtgggggtcccatatcggatcaccgtgaccgcagtctcagcctctgggcttgcctctgcctcctctgtgtgggggtttagggaggaactggcccctctggtcgggcccaccctgtggcgcctgcaagatgccccccccggaacacctgcaatagcctggggtgaagtgcccagacatcagctccgcggccacctcacacattacaccctctgtgcgcagagcggaacaagtcctagtgtttgtatgaatgtaagtgggaacacacagagcgtgacccttccagatcttccctggggaccgtgcgagctgtgggtgactgcttccaccatcgctggacaggggcccccaggcccaattctgagactgcacctgcctgacaatactctgagatggaaggtgttacccggaatactgttcctctggggactgtttcttcttggatgcgggttatcactggcaactagcgggaggtgctatcacctacgtcacaaggtacttcccaggtgggtttgggagaaggtgccggaccctgcaaacagctcctccggtcagccgcatatggagcaggtgccagaagctcagccattaggggatcttccaatcctggaagtagaagaaatggagcctcctcctgtaatggagtcctcgcagcctgctcaggcgacggcacccctggacagcgggtacgaaaaacatttcctgccaacgccagaggagctgggacttctggggccccctcgtccgcaggtattggcctag

SEQ ID NO: 150161 - DNA, 3258 bp, Artificial Sequence
  derived and/or modified sequence
aaggctgtggaccccagagaaggtggcaggtggcccccctaggagagctctgggcacattcgaatcttcccaaactccaataataaaaattcgaagactttggcagagagtgtgtgtgtgtgtgtatggttgttgggcgtaggacaggtttcggggatgcgcggtacgcggtaccacccctcggaggcccccacccccagacgcccaggccgcctccccactccccctcaagcagccccagccggggactttccgtcgcggggaaggggcggggaccctgagcgaaaggtgcggaggcggcctgccggggtggttcggcttcccgttgccgcctcgggcgctgtacccagagctcgaagaggagcagcgcggccgcgcggacccggcaaggctgggccggactcggggctcccgagggacgccatgcggggaggcaggggcgcccctttctggctgtggccgctgcccaagctggcgctgctgcctctgttgtgggtgcttttccagcggacgcgtccccagggcagcgccgggccactgcagtgctacggagttggacccttgggcgacttgaactgctcgtgggagcctcttggggacctgggagccccctccgagttacacctccagagccaaaagtaccgttccaacaaaacccagactgtggcagtggcagccggacggagctgggtggccattcctcgggaacagctcaccatgtctgacaaactccttgtctggggcactaaggcaggccagcctctctggccccccgtcttcgtgaacctagaaacccaaatgaagccaaacgccccccggctgggccctgacgtggacttttccgaggatgaccccctggaggccactgtccattgggccccacctacatggccatctcataaagttctgatctgccagttccactaccgaagatgtcaggaggcggcctggaccctgctggaaccggagctgaagaccatacccctgacccctgttgagatccaagatttggagctagccactggctacaaagtgtatggccgctgccggatggagaaagaagaggatttgtggggcgagtggagccccattttgtccttccagacaccgccttctgctccaaaagatgtgtgggtatcagggaacctctgtgggacgcctggaggagaggaacctttgcttctatggaaggccccagggccctgtgtgcaggtgagctacaaagtctggttctgggttggaggtcgtgagctgagtccagaaggaattacctgctgctgctccctaattcccagtggggcggagtgggccagggtgtccgctgtcaacgccacaagctgggagcctctcaccaacctctctttggtctgcttggattcagcctctgccccccgtagcgtggcagtcagcagcatcgctgggagcacggagctactggtgacctggcaaccggggcctggggaaccactggagcatgtagtggactgggctcgagatggggaccccctggagaaactcaactgggtccggcttccccctgggaacctcagtgctctgttaccagggaatttcactgtcggggtcccctatcgaatcactgtgaccgcagtctctgcttcaggcttggcctctgcatcctccgtctgggggttcagggaggaattagcacccctagtggggccaacgctttggcgactccaagatgcccctccagggacccccgccatagcgtggggagaggtcccaaggcaccagcttcgaggccacctcacccactacaccttgtgtgcacagagtggaaccagcccctccgtctgcatgaatgtgagtggcaacacacagagtgtcaccctgcctgaccttccttggggtccctgtgagctgtgggtgacagcatctaccatcgctggacagggccctcctggtcccatcctccggcttcatctaccagataacaccctgaggtggaaagttctgccgggcatcctattcttgtggggcttgttcctgttggggtgtggcctgagcctggccacctctggaaggtgctaccacctaaggcacaaagtgctgccccgctgggtctgggagaaagttcctgatcctgccaacagcagttcaggccagccccacatggagcaagtacctgaggcccagccccttggggacttgcccatcctggaagtggaggagatggagcccccgccggttatggagtcctcccagcccgcccaggccaccgccccgcttgactctgggtatgagaagcacttcctgcccacacctgaggagctgggccttctggggccccccaggccacaggttctggcctgaaccacacgtctggctgggggctgccagccaggctagagggatgctcatgcaggttgcaccccagtcctggattagccctcttgatggatgaagacactgaggactcagagaggctgagtcacttacctgaggacacccagccaggcagagctgggattgaaggacccctatagagaagggcttggcccccatggggaagacacggatggaaggtggagcaaaggaaaatacatgaaattgagagtggcagctgcctgccaaaatctgttccgctgtaacagaactgaatttggaccccagcacagtggctcacgcctgtaatcccagcactttggcaggccaaggtggaaggatcacttagagctaggagtttgagaccagcctgggcaatatagcaagacccctcactacaaaaataaaacatcaaaaacaaaaacaattagctgggcatgatggcacacacctgtagtccgagccacttgggaggctgaggtgggaggatcggttgagcccaggagttcgaagctgcagggacctctgattgcaccactgcactccaggctgggtaacagaatgagaccttatctcaaaaataaacaaactaataaaaagcaaaaaaaaaaaaaaaagaaaagaaaaaacactgcatttgggcaccatctcagctcccttgcatccaggtgcagcatggactgagttcttgacaacagaatgtggtcagaagtgacatatgccaacacggggtctgggtgggggctcccccacatcctttccttgcctatgagctggaacataacacatgcctatgatccagctttggtcatacccaaggggaaggtggagcaagaaatgaaaaggaacctgaatccctgaatgactgcatggatagaaccactaagaaaaataaacttttatatttttata

SEQ ID NO: 150162 - DNA, 1911 bp, Artificial Sequence
  derived and/or modified sequence
atgagaggaggccgcggggcccccttctggctgtggcccctgcccaagctggccctgctgcccctgctgtgggtgctcttccagaggacccggccccagggcagcgctggccccctgcagtgctacggcgtgggccccctgggggacctgaactgctcctgggagcccctgggggacctgggcgcccccagcgagctgcacctgcagagccagaagtaccgcagcaacaagacccagacagtggccgtggccgccggccgctcctgggtggccatcccccgggagcagctgaccatgtctgacaagctgctggtgtggggcaccaaggccggccagcccctgtggccccctgtgtttgtgaacctggagacccagatgaagcccaatgccccccggctgggcccagatgtggacttctctgaagatgaccccctggaggccaccgtgcactgggccccacccacctggcccagccacaaggtgctgatctgccagttccactaccgccgctgccaggaggccgcctggaccctgctggagcctgagctgaagaccatccccctgacccctgtggagatccaggacctggagctggccaccggctacaaggtgtatggccgctgcaggatggagaaggaggaggacctgtggggcgagtggagccccatcctgtccttccagaccccaccttctgcccccaaggatgtgtgggtgtctggcaacctgtgtggcaccccaggaggagaggagcccctgctgctgtggaaggcccctggcccctgtgtgcaggtgtcctacaaggtgtggttctgggtgggcggccgggagctgagccctgagggcatcacctgctgctgcagcctcatccccagcggggctgagtgggcccgggtgtctgctgtgaatgccacctcctgggagcccctgaccaacctgagcctggtgtgcctggacagcgccagcgcccccaggtctgtggccgtgagcagcattgctggcagcacagagctgctggtgacctggcagcccggccctggagagcccctggagcacgtggtggactgggccagagatggagaccccctggagaagctgaactgggtgcggctgcccccaggcaacctgagcgccctgctgcccggcaacttcaccgtgggcgtgccctaccgcatcaccgtgacagctgtgtctgccagcggcctggccagcgccagctctgtgtggggcttccgggaggagctggcccccctggtgggccccaccctgtggaggctgcaggatgcccctcctggcaccccagccatcgcctggggcgaggtgcccaggcaccagctgcggggccacctgacccactacaccctgtgtgcccagagcggcaccagccccagcgtgtgcatgaatgtgtctggcaacacccagagcgtgaccctgcctgacctgccctggggcccctgtgagctgtgggtgacagccagcaccatcgccggccagggccccccaggccccatcctgcggctgcacctgcctgacaacaccctgcgctggaaggtgctgcccggcatcctcttcctgtggggcctcttcctgctgggctgcggcctgagcctggccaccagcggccgctgctaccacctgcggcacaaggtgctgccccgctgggtgtgggagaaggtgcctgaccctgccaacagcagcagcggccagccccacatggagcaggtgcctgaggcccagcccctgggggacctgcccatcctggaggtggaggagatggagcccccacctgtgatggagagcagccagcctgcccaggccacagcccccctggacagcggctatgagaagcacttcctgcccaccccagaggagctgggcctgctgggccccccccggccccaggtgctggcctag

SEQ ID NO: 150163 - DNA, 1911 bp, Artificial Sequence
  derived and/or modified sequence
atgcggggcggccggggcgcccccttctggctgtggcccctgcccaagttggctcttctgcctctgctctgggtactgttccaaaggacccggccgcaaggcagcgccggaccacttcagtgttacggagtggggcctctgggcgacttaaactgtagttgggaacccctgggagacctgggagctcccagtgagcttcaccttcagtcacagaagtaccgcagcaataagacgcagactgttgcggtagcagctggacgctcttgggtagctatccctcgagaacaactgactatgagcgataaacttttggtatggggcaccaaggcagggcaacccctgtggcctccagttttcgtgaaccttgagacccaaatgaagcctaatgcccctcgcctcgggccagatgttgacttttctgaagatgaccctctcgaagccacggtccattgggccccaccgacatggccaagccataaagtgctgatctgccagttccactacaggcgctgccaggaagccgcttggacattgctggaacccgagctgaagacaatcccattgacacccgtagagatacaggaccttgaattagctacgggttacaaggtatacggaagatgtcgcatggaaaaagaggaagacctatggggagaatggtcccctatattgtctttccagacgcctcccagcgcacccaaagatgtctgggtgtccgggaacctttgcggcacccctgggggcgaagagcctctactcctgtggaaggccccgggtccctgcgtgcaggtgtcttataaagtctggttctgggtgggagggagggagctgagccctgagggcattacatgttgctgttcattgattcccagtggagcggagtgggccagggtgtccgccgtcaatgccacctcatgggagcctctgactaacctttccctggtatgcctggactcagccagtgctcctcgctctgtggcagtgtctagcatcgcagggtccaccgagctccttgtcacatggcagccaggacccggcgaacctctggagcacgtagtggactgggcacgcgatggagaccctttggagaagcttaactgggtgcgtctccctccagggaatctgtccgcgttattgccagggaattttacagttggggttccctaccgcattactgtcactgccgtgagcgcgtccggattagcgagcgctagcagcgtgtgggggttcagagaagagttggcaccgctcgtgggcccaaccctttggcgcctgcaggacgctccacccggcacccctgcaatagcatggggtgaagttccacgccaccagctccgcggccatctgacgcactacaccctgtgcgcccagagtggcactagccccagcgtgtgtatgaatgtgtccgggaatacccagtccgtgacattgcctgatctaccctggggaccttgcgagctctgggtcaccgcgtccactatagctggccagggcccaccagggccgatcctgcgcctccacttgccagataatactctgagatggaaagtgctgccaggaatcctctttctctggggtctgttcctgctcggctgtggattgtccctggcgaccagcgggcgatgttaccatctgagacacaaggttctgccaagatgggtttgggagaaggtccctgatcctgccaattctagctcaggccagccacacatggagcaggtgccggaagcacagccactgggggatctccccatactggaggtggaggaaatggagccgccacctgtcatggagtcatcacagccagcccaagccaccgcaccgctcgacagcggatacgaaaagcacttcctgccaaccccggaggaactggggctgctgggtcctccacgaccgcaggtcctggcatag

SEQ ID NO: 150164 - DNA, 1911 bp, Artificial Sequence
  derived and/or modified sequence
atgcgaggcggacgaggggcacccttttggctgtggccactgccaaaactcgccctgttgcccctgttgtgggtactgtttcaacggacgcggccacaaggatcagccggacccctgcagtgttacggcgtgggacccctgggtgatctgaactgctcctgggagccactcggggatctgggggcaccatccgaactccacctgcagtctcagaagtacagaagtaacaagactcagactgtggcggtggccgctggccgtagctgggtggctatcccacgagagcagctgacaatgtccgataaactgctcgtctggggtacaaaggcgggacagccgctgtggccaccagtatttgtcaatcttgagacccagatgaaaccaaatgcgcctagactcggtcctgacgtggacttcagtgaagacgacccactggaagccacggtgcattgggcaccccctacctggccttcccataaggtgctgatctgccaatttcactacagacgatgccaagaagccgcttggaccttgttagagcccgagcttaaaaccatcccccttactccagtggagatccaggacctggagctggccaccggttacaaagtgtatgggcgatgtaggatggagaaggaagaagacctgtggggcgagtggagccccatcctatcttttcagaccccgccaagcgctcctaaagatgtgtgggtatctggtaatctctgtggaacccccggaggcgaagaacccctgctcctgtggaaagcgcctgggccatgcgtccaggtaagctataaggtgtggttttgggtgggcggacgggaactgtcacccgaaggcattacctgttgctgcagcctgattcctagcggtgctgagtgggccagggtgtccgcagtcaacgctacgagctgggaaccgctcacgaacttatcgctcgtgtgcttggattccgctagcgctccacggagtgtcgccgtgagtagcattgctggatccacagaactgctggtcacatggcaaccaggacctggtgaaccactggaacacgtggtcgactgggcgagggacggcgatcccctggaaaaactgaattgggtaagattaccaccaggcaacctgtccgcccttctgcccggaaattttacagtcggcgtcccctataggataaccgtgactgccgtctccgcctctggcctggcctcagcaagcagcgtgtggggttttagagaggagctggcccctctggtgggtccaaccctttggcggctgcaagacgccccaccagggacccccgctatagcctggggggaagtgccgagacaccaactgcgcggacacctcactcattacacattatgcgctcagtctggcacatcgccctctgtttgtatgaatgtctcggggaatactcagtctgtcacgctccccgatctcccctggggcccttgcgagctgtgggtgacagctagcaccatcgcgggtcaggggcctcccggacccatcctacggctgcacctgccagacaacactctcaggtggaaagtcctgcccggaatactgtttctgtggggcttgtttttactgggatgtggcctttctcttgcgacttcaggcagatgctaccacctacggcacaaagtgctgccacgctgggtatgggagaaagtgccagatcccgctaattcctcttctggtcagccgcatatggagcaggtgccagaggcacagcctcttggtgacctgccaatactcgaagtggaggagatggaacccccacctgtcatggagtcgagtcagcctgcgcaggccaccgcgcctttggatagtgggtatgaaaagcacttcctcccaactccggaggagctcgggctgttgggaccacccagaccgcaggtgctggcctag

SEQ ID NO: 150165 - DNA, 279 bp, Artificial Sequence
  derived and/or modified sequence
atgtcttgccagcagaaccaaaagcaatgccagccgcctccaaagtgcccgagtcctaagtgcccaccaaaaaatccggtccaatgccttcctcctgccagctcgggctgcgcaccaagttctggcggatgtgggccaagttccgaaggtggctgcttcttgaaccatcatcgaagacatcaccgttgccgccgacagaggtccaatagttgcgacagagggtcaggccagcagggcggaggctctggctgttgccacggtagtgggggttgctgctag

SEQ ID NO: 150166 - protein, 455 aa, Artificial Sequence
  derived and/or modified sequence
MDAALKRSRSEEPAEILPPARDEEEEEEEGMEQGLEEEEEVDPRIQGELEKLNQSTDDINRRETELEDARQKFRSVLVEATVKLDELVKKIGKAVEDSKPYWEARRVARQAQLEAQKATQDFQRATEVLRAAKETISLAEQRLLEDDKRQFDSAWQEMLNHATQRVMEAEQTKTRSELVHKETAARYNAAMGRMRQLEKKLKRAINKSKPYFELKAKYYVQLEQLKKTVDDLQAKLTLAKGEYKMALKNLEMISDEIHERRRSSAMGPRGCGVGAEGSSTSVEDLPGSKPEPDAISVASEAFEDDSCSNFVSEDDSETQSVSSFSSGPTSPSEMPDQFPAVVRPGSLDLPSPVSLSEFGMMFPVLGPRSECSGASSPECEVERGDRAEGAENKTSDKANNNRGLSSSSGSGGSSKSQSSTSPEGQALENRMKQLSLQCSKGRDGIIADIKMVQIG

SEQ ID NO: 150167 - DNA, 1368 bp, Artificial Sequence
  derived and/or modified sequence
atggatgccgcactcaaaagaagtagaagcgaagaaccagctgagatattaccccctgcccgggacgaggaggaggaagaagaggaggggatggaacagggtcttgaagaagaagaggaggttgatccgaggattcagggagaactggagaagctgaatcaatctaccgacgatattaacaggcgggaaaccgagctggaggacgcaaggcagaagtttcgcagtgtgctggttgaggcaacggtgaagctggatgagttggtaaagaaaattggaaaggccgttgaagacagtaagccatactgggaggccaggcgagtcgctaggcaagctcagcttgaggcgcagaaggccacccaggactttcaacgggctactgaggtactgagagccgcaaaagaaacaattagtctagccgaacagcggctgctcgaggacgacaagcgccagttcgacagcgcatggcaggagatgctgaaccacgccacccagcgggtgatggaagctgaacagaccaagacaagaagtgagctggtacacaaggaaacagcagctcggtataatgccgccatgggtaggatgagacaactggaaaaaaaattaaagagggctatcaacaagtctaagccctacttcgagctgaaggccaaatactatgtgcagctggagcagctgaagaagacggtggacgacctgcaggctaagctgaccttagctaaaggcgagtacaaaatggccctcaagaatttagagatgatctcggacgagatccacgagcggaggcgttcgtcggcgatgggcccacgtggctgcggggtgggagcggagggctcctccactagcgtggaagaccttcctggatccaaacctgaacctgatgctatctccgtcgcctcagaggctttcgaagacgattcctgcagtaattttgtttcagaagacgacagtgaaactcagtccgtgtcttccttctcaagcggaccaacctcccccagcgaaatgcctgaccagtttcccgccgtggttcgacccggttctctcgacctcccctccccggtgagcttgtcggaatttgggatgatgttcccagtgctcgggcccagaagcgagtgctccggcgcttcttcacctgagtgtgaggtggaaagaggcgaccgggccgagggggccgaaaataaaacctccgacaaagccaataacaacagaggactctcctccagctcagggtccggagggagttctaaaagtcagtctagtacgtcacctgaagggcaggccctcgagaatcggatgaaacaattgtcccttcagtgctccaaggggcgggacggcattatagcggatatcaagatggtgcagattgggtag

SEQ ID NO: 150168 - DNA, 1368 bp, Artificial Sequence
  derived and/or modified sequence
atggatgctgccctgaagaggagccgctctgaggagcctgctgagatcctgcccccagccagagatgaggaggaggaggaggaggagggcatggagcagggcctggaggaggaggaggaggtggacccccgcatccagggcgagctggagaagctgaaccagagcacagatgacatcaacagaagagaaacagagctggaggatgcccggcagaagttccgctctgtgctggtggaggccaccgtgaagctggatgagctggtgaagaagattggcaaggctgtggaggacagcaagccctactgggaggccaggagagtggcccggcaggcccagctggaggcccagaaggccacccaggacttccagagggccacagaggtgctgcgggccgccaaggagaccatcagcctggccgagcagaggctgctggaggatgacaagaggcagtttgattctgcctggcaggagatgctgaaccacgccacccagagggtgatggaggccgagcagaccaagaccaggtctgagctggtgcacaaggagacagctgcccgctacaatgctgccatgggccgcatgaggcagctggagaagaagctgaagagggccatcaacaagagcaagccctactttgagctgaaggccaagtactacgtgcagctggagcagctgaagaagacagtggatgacctgcaggccaagctgaccctggccaagggggagtacaagatggccctgaagaacctggagatgatcagtgatgagatccacgagaggagaagaagcagcgccatgggcccccggggctgcggcgtgggcgctgagggcagcagcacctctgtggaggacctgcccggcagcaagccagagccagatgccatctctgtggccagcgaggcctttgaagatgacagctgcagcaactttgtgtctgaagatgacagcgagacccagagcgtgtcctccttcagcagcggccccaccagccccagcgagatgccagaccagtttcctgctgtggtgcggcccggcagcctggacctgcccagccctgtgtccctgtctgaatttggcatgatgtttcctgtgctgggccccaggtctgagtgcagcggggccagcagcccagaatgtgaggtggagcggggggacagagctgagggcgctgagaacaagaccagtgacaaggccaacaacaacagaggcctgagcagcagcagcggcagcggcggcagcagcaagagccagagcagcaccagccctgagggccaggccctggagaacaggatgaagcagctgagcctgcagtgcagcaagggcagagatggcatcatcgctgacatcaagatggtgcagatcggctag

SEQ ID NO: 150169 - DNA, 1368 bp, Artificial Sequence
  derived and/or modified sequence
atggacgccgccctgaagcggagccggagcgaggagcccgccgagatattaccgcccgcccgcgacgaagaggaagaggaggaggaggggatggagcagggattggaagaggaggaagaggtcgacccaagaatacagggcgagctcgagaagctgaaccagtccaccgacgatattaatagacgcgagaccgagctggaggacgcaaggcagaaatttaggagtgttctcgtggaggccaccgtgaagcttgatgaattggtgaagaagataggtaaagctgtagaagatagcaaaccctactgggaagcccggcgcgttgccaggcaggcccagctggaagcccagaaggctactcaggactttcagcgcgcaactgaagtcttgagggctgcaaaggaaacaatctctttggccgagcagcgcctcctggaggatgacaaacgacaattcgacagtgcttggcaggaaatgctcaaccacgccacacagagagttatggaagctgagcagaccaaaacccgatccgagctggtccacaaagagacagctgcccggtataatgccgcaatggggcgtatgcgtcaactagagaagaaattgaaacgtgccatcaacaagtctaagccttacttcgagctgaaagctaagtactacgtccagctcgagcagttgaagaagaccgtcgacgacttacaggctaaactgaccctcgccaaaggggagtataaaatggccctgaaaaacttagagatgatctccgacgaaatacacgagcgccgcagaagcagtgctatgggcccgaggggatgcggcgttggagctgagggcagctctacttcggtggaggatctgccaggatcaaaaccagaacctgacgcaattagcgtggctagcgaagccttcgaggatgacagctgctccaattttgtctccgaagacgactcagaaacccagtccgtgagctctttcagctctgggccaacttctccatcagaaatgcctgatcaattcccggccgtcgtaagaccagggagcctggatctgcccagccctgtgagcctgtccgagtttgggatgatgttccctgttctcgggcctcgatcagaatgtagtggcgccagcagccccgagtgtgaggtagagcgcggcgaccgcgccgaaggagcagaaaacaagacaagcgacaaggcaaataacaaccgcggcctgagttcctcctctggatccggcgggtcttctaaatcacagtcatccacgagtccggaaggacaggcactggaaaatagaatgaaacagctatccctccagtgcagtaagggtagggacggcataattgctgacatcaagatggtacagattggctag

SEQ ID NO: 150170 - DNA, 1368 bp, Artificial Sequence
  derived and/or modified sequence
atggatgccgctctaaagcgatcccgttctgaagaaccagcagagatcctcccccctgctagagatgaggaagaggaagaagaagagggaatggaacagggcctggaggaggaggaggaagtggaccctagaatccagggcgaattggagaaactcaatcagtcaactgacgacattaatcgtagagagacagagctcgaggacgcaaggcagaagtttcgcagcgtgttggtggaggcaacagtcaaacttgatgagctagtcaagaagatcggcaaggctgtggaagacagcaaaccatactgggaggcacgaagagttgctaggcaggctcagctcgaggctcaaaaagccacccaagatttccaaagagctaccgaagtgctacgagcagccaaggagacaattagcctggcagagcagcgactgcttgaggacgataaacgacagttcgactcagcatggcaggaaatgctcaaccatgcgacacagcgagtgatggaggctgagcagaccaaaacacgttcggagctcgttcacaaagaaaccgccgcacgctacaatgccgcaatgggtcgaatgcggcaactagagaaaaagctgaaacgggctatcaacaaatctaaaccttattttgaacttaaggctaaatattatgttcagctcgaacagcttaaaaaaaccgtggacgatctgcaggccaagttgacattggctaaaggcgagtataagatggctcttaagaatttagagatgatctccgacgagatccatgagagacgaaggtctagtgccatgggtccacgcggttgcggagtcggagccgaaggttcttccacgtcggtggaggacctgcccggaagcaaacctgaacctgacgccatttcggtggcatcagaggcctttgaagacgactcgtgttctaacttcgtgtctgaggacgactctgagacacagagcgtgagcagcttttctagcggtccaacctcaccttcagagatgcctgatcagtttcctgccgtggtccggcctgggtccttggacctgccatcacccgtgtcactaagtgagttcggcatgatgtttcccgttctaggtcccaggtcagaatgcagcggagcttctagcccggagtgcgaggtcgaaagaggagaccgggctgagggtgcagagaacaaaacatcagataaggcaaataacaatagaggactgtcttccagtagcggttcaggtggctcgtctaaaagccaatccagcacatcccccgaaggacaagccctggaaaaccggatgaaacaactgtcactgcagtgcagcaaaggaagggatgggatcatcgccgacattaagatggttcagatcggatag

SEQ ID NO: 150171 - DNA, 2017 bp, Artificial Sequence
  derived and/or modified sequence
ccgcatcggcgagctgcgtctcccgggtgtcggccccggcggctccccgaccgtgcccggctgtggcgaggcggctccagcccagcctgtggcagccgcgacccccggggcgctccggagcccactgcgcggcgcgcgtgccggctgcctgcatggacgcggcactgaagcggagccgctcggaggagccagccgaaatcctgccgcctgcccgggacgaggaggaggaggaggaagaggggatggagcaggggctggaggaggaagaagaggtggatccccggatccagggagaactggagaagttaaatcagtccacggatgatatcaacagacgggagactgaacttgaggatgctcgtcagaagttccgctctgttctggttgaagcaacggtgaaactggatgaactggtgaagaaaattggcaaagctgtggaagactccaagccctactgggaggcacggagggtggcgaggcaggctcagctggaagctcagaaagccacgcaggacttccagagggccacagaggtgctccgtgccgccaaggagaccatctccctggccgagcagcggctgctggaggatgacaagcggcagttcgactccgcctggcaggagatgctgaatcacgccactcagagggtcatggaggcggagcagaccaagaccaggagcgagctggtgcataaggagacggcagccaggtacaatgccgccatgggccgcatgcgacagctggagaagaaactcaagagagccatcaacaagtccaagccttattttgaactcaaggcaaagtactatgtgcagctcgagcaactgaaaaagactgtggatgacctgcaggccaaactgaccctggcaaaaggcgagtacaagatggccctgaagaacctggagatgatctcagatgagatccacgagcggcggcgctccagtgccatggggcctcggggatgcggtgttggtgctgagggcagcagcacatctgtggaggatctgccagggagcaaacctgagcctgatgccatttctgtggcctcggaggcctttgaagatgacagctgtagcaactttgtgtctgaagatgactcggaaacccagtccgtgtccagctttagttcaggaccaacaagcccgtctgagatgcctgaccagttccctgcggttgtgaggcctggcagcctggatctgcccagccctgtgtccctgtcagagtttgggatgatgttcccagtgttgggccctcgaagtgaatgcagcggggcctcctcccctgaatgtgaagtagaacgaggagacagggcagaaggggcagagaataaaacaagtgacaaagccaacaacaaccggggcctcagcagtagcagtggcagtggtggcagcagtaagagccaaagcagcacctcccctgagggccaggccttggagaaccggatgaagcagctctccctacagtgctcaaagggaagagatggaattattgctgacataaaaatggtgcagattggctgattcatcctgggccctggccgatgtgcatatcaacatttatacatggaactggagaacattgtgccaataatcatttaatatatgccaaatcttacacgtctactctaaactgctctaatgaagtttcagtgaccttgagggctaaagattgttcttctgggtaagagctcttgggctggtttttcagagcagagttcttgttgtgggtagactgtgactaggttcacagcctttgtggaacattccgtataacggcattgtggaagcaataactagttcctatgaaagaaccagagctgggaagatggctgggaagccaggccaaagtgggggcaacagcttgcttctctttctcttctcaccctcagtttgtatgggaaaatggagatgtcctctccactttatcccacgatatctaaatgaaaaagaaagaaaacccacacacaaagcaaaaactcaagtattaagagcacatatttttgacccagtggaggctt

SEQ ID NO: 150172 - DNA, 2822 bp, Artificial Sequence
  derived and/or modified sequence
gcgctgactgccgcggcagaaagggggcggccgcgcccatttcctctgctccgccgcggccggaggtatccgcatcggcgagctgcgtctcccgggtgtcggccccggcggctccccgaccgtgcccggctgtggcgaggcggctccagcccagcctgtggcagccgcgacccccggggcgctccggagcccactgcgcggcgcgcgtgccggctgcctgcatggacgcggcactgaagcggagccgctcggaggagccagccgaaatcctgccgcctgcccgggacgaggaggaggaggaggaagaggggatggagcaggggctggaggaggaagaagaggtggatccccggatccagggagaactggagaagttaaatcagtccacggatgatatcaacagacgggagactgaacttgaggatgctcgtcagaagttccgctctgttctggttgaagcaacggtgaaactggatgaactggtgaagaaaattggcaaagctgtggaagactccaagccctactgggaggcacggagggtggcgaggcaggctcagctggaagctcagaaagccacgcaggacttccagagggccacagaggtgctccgtgccgccaaggagaccatctccctggccgagcagcggctgctggaggatgacaagcggcagttcgactccgcctggcaggagatgctgaatcacgccactcagagggtcatggaggcggagcagaccaagaccaggagcgagctggtgcataaggagacggcagccaggtacaatgccgccatgggccgcatgcgacagctggagaagaaactcaagagagccatcaacaagtccaagccttattttgaactcaaggcaaagtactatgtgcagctcgagcaactgaaaaagactgtggatgacctgcaggccaaactgaccctggcaaaaggcgagtacaagatggccctgaagaacctggagatgatctcagatgagatccacgagcggcggcgctccagtgccatggggcctcggggatgcggtgttggtgctgagggcagcagcacatctgtggaggatctgccagggagcaaacctgagcctgatgccatttctgtggcctcggaggcctttgaagatgacagctgtagcaactttgtgtctgaagatgactcggaaacccagtccgtgtccagctttagttcaggaccaacaagcccgtctgagatgcctgaccagttccctgcggttgtgaggcctggcagcctggatctgcccagccctgtgtccctgtcagagtttgggatgatgttcccagtgttgggccctcgaagtgaatgcagcggggcctcctcccctgaatgtgaagtagaacgaggagacagggcagaaggggcagagaataaaacaagtgacaaagccaacaacaaccggggcctcagcagtagcagtggcagtggtggcagcagtaagagccaaagcagcacctcccctgagggccaggccttggagaaccggatgaagcagctctccctacagtgctcaaagggaagagatggaattattgctgacataaaaatggtgcagattggctgattcatcctgggccctggccgatgtgcatatcaacatttatacatggaactggagaacattgtgccaataatcatttaatatatgccaaatcttacacgtctactctaaactgctctaatgaagtttcagtgaccttgagggctaaagattgttcttctgggtaagagctcttgggctggtttttcagagcagagttcttgttgtgggtagactgtgactaggttcacagcctttgtggaacattccgtataacggcattgtggaagcaataactagttcctatgaaagaaccagagctgggaagatggctgggaagccaggccaaagtgggggcaacagcttgcttctctttctcttctcaccctcagtttgtatgggaaaatggagatgtcctctccactttatcccacgatatctaaatgaaaaagaaagaaaacccacacacaaagcaaaaactcaagtattaagagcacatatttttgacccagtggaggcttaaaaaaaaaaaaatccaagaacacaattcattttcaccacctctggtgttcagagggggcttttaaaaaagcgtgtatgctgggatacccattaaaaccattttctagaaggctaccatgagctgcactttttggggtgggaaaggtgaatgccagtggggatgcggggggatgagggtaggagggacttatagaaggggatttgtggctgtgggggagaaggttctacagcataagccttatcctgccagccaaggggatttattctaagagaagtgcatgtgaagaatggttgccactgttattagattgacaagatgttaatttctctgtaggttgtaactttaaaaataaatgaaattatttaagggttatgctgcactagtattccttagaggaaacagttctttaaagttaggaaagggagtaggcaggcatgtgttggcaaaggctgttaatagtagttaagtgttaagactgcttttctttaacgttttcatggtaatgcatatttagagcactgtatttttgtcttgttaagaaaatttagcatttctaaaagaaaaaagcaaccctctttcaaactgttaattctgtcacagcctgtatattttagtcatttgtaaatctcttcatacaatagtgacttcttttttgactgatacagtatcttaattacaaggttattttgtacttgtcttaatacactaagtgtaataaaaacggcttgagaaaa

SEQ ID NO: 150173 - DNA, 1368 bp, Artificial Sequence
  derived and/or modified sequence
atggacgccgccctgaagagaagcagaagcgaggagcccgccgagatcctgccccccgccagagacgaggaggaggaggaggaggagggcatggagcagggcctggaggaggaggaggaggtggaccccagaatccagggcgagctggagaagctgaaccagagcaccgacgacatcaacagaagagagaccgagctggaggacgccagacagaagttcagaagcgtgctggtggaggccaccgtgaagctggacgagctggtgaagaagatcggcaaggccgtggaggacagcaagccctactgggaggccagaagagtggccagacaggcccagctggaggcccagaaggccacccaggacttccagagagccaccgaggtgctgagagccgccaaggagaccatcagcctggccgagcagagactgctggaggacgacaagagacagttcgacagcgcctggcaggagatgctgaaccacgccacccagagagtgatggaggccgagcagaccaagaccagaagcgagctggtgcacaaggagaccgccgccagatacaacgccgccatgggcagaatgagacagctggagaagaagctgaagagagccatcaacaagagcaagccctacttcgagctgaaggccaagtactacgtgcagctggagcagctgaagaagaccgtggacgacctgcaggccaagctgaccctggccaagggcgagtacaagatggccctgaagaacctggagatgatcagcgacgagatccacgagagaagaagaagcagcgccatgggccccagaggctgcggcgtgggcgccgagggcagcagcaccagcgtggaggacctgcccggcagcaagcccgagcccgacgccatcagcgtggccagcgaggccttcgaggacgacagctgcagcaacttcgtgagcgaggacgacagcgagacccagagcgtgagcagcttcagcagcggccccaccagccccagcgagatgcccgaccagttccccgccgtggtgagacccggcagcctggacctgcccagccccgtgagcctgagcgagttcggcatgatgttccccgtgctgggccccagaagcgagtgcagcggcgccagcagccccgagtgcgaggtggagagaggcgacagagccgagggcgccgagaacaagaccagcgacaaggccaacaacaacagaggcctgagcagcagcagcggcagcggcggcagcagcaagagccagagcagcaccagccccgagggccaggccctggagaacagaatgaagcagctgagcctgcagtgcagcaagggcagagacggcatcatcgccgacatcaagatggtgcagatcggctag

SEQ ID NO: 150174 - protein, 369 aa, Artificial Sequence
  derived and/or modified sequence
MPVVTTDAESETGIPKSLSNEPPSETMEEIEHTCPQPRLTLTAPAPFADETNCQCQAPHEKLTIAQARLGTPADRPVRVYADGIFDLFHSGHARALMQAKTLFPNSYLLVGVCSDDLTHKFKGFTVMNEAERYEALRHCRYVDEVIRDAPWTLTPEFLEKHKIDFVAHDDIPYSSAGSDDVYKHIKEAGMFVPTQRTEGISTSDIITRIVRDYDVYARRNLQRGYTAKELNVSFINEKRYRFQNQVDKMKEKVKNVEERSKEFVNRVEEKSHDLIQKWEEKSREFIGNFLELFGPDGAWKQMFQERSSRMLQALSPKQSPVSSPTRSRSPSRSPSPTFSWLPLKTSPPSSPKAASASISSMSEGDEDEK

SEQ ID NO: 150175 - DNA, 1110 bp, Artificial Sequence
  derived and/or modified sequence
atgcccgtggtgaccaccgacgccgagagcgagaccggcatccccaagagcctgagcaacgagccccccagcgagaccatggaggagatcgagcacacctgcccccagcccagactgaccctgaccgcccccgcccccttcgccgacgagaccaactgccagtgccaggccccccacgagaagctgaccatcgcccaggccagactgggcacccccgccgacagacccgtgagagtgtacgccgacggcatcttcgacctgttccacagcggccacgccagagccctgatgcaggccaagaccctgttccccaacagctacctgctggtgggcgtgtgcagcgacgacctgacccacaagttcaagggcttcaccgtgatgaacgaggccgagagatacgaggccctgagacactgcagatacgtggacgaggtgatcagagacgccccctggaccctgacccccgagttcctggagaagcacaagatcgacttcgtggcccacgacgacatcccctacagcagcgccggcagcgacgacgtgtacaagcacatcaaggaggccggcatgttcgtgcccacccagagaaccgagggcatcagcaccagcgacatcatcaccagaatcgtgagagactacgacgtgtacgccagaagaaacctgcagagaggctacaccgccaaggagctgaacgtgagcttcatcaacgagaagagatacagattccagaaccaggtggacaagatgaaggagaaggtgaagaacgtggaggagagaagcaaggagttcgtgaacagagtggaggagaagagccacgacctgatccagaagtgggaggagaagagcagagagttcatcggcaacttcctggagctgttcggccccgacggcgcctggaagcagatgttccaggagagaagcagcagaatgctgcaggccctgagccccaagcagagccccgtgagcagccccaccagaagcagaagccccagcagaagccccagccccaccttcagctggctgcccctgaagaccagcccccccagcagccccaaggccgccagcgccagcatcagcagcatgagcgagggcgacgaggacgagaagtag

SEQ ID NO: 150176 - DNA, 1110 bp, Artificial Sequence
  derived and/or modified sequence
atgcccgtagtgactacagacgcagaatctgagaccgggatccctaaatctctgtccaacgaacctccttcggagactatggaagagatcgaacatacctgtccccagcctcgcctcacgctcactgcccccgcaccatttgctgacgagaccaattgtcaatgccaggctcctcacgaaaagcttacaatagcacaggcacgactcggcacacccgccgaccgtcctgtgagagtatacgccgacggcatcttcgatttatttcatagcggccatgcccgggcgttaatgcaggccaaaacgctgtttccaaactcctatttacttgtgggtgtatgttccgacgacctgactcataagtttaaaggattcaccgtcatgaacgaggcggaaaggtatgaagcccttagacactgtcgatatgtagatgaggtaattagagacgctccctggaccctaacgcccgagttcctggagaaacacaagatcgattttgtggcccacgatgacatcccctacagttctgccggcagtgacgacgtctacaagcacataaaggaggccggaatgtttgtacctacccagagaacggaggggatttccaccagcgatattatcaccaggattgttcgagattacgacgtgtacgcacggcgaaaccttcaacgcggctatacggccaaggaactgaacgtgtcctttataaacgagaagcgttacagatttcaaaaccaggttgacaaaatgaaggagaaggtaaaaaacgttgaagagcggagcaaagagttcgttaaccgggtcgaggagaaaagtcacgacttgattcagaagtgggaggagaagagccgggagttcatagggaattttctggagttatttggtcccgatggggcctggaagcaaatgtttcaggaacgaagctctcgcatgttacaggccctgagccccaagcagagtcccgtgtcctctcctactaggagcagatctccttccagatcgccctcgccaactttcagctggctccctctgaagaccagcccgccatcgagtcccaaagctgcctctgcttcaatttcctcaatgtccgagggagacgaagatgaaaagtag

SEQ ID NO: 150177 - DNA, 1110 bp, Artificial Sequence
  derived and/or modified sequence
atgcctgtggtgaccacagatgctgagagcgagaccggcatccccaagagcctgagcaatgagccccccagcgagaccatggaggagattgagcacacctgcccccagccccggctgaccctgacagccccagccccctttgctgatgagaccaactgccagtgccaggcccctcatgagaagctgaccatcgcccaggcccggctgggcaccccagctgacaggcctgtgcgggtgtatgcagatggcatctttgacctcttccacagcggccacgcccgggccctgatgcaggccaagaccctcttccccaacagctacctgctggtgggcgtgtgcagtgatgacctgacccacaagttcaagggcttcaccgtgatgaatgaggccgagagatatgaggccctgcggcactgccgctacgtggatgaagtcatcagagatgccccctggaccctgaccccagagttcctggagaagcacaagattgactttgtggcccatgatgacatcccctacagcagcgctggcagtgatgatgtgtacaagcacatcaaggaggccggcatgtttgtgcccacccagaggacagagggcatcagcaccagtgacatcatcaccagaattgtgcgggactatgatgtgtatgcccggaggaacctgcagaggggctacacagccaaggagctgaatgtgtccttcatcaatgagaagcgctaccgcttccagaaccaggtggacaagatgaaggagaaggtgaagaatgtggaggagaggagcaaggagtttgtgaacagagtggaggagaagagccatgacctgatccagaagtgggaggagaagagccgggagttcatcggcaacttcctggagctgtttggaccagatggagcctggaagcagatgttccaggagaggagcagcaggatgctgcaggccctgagccccaagcagagccctgtgagcagccccaccaggagccgcagccccagccgcagccccagccccaccttctcctggctgcccctgaagaccagcccccccagcagccccaaggccgccagcgccagcatcagctccatgtctgaaggagatgaagatgagaagtag

SEQ ID NO: 150178 - DNA, 1692 bp, Artificial Sequence
  derived and/or modified sequence
agaaagaaggggagaagaagcggggggatgggtggagggtagaggggagaaaaatacgtgacaaagaaaacattctctgcctgggaggagactctctgagggtgtagagctagagggagcattcactggccatgccagtagttaccactgatgctgagtcagaaacaggtatcccaaaatccctttccaatgagcctccctcagaaaccatggaggaaatagagcacacatgcccacagcctcgactgaccctgactgcacctgccccatttgctgatgaaaccaactgccagtgtcaagcaccccatgaaaaactgaccattgctcaggcccgcttaggaacaccagctgacaggcctgtcagagtatacgccgatggaatatttgacctcttccactcaggtcatgcaagagcccttatgcaagcaaaaacactgtttcccaacagctacttgttggtaggagtttgcagtgatgatctcacccacaaattcaaaggtttcaccgtgatgaatgaagccgagagatacgaagctctcagacactgtcgctacgtagacgaagttatcagagatgctccctggacactcacgccagagtttctggaaaaacacaagattgactttgtggctcatgatgacattccgtattcctctgctggctctgatgatgtttacaagcacataaaggaagcagggatgttcgttccaacgcagagaacagaaggcatctcaacatcggacatcattaccagaattgttcgtgactatgatgtttatgcccgacgtaacctccagagagggtatacagccaaggaactgaatgtcagctttataaatgagaagaggtaccgtttccagaaccaagtggacaaaatgaaggaaaaagtcaagaatgtggaggaaagatcaaaggaatttgtgaacagagtggaagaaaagagccatgatctaattcaaaagtgggaagagaagtcaagggaattcattggcaacttcctagaactgtttggacctgatggagcatggaagcagatgttccaggagaggagcagccggatgctgcaggccttatccccgaagcagagccctgtgagcagcccaacccggagccggtccccttcccgctccccatcgcccaccttctcatggcttccactcaaaacctcacccccttcctcacccaaagcagcctcagcctctatcagcagcatgagcgagggggatgaggatgaaaagtagaggctgctgggaggcaagagccgcaccatgcaggatggggaggagggcgagagtcacagggttgcctgggtggtgtttgaagggtaatagtcacaggagctgcagctcagcagagagaccctgaactctgctaagggaaggtcttgggaccagttctctctcactctccgtacagctgaagagttgggcgaggtgcagagacttctagctggacaacctacacaaaccttagcgtctagagtcactctaaccttgctaaggaaggatgcagagttccctagagagacttgcactgatggggtgacttctgctttggtccttccaccacccccaccaagtaaaccacctgtggcagcggctgttccctcaacctgctacttctgcgtccataagggtcctgcacgttgcctcccaccaccccagctctgccagaataaaattgtttccaata

SEQ ID NO: 150179 - DNA, 1110 bp, Artificial Sequence
  derived and/or modified sequence
atgcccgtggtgaccaccgacgccgagagcgagaccggcatccccaagtccctgagcaacgagcctccctcagagaccatggaggagatcgagcacacctgtccacagcctcgcctcaccctgacagcccccgctcctttcgctgacgagactaactgtcagtgtcaggcgcctcatgaaaagctcacaatagcccaggctcgactgggcacacctgcagaccgcccagtgcgagtgtacgcagatggcatctttgacctgtttcatagtggccatgcacgcgcgctgatgcaggctaagaccctgttccctaacagctaccttttggtcggcgtgtgttcagatgatcttactcataagtttaaagggttcaccgtcatgaacgaagccgagcgctatgaagccctaaggcattgtagatacgtggatgaggtgatccgagatgcaccatggacgcttactcctgaatttctcgaaaaacacaaaatcgattttgttgcgcacgatgacattccctattcatctgcaggctccgatgatgtttacaaacatatcaaggaggcaggcatgttcgttcccactcagaggaccgagggcatctccaccagcgatattattacccgtatcgtgcgggactacgacgtatacgctaggcggaaccttcagaggggctacaccgccaaggaactgaatgtaagtttcatcaatgagaagcgataccgatttcagaatcaggtcgacaaaatgaaagaaaaagtcaaaaatgtggaggaaaggtcaaaggagttcgtgaatagagttgaggagaagtcccacgatctgatccaaaagtgggaagagaagtctcgcgagttcatcggaaacttcctcgagctctttgggcccgatggcgcttggaaacagatgttccaagaaaggtcatcgaggatgctgcaggccctttcgccaaagcaatctccagtgagctcccccacccggagtaggtccccctctcgcagtccaagtccaactttttcttggctaccgctgaagacatccccacccagcagtccaaaggccgcctctgcctctatttcatcaatgtccgaaggggacgaggatgaaaaatag

SEQ ID NO: 150180 - DNA, 1110 bp, Artificial Sequence
  derived and/or modified sequence
atgcccgtggttacgaccgatgccgagagtgagaccggaatacccaagagcctgagtaacgagcctccctctgagacaatggaggagatagaacacacatgcccacaaccgcgtctgacactgaccgctcccgctccgttcgctgacgagacaaactgccagtgtcaggcaccgcacgaaaagttaactattgcacaggctcgcctgggcacccctgcggatagaccagtgagagtttacgcagatgggattttcgatttgtttcactcggggcacgctagagccctgatgcaggctaagactctgttccctaattcttacctcctggtgggtgtctgctcagacgacctgacccacaaatttaaggggtttacagtgatgaatgaggccgagcggtacgaagctctgagacactgtaggtacgttgacgaagttatccgcgacgccccttggacactgacgccagagttcctggagaagcataaaatcgacttcgtcgcgcacgatgatattccttactctagtgccggatcagatgatgtctataagcatatcaaggaagccggaatgtttgtccctactcagcgaaccgagggaatctccactagtgacatcatcactaggatcgtgcgagattatgatgtttacgcacgaaggaacctacagaggggatatactgccaaggagctgaacgtgagcttcatcaacgagaaaaggtaccgatttcaaaatcaagtggacaagatgaaggaaaaggtcaagaacgtggaggagcgcagcaaagaatttgtcaacagggtggaggaaaagtctcacgacctaatccagaagtgggaagaaaaatccagagaatttatcggtaactttttagagctgttcggaccagacggcgcttggaagcagatgttccaagagaggtccagtcggatgctacaggccctgtcccctaagcagtcacctgtcagttccccgacacgtagcagatctccttcccgctctccctcgcctaccttttcttggctgccactgaagacgtcaccaccctcctccccaaaagcggcttccgcctccatctcctctatgtctgaaggagacgaagatgagaaatag

SEQ ID NO: 150181 - protein, 245 aa, Artificial Sequence
  derived and/or modified sequence
MNNKFDALKDDDSGDHDQNEENSTQKDGEKEKTERDKNQSSSKRKAVVPGPAEHPLQYNYTFWYSRRTPGRPTSSQSYEQNIKQIGTFASVEQFWRFYSHMVRPGDLTGHSDFHLFKEGIKPMWEDDANKNGGKWIIRLRKGLASRCWENLILAMLGEQFMVGEEICGAVVSVRFQEDIISIWNKTASDQATTARIRDTLRRVLNLPPNTIMEYKTHTDSIKMPGRLGPQRLLFQNLWKPRLNVP

SEQ ID NO: 150182 - DNA, 1604 bp, Artificial Sequence
  derived and/or modified sequence
tgacaatagcaacatcaaagatcactgatcatagatcaccataacagacacagaaatcatgaaaaagttttaaatattttgagaattaccaaaatgtaacacagagacaccaagtgagcacatgctgttggaaaaatggcgctgatacaattgctggactcagggctgccacaaaccctccatttgttttcagaatgccctatctgcgaagcgtaataaaacgaggtatgccatagtacagtggcgccgcgaccgacaaaggaaagcctccgggaggtcaaaagagataccagagagtgcgtcccgcactggaggaagaggaaggtttttaccaagcagcgagtccagagcccgcgccgtcaacgacgcggtgctgccttttttccgagccgctgcgggagggggccaggacacgctcccttaggagagcgggcgggtcacaaggacctggacagaggcagaactgaggccagcagccagctccgccgctgagtccagccctctgcgcagccgccctgagctggcgtcccgagatagccgcttccaaaccgggcctgcgcgccgacgttccgctgcgccccgcgcaaaaccggaagtacccgggcccaaggctgagggacccggtggagcggaagtcactccctgaggcagtggcgacagcggcggcgagaggatgaacaacaagttcgacgctttgaaagatgatgacagtggggaccatgatcagaatgaagaaaacagcacacagaaagatggtgagaaggaaaaaacggaacgagacaagaatcagagcagtagcaagagaaaggctgttgtccctggaccggcagagcatcccctgcagtacaactacactttttggtactccaggagaacccccggccgtcccacgagctcacagagctatgaacagaatatcaaacagattggcacctttgcctctgtggagcagttctggaggttttatagccacatggtacgtcctggggacctgacaggccacagtgacttccatctcttcaaagaaggaattaaacccatgtgggaggatgatgcaaataaaaatggtggcaagtggattattcggctgcggaagggcttggcctcccgttgctgggagaatctcattttggccatgctgggggaacagttcatggttggggaggagatctgtggggctgtggtgtctgtccgctttcaggaagacattatttcaatatggaataagactgccagtgaccaagcaaccacagcccgaatccgggacacacttcggcgagtgcttaacctacctcccaacaccattatggaatacaaaactcacaccgacagcatcaaaatgccaggcaggctgggcccccaaaggctcctttttcaaaacctctggaagccgcggttgaatgtgccatgaccctctccctctctggatggcaccatcattgaagctggcgtcatcggagtctcttgttctgttggcgtgctacctggaagatccttctgtcctggacaagaggaattggaagagcattttatgttttaagaacaggctgacacgcagcagctacaacaacagctgagatcacttaataaatggtgctaaacta

SEQ ID NO: 150183 - DNA, 738 bp, Artificial Sequence
  derived and/or modified sequence
atgaataacaaatttgatgccctaaaagacgatgattccggcgatcacgaccaaaatgaggagaacagcacccagaaagatggtgagaaggagaaaacagagcgcgataaaaatcagagcagctctaagaggaaagcagtcgtccctggtcccgcggaacatcctctccaatataattacactttctggtatagccgccgtacacctggcagacccacctcaagccagagttacgagcagaacatcaaacagatcggaacgttcgcctctgtggagcagttttggcgattctacagtcatatggtccggccaggagacttaaccggacattctgactttcatctctttaaggagggcatcaaacccatgtgggaagatgatgcaaacaaaaatggagggaagtggatcataaggctccgcaaagggcttgctagccggtgttgggagaacctcatccttgctatgttaggggagcagtttatggtcggtgaggagatctgcggagctgtggtctcagtgaggttccaggaggatattatcagcatctggaataaaactgcgagcgatcaagctacaactgctcggattcgtgacacactccggcgagttctgaatctgcctcctaacaccatcatggagtacaaaacccacaccgactctatcaaaatgccaggaagattaggcccccaacggctactctttcaaaacttatggaaaccaagactgaatgtgccctag

SEQ ID NO: 150184 - DNA, 738 bp, Artificial Sequence
  derived and/or modified sequence
atgaacaacaagtttgatgccctgaaggatgatgattctggggaccatgaccagaatgaggagaacagcacccagaaggatggagagaaggagaagacagagcgggacaagaaccagagcagcagcaagaggaaggctgtggtgcccggccctgctgagcaccccctgcagtacaactacaccttctggtacagcaggaggaccccaggccggcccaccagcagccagagctatgagcagaacatcaagcagatcggcacctttgcctctgtggagcagttctggaggttctacagccacatggtgcggcctggggacctgaccggccacagcgacttccacctgttcaaggagggcatcaagcccatgtgggaggatgatgccaacaagaatggaggcaagtggatcatccggctgaggaagggcctggccagccgctgctgggagaacctgatcctggccatgctgggggagcagttcatggtgggggaggagatctgtggggctgtggtgtctgtgcgcttccaggaggacatcatcagcatctggaacaagacagccagtgaccaggccaccacagcccgcatccgggacaccctgcggcgggtgctgaacctgccccccaacaccatcatggagtacaagacccacacagacagcatcaagatgcctggccgcctgggcccccagaggctgctcttccagaacctgtggaagccccggctgaatgtgccctag

SEQ ID NO: 150185 - DNA, 738 bp, Artificial Sequence
  derived and/or modified sequence
atgaacaacaagttcgacgccctgaaggacgacgacagcggcgaccacgatcaaaatgaagagaattctacacaaaaagatggcgagaaagagaagaccgaaagagacaaaaaccagtcctcttcaaaaaggaaagccgtcgtgcctggcccagctgagcatcccctgcagtataattacaccttctggtatagtaggcgaactcccggccgacctacatcctcgcagtcatacgaacagaacattaagcagatcggaactttcgcaagtgtggaacagttctggagattttactcacatatggtgaggcctggtgacttaaccggccactctgatttccacctgtttaaggagggaatcaagcccatgtgggaggatgatgccaacaaaaacggcggaaaatggatcatcaggttgaggaagggccttgctagcagatgttgggaaaacctcattctggccatgctgggagaacagtttatggttggggaggagatctgtggagctgttgtgtctgtgcgcttccaggaagacatcatttctatctggaataagaccgcttcagaccaggcgacaaccgcccgaatccgggatacgcttaggcgggttctcaatctccctcccaatactattatggagtataaaacacatacagacagcattaagatgcccggacgcttaggcccccaaagattgttatttcagaacctctggaaacccagactgaacgtgccttag

SEQ ID NO: 150186 - DNA, 738 bp, Artificial Sequence
  derived and/or modified sequence
atgaataataaattcgacgccctgaaagatgacgactcaggggatcacgaccaaaatgaggagaacagcactcagaaagatggcgagaaggagaaaacagaacgcgacaagaaccagtctagctccaagcgcaaagcagtcgtgcctggacccgcagaacaccctctacagtacaactacacgttttggtattcacggcgtacacctggcaggcctaccagttcccaaagctatgagcagaatatcaagcagattgggactttcgccagcgtggagcaattctggagattttactcgcacatggtaagacccggtgatctgactgggcactcagattttcatctcttcaaagaaggcatcaagcccatgtgggaggacgacgccaataaaaacggaggtaaatggataatcagactgaggaagggcttggctagcagatgctgggaaaaccttatcctcgcaatgctaggggaacaatttatggtaggtgaagagatatgtggtgccgttgtaagtgttcggttccaagaagacattatatctatctggaataagacagcctctgatcaggctacaactgcacgaatcagggataccttgaggcgggtcctcaatttgccccctaacaccattatggagtacaagactcataccgatagtataaagatgccaggaagacttggccctcagaggctactcttccagaatctgtggaagcccaggctgaacgtgccttag

SEQ ID NO: 150187 - DNA, 738 bp, Artificial Sequence
  derived and/or modified sequence
atgaacaacaagttcgacgccctgaaggacgacgacagcggcgaccacgaccagaacgaggagaacagcacccagaaggacggcgagaaggagaagaccgagagagacaagaaccagagcagcagcaagagaaaggccgtggtgcccggccccgccgagcaccccctgcagtacaactacaccttctggtacagcagaagaacccccggcagacccaccagcagccagagctacgagcagaacatcaagcagatcggcaccttcgccagcgtggagcagttctggagattctacagccacatggtgagacccggcgacctgaccggccacagcgacttccacctgttcaaggagggcatcaagcccatgtgggaggacgacgccaacaagaacggcggcaagtggatcatcagactgagaaagggcctggccagcagatgctgggagaacctgatcctggccatgctgggcgagcagttcatggtgggcgaggagatctgcggcgccgtggtgagcgtgagattccaggaggacatcatcagcatctggaacaagaccgccagcgaccaggccaccaccgccagaatcagagacaccctgagaagagtgctgaacctgccccccaacaccatcatggagtacaagacccacaccgacagcatcaagatgcccggcagactgggcccccagagactgctgttccagaacctgtggaagcccagactgaacgtgccctag

SEQ ID NO: 150188 - protein, 1388 aa, Artificial Sequence
  derived and/or modified sequence
MSRPPPTGKMPGAPETAPGDGAGASRQRKLEALIRDPRSPINVESLLDGLNSLVLDLDFPALRKNKNIDNFLNRYEKIVKKIRGLQMKAEDYDVVKVIGRGAFGEVQLVRHKASQKVYAMKLLSKFEMIKRSDSAFFWEERDIMAFANSPWVVQLFYAFQDDRYLYMVMEYMPGGDLVNLMSNYDVPEKWAKFYTAEVVLALDAIHSMGLIHRDVKPDNMLLDKHGHLKLADFGTCMKMDETGMVHCDTAVGTPDYISPEVLKSQGGDGFYGRECDWWSVGVFLYEMLVGDTPFYADSLVGTYSKIMDHKNSLCFPEDAEISKHAKNLICAFLTDREVRLGRNGVEEIRQHPFFKNDQWHWDNIRETAAPVVPELSSDIDSSNFDDIEDDKGDVETFPIPKAFVGNQLPFIGFTYYRENLLLSDSPSCRETDSIQSRKNEESQEIQKKLYTLEEHLSNEMQAKEELEQKCKSVNTRLEKTAKELEEEITLRKSVESALRQLEREKALLQHKNAEYQRKADHEADKKRNLENDVNSLKDQLEDLKKRNQNSQISTEKVNQLQRQLDETNALLRTESDTAARLRKTQAESSKQIQQLESNNRDLQDKNCLLETAKLKLEKEFINLQSALESERRDRTHGSEIINDLQGRICGLEEDLKNGKILLAKVELEKRQLQERFTDLEKEKSNMEIDMTYQLKVIQQSLEQEEAEHKATKARLADKNKIYESIEEAKSEAMKEMEKKLLEERTLKQKVENLLLEAEKRCSLLDCDLKQSQQKINELLKQKDVLNEDVRNLTLKIEQETQKRCLTQNDLKMQTQQVNTLKMSEKQLKQENNHLMEMKMNLEKQNAELRKERQDADGQMKELQDQLEAEQYFSTLYKTQVRELKEECEEKTKLGKELQQKKQELQDERDSLAAQLEITLTKADSEQLARSIAEEQYSDLEKEKIMKELEIKEMMARHKQELTEKDATIASLEETNRTLTSDVANLANEKEELNNKLKDVQEQLSRLKDEEISAAAIKAQFEKQLLTERTLKTQAVNKLAEIMNRKEPVKRGNDTDVRRKEKENRKLHMELKSEREKLTQQMIKYQKELNEMQAQIAEESQIRIELQMTLDSKDSDIEQLRSQLQALHIGLDSSSIGSGPGDAEADDGFPESRLEGWLSLPVRNNTKKFGWVKKYVIVSSKKILFYDSEQDKEQSNPYMVLDIDKLFHVRPVTQTDVYRADAKEIPRIFQILYANEGESKKEQEFPVEPVGEKSNYICHKGHEFIPTLYHFPTNCEACMKPLWHMFKPPPALECRRCHIKCHKDHMDKKEEIIAPCKVYYDISTAKNLLLLANSTEEQQKWVSRLVKKIPKKPPAPDPFARSSPRTSMKIQQNQSIRRPSRQLAPNKPS

SEQ ID NO: 150189 - protein, 746 aa, Artificial Sequence
  derived and/or modified sequence
MIYKVECGLEEDLKNGKILLAKVELEKRQLQERFTDLEKEKSNMEIDMTYQLKVIQQSLEQEEAEHKATKARLADKNKIYESIEEAKSEAMKEMEKKLLEERTLKQKVENLLLEAEKRCSLLDCDLKQSQQKINELLKQKDVLNEDVRNLTLKIEQETQKRCLTQNDLKMQTQQVNTLKMSEKQLKQENNHLMEMKMNLEKQNAELRKERQDADGQMKELQDQLEAEQYFSTLYKTQVRELKEECEEKTKLGKELQQKKQELQDERDSLAAQLEITLTKADSEQLARSIAEEQYSDLEKEKIMKELEIKEMMARHKQELTEKDATIASLEETNRTLTSDVANLANEKEELNNKLKDVQEQLSRLKDEEISAAAIKAQFEKQLLTERTLKTQAVNKLAEIMNRKEPVKRGNDTDVRRKEKENRKLHMELKSEREKLTQQMIKYQKELNEMQAQIAEESQIRIELQMTLDSKDSDIEQLRSQLQALHIGLDSSSIGSGPGDAEADDGFPESRLEGWLSLPVRNNTKKFGWVKKYVIVSSKKILFYDSEQDKEQSNPYMVLDIDKLFHVRPVTQTDVYRADAKEIPRIFQILYANEGESKKEQEFPVEPVGEKSNYICHKGHEFIPTLYHFPTNCEACMKPLWHMFKPPPALECRRCHIKCHKDHMDKKEEIIAPCKVYYDISTAKNLLLLANSTEEQQKWVSRLVKKIPKKPPAPDPFARSSPRTSMKIQQNQSIRRPSRQLAPNKPS

SEQ ID NO: 150190 - protein, 1145 aa, Artificial Sequence
  derived and/or modified sequence
MVHCDTAVGTPDYISPEVLKSQGGDGFYGRECDWWSVGVFLYEMLVGDTPFYADSLVGTYSKIMDHKNSLCFPEDAEISKHAKNLICAFLTDREVRLGRNGVEEIRQHPFFKNDQWHWDNIRETAAPVVPELSSDIDSSNFDDIEDDKGDVETFPIPKAFVGNQLPFIGFTYYRENLLLSDSPSCRETDSIQSRKNEESQEIQKKLYTLEEHLSNEMQAKEELEQKCKSVNTRLEKTAKELEEEITLRKSVESALRQLEREKALLQHKNAEYQRKADHEADKKRNLENDVNSLKDQLEDLKKRNQNSQISTEKVNQLQRQLDETNALLRTESDTAARLRKTQAESSKQIQQLESNNRDLQDKNCLLETAKLKLEKEFINLQSALESERRDRTHGSEIINDLQGRICGLEEDLKNGKILLAKVELEKRQLQERFTDLEKEKSNMEIDMTYQLKVIQQSLEQEEAEHKATKARLADKNKIYESIEEAKSEAMKEMEKKLLEERTLKQKVENLLLEAEKRCSLLDCDLKQSQQKINELLKQKDVLNEDVRNLTLKIEQETQKRCLTQNDLKMQTQQVNTLKMSEKQLKQENNHLMEMKMNLEKQNAELRKERQDADGQMKELQDQLEAEQYFSTLYKTQVRELKEECEEKTKLGKELQQKKQELQDERDSLAAQLEITLTKADSEQLARSIAEEQYSDLEKEKIMKELEIKEMMARHKQELTEKDATIASLEETNRTLTSDVANLANEKEELNNKLKDVQEQLSRLKDEEISAAAIKAQFEKQLLTERTLKTQAVNKLAEIMNRKEPVKRGNDTDVRRKEKENRKLHMELKSEREKLTQQMIKYQKELNEMQAQIAEESQIRIELQMTLDSKDSDIEQLRSQLQALHIGLDSSSIGSGPGDAEADDGFPESRLEGWLSLPVRNNTKKFGWVKKYVIVSSKKILFYDSEQDKEQSNPYMVLDIDKLFHVRPVTQTDVYRADAKEIPRIFQILYANEGESKKEQEFPVEPVGEKSNYICHKGHEFIPTLYHFPTNCEACMKPLWHMFKPPPALECRRCHIKCHKDHMDKKEEIIAPCKVYYDISTAKNLLLLANSTEEQQKWVSRLVKKIPKKPPAPDPFARSSPRTSMKIQQNQSIRRPSRQLAPNKPS

SEQ ID NO: 150191 - DNA, 4167 bp, Artificial Sequence
  derived and/or modified sequence
atgagtaggccccctcctaccggcaagatgcccggcgcgcccgagaccgcacctggggacggagctggtgccagccgtcaacgcaagctggaggccctcattagggaccccagatccccaatcaacgtcgagtcactccttgacggcctgaattccctcgtgttggatctggattttccggccctcaggaagaacaagaacattgacaactttcttaatagatatgagaaaatagttaaaaagatcaggggcctgcaaatgaaggctgaagactatgatgtggtgaaagttattggcaggggcgcctttggggaagttcagctggtgagacacaaggcctcgcagaaagtatacgccatgaaactcctaagtaagtttgaaatgatcaagagatccgacagcgcatttttttgggaagaacgcgacattatggcgtttgccaatagcccatgggtggtccagctcttctatgccttccaggatgatagatacctatatatggtaatggagtatatgcctggtggggatctggtcaacctaatgtccaattatgacgttccagagaagtgggctaaattttacactgccgaagtggtgttggctttggacgccatccacagcatgggcttgattcatcgcgatgttaagcccgacaacatgctcctggataaacacggacatcttaaactggccgatttcggcacctgcatgaagatggatgaaaccggtatggtacactgcgacaccgcagtgggtactcctgattacatctctcccgaggtccttaaaagccagggaggggacggcttttacgggcgcgagtgtgattggtggagtgttggggtgtttctgtacgagatgttggtgggtgatactccattttatgccgattccctcgtggggacctattctaaaataatggatcacaagaactcactgtgttttcccgaggacgccgagattagtaaacacgcaaaaaatttaatttgtgccttcctgaccgatcgagaggttcgactgggaaggaacggagtggaggagatccgacagcatcctttctttaaaaatgatcagtggcactgggacaacatccgggaaactgccgctcctgttgttcctgagctgtcctccgatatagattcgagcaatttcgacgacatcgaagacgacaagggagatgtagagactttccccattcctaaagcctttgtcgggaaccagctgccttttattggctttacctactatagggagaacctcctccttagcgacagcccaagctgcagggagaccgattccatccaatctaggaaaaatgaagagagccaggagattcagaagaaactttacacactggaagagcatctgtcaaatgagatgcaggcaaaggaggaactcgagcagaagtgtaagagtgtgaacaccagactggaaaaaactgctaaggagctcgaggaagagatcactctaaggaaatcagtcgagagcgccctgagacagttggagcgcgaaaaggcactgttacagcacaagaacgcggagtaccaacgaaaggctgaccacgaggctgacaagaaaagaaacctggagaacgatgtgaacagtctcaaggaccagttggaggacctaaagaaacgcaatcaaaattctcaaatttcaaccgagaaggtgaaccagctgcagagacagctagatgaaacgaatgctttactccgcactgagagcgacaccgcggcacggctgcgcaagacccaagctgaatctagcaaacaaatccaacagctggagagcaataaccgcgacttgcaagataaaaactgtctcctggagaccgccaaactcaaactggagaaagagttcatcaatctgcagagtgccctcgaaagtgagaggcgggatcgaacgcacgggtccgagattattaatgacctgcaagggcgcatttgcggcctagaggaggatctaaaaaatggaaaaatcctgttagccaaggttgaactggagaagcgccagttgcaggagaggtttaccgacctagaaaaggagaaatccaatatggagatagacatgacctatcaactgaaagtcatccagcaatccctggagcaggaagaagccgagcataaggccaccaaggccagactcgccgacaagaataaaatttacgagtctattgaggaggctaaaagcgaagcgatgaaggagatggagaagaagttactagaagagcgcactcttaagcagaaggtcgagaacctcctcttggaggccgaaaagcgctgctctctgctggactgtgatctcaaacaatcccagcagaagataaatgagctgctcaaacagaaggacgtcctgaacgaagacgttaggaatctaacacttaagatagagcaggaaacacagaaaagatgcctgacccagaacgatcttaaaatgcagacccagcaggttaacacgctaaagatgagcgagaagcagctcaagcaagagaacaaccacctgatggagatgaagatgaacctcgagaagcagaatgctgagctacgtaaagaacggcaggacgctgacggtcaaatgaaagagctccaagaccagttagaagcggagcagtatttcagcaccctttacaagacgcaggttcgggaactaaaagaagagtgcgaagaaaaaactaagctgggcaaagagctccagcagaaaaagcaggaattacaagacgagagagactccctggccgcccagctggaaataactctcaccaaagccgatagcgagcagctggctcggtcgattgcggaagagcagtacagtgatctggagaaggaaaagataatgaaagagttagaaataaaggagatgatggcccggcacaaacaagagctgacagagaaggacgcaacaatcgcgtctctggaggagacaaataggacacttacctcggatgtcgcaaaccttgcaaatgaaaaggaggaactgaacaacaagctgaaggatgtgcaggagcagttatctcgcctaaaggatgaggaaatctcagccgctgcgattaaggcccagtttgaaaaacagcttcttacagaaaggacactaaaaacccaagcagtgaacaagctggccgagatcatgaacaggaaggaacctgtgaagcgagggaatgataccgacgttcgaagaaaagagaaggaaaatagaaaactgcacatggagctgaaaagcgagagagagaaactgacccagcagatgattaaatatcagaaggagctcaatgaaatgcaagcacagattgccgaagagtcacagatcaggattgaactccagatgactctggacagcaaggactccgacatagagcagcttagatctcaattgcaggccctgcatataggcttggactcatcgtctatcgggagcggacccggcgatgctgaggcagacgatgggttcccggaaagccgacttgaaggctggctgagcctccccgtgaggaataataccaaaaagttcgggtgggtaaaaaaatatgttatagtgtcttctaagaagattctgttttatgacagtgaacaggataaagagcagtccaacccttacatggtcctagatatcgacaagcttttccatgtgcggccagtgacgcagacagatgtgtaccgagccgacgccaaggaaatacctcgaatcttccagattctttatgccaatgagggcgagtcaaaaaaggagcaggaatttccagtcgaacctgtgggcgaaaagagtaattatatctgccacaaagggcacgagtttatccccacactctaccactttcctacgaactgcgaggcctgtatgaagcctctctggcatatgtttaaaccgcctccagcactggagtgccgcaggtgtcatataaagtgccacaaggaccatatggacaagaaagaagaaatcatagctccttgcaaagtgtactatgacatctcaaccgctaaaaacctccttctcctggcgaatagcacagaggaacaacaaaaatgggtttccaggctggtgaagaagatcccgaagaagccgcccgcgccagatcccttcgctaggagcagcccaaggacctctatgaaaattcagcagaatcaaagtattcgcagaccctccaggcagttggcccccaacaagccatcatag

SEQ ID NO: 150192 - DNA, 2241 bp, Artificial Sequence
  derived and/or modified sequence
atgatatacaaagtggaatgcgggttggaagaggatctgaagaacggaaagattcttctggctaaagtagaactcgagaaacggcagctgcaagaacgctttacagatcttgagaaagagaaatccaatatggagatagatatgacgtatcagttgaaagtgatccaacagtccctggagcaggaggaagcagaacataaggcaacaaaagcccgtctcgcagataaaaataaaatctacgagtcgatcgaggaggccaagtcagaggctatgaaggagatggagaaaaagctcttggaggaacgaacgcttaaacagaaggtcgaaaatctgctgctcgaagctgagaagagatgtagtttactggactgcgatctgaagcaatcacagcagaagatcaatgagctgttaaagcaaaaagacgtgcttaatgaggatgtgagaaatctgactcttaaaattgagcaggagacccagaagcgctgtctgacacagaatgacctgaaaatgcagacgcagcaggtgaatactctaaagatgtctgaaaaacagttaaagcaggaaaataaccacctcatggagatgaagatgaacttagaaaagcaaaatgccgagctccgaaaggaaagacaagatgcagacggacagatgaaggagttgcaagaccagctagaggccgaacaatatttctctaccctctacaagacacaggttcgggaactgaaagaggaatgtgaagaaaagactaaactaggcaaagaattgcagcagaagaagcaggaactccaggacgagcgggacagcttggcggcacagttggaaattactctgaccaaggcagattccgaacagctcgccaggtccatcgccgaggaacagtactctgaccttgagaaagaaaagattatgaaagaactggagatcaaggagatgatggctcgtcacaaacaggaattaactgagaaggatgccacaatcgcctctctcgaggaaaccaacaggacactgacttctgatgttgccaacctcgccaatgaaaaggaggagctcaataacaaactgaaagatgttcaggaacagttaagccggttgaaagacgaggagattagcgcggcggctattaaagctcaattcgaaaagcagcttctgacggagcggaccctgaaaacacaggctgttaataagctggccgaaataatgaataggaaggagcccgtaaaaagggggaatgacaccgatgtacgcagaaaagagaaggagaacagaaaactgcacatggaacttaagtccgaacgcgaaaaacttacacagcagatgatcaaataccagaaggagctcaacgagatgcaggcccaaatcgcagaagaaagtcagatcagaatcgaactgcaaatgaccttggatagtaaggacagtgatatagagcagctcaggtcacagctgcaggccttgcatatcgggctggatagctcatccatcggatctggacccggagacgccgaggctgatgatgggttccccgagagccgcttggagggatggctgtccttacctgtccgcaataacacaaagaagttcggatgggtcaaaaagtatgttattgtctcctccaaaaaaatattgttctatgactctgaacaggacaaagaacaatccaacccttacatggtgctggacatcgataagctgtttcacgtaaggccagtgacacagaccgacgtgtatcgcgccgatgcaaaagaaatacccagaattttccagattctttacgccaatgagggggaatccaaaaaagaacaagaatttccagtggaacccgtgggagaaaaatcaaattacatctgccataagggtcacgaattcataccgaccctgtatcatttccccacgaattgcgaagcgtgtatgaagcctctgtggcacatgttcaagccccccccggcccttgaatgccgccggtgtcacatcaagtgccacaaggatcacatggacaaaaaggaggagattattgccccatgcaaggtgtattacgacatctctacagcaaagaaccttcttctcctcgctaattctacagaagaacagcagaagtgggtgagccggctggtcaaaaagatcccgaaaaaacccccagcgcccgacccttttgcccggtcctcacctcgtacttcaatgaagatccagcagaatcagtccattaggcgtccaagcaggcagctggctcccaataagccaagctag

SEQ ID NO: 150193 - DNA, 3438 bp, Artificial Sequence
  derived and/or modified sequence
atggttcactgtgacaccgcagtgggtacccccgactatatctcaccagaagtgctcaaatcccagggaggggatggcttctatggacgcgagtgcgattggtggagtgtaggagtattcttgtacgagatgctcgtcggcgacacacccttctacgctgattctctggtgggaacgtactccaaaatcatggaccacaaaaattctctgtgcttcccagaagacgcggaaatctccaaacatgccaagaacctcatctgtgcttttcttactgaccgtgaagttcgtttgggtaggaatggcgtcgaggaaattcgacagcatcccttttttaagaacgaccagtggcactgggacaatatccgcgagaccgccgctcctgtagtccccgagcttagttccgacattgactcaagtaatttcgacgacatcgaagatgacaagggggatgtcgaaactttccccatccctaaagcctttgttggaaaccagctcccatttatcggctttacgtattacagggagaatcttctgctgagcgattcgccctcctgccgcgagaccgactctatccagagcagaaagaatgaggaaagccaagagatacaaaaaaagctgtatactctcgaagaacatctgtccaacgaaatgcaggctaaagaagaacttgagcagaagtgcaagagcgtcaatacaaggcttgaaaagacagcaaaagagctggaggaggaaatcactctgcgcaagagcgtggagagcgctctcagacaacttgaaagggagaaggctcttctgcagcataaaaatgcagagtatcagagaaaagctgaccatgaagcagacaaaaaacgaaatttagagaacgatgtgaatagcttaaaggaccagctggaggacctcaaaaagcgaaaccagaactctcagattagcactgagaaggtgaaccagctccagcgccagctcgacgagaccaatgccctgctgcgaaccgagagtgacacagccgccagactgcggaagacccaggctgagtcctcgaagcaaatccaacagctggaatcaaacaatcgggacctgcaggataagaattgcctgcttgagactgccaaactgaagctggaaaaagagttcattaaccttcagtcggcccttgagagtgagagacgggatagaacacatggttcagaaataattaacgatctgcaaggccggatctgcggattggaggaggatctgaagaacggcaagattctgttggccaaggtagagcttgaaaaaagacagctgcaagaaagatttaccgatttggagaaggaaaagtctaatatggaaatcgatatgacctaccagctgaaggtgatccagcagagtcttgagcaggaagaggccgagcacaaagccacaaaggccaggcttgcagataaaaataagatttacgagtctatagaggaggccaagagcgaagcgatgaaagaaatggaaaaaaaattgctggaggaaagaactctgaaacagaaggtggagaatttgctgctggaagccgagaaaagatgctctttgcttgattgtgatctcaagcaatctcagcaaaagattaacgagctccttaagcagaaggacgtcctcaacgaggacgtacggaatctgacccttaaaatcgagcaggaaacgcagaagcgttgtctgactcaaaacgatttgaaaatgcaaacacaacaagtgaatactctgaagatgagcgagaagcaacttaaacaggagaataaccacctgatggagatgaaaatgaatctcgagaaacagaacgccgagctgcggaaagaacgccaggacgcagatgggcaaatgaaggaactgcaggaccagttagaggcggaacagtacttctccacactgtacaaaacacaggttcgcgagcttaaagaagagtgcgaagaaaaaactaaattaggcaaagagctccagcagaaaaagcaagagctgcaagacgaacgggattcactggcagctcagcttgaaattactctgaccaaggcagattcagagcagttggcaaggagcatcgcagaggaacaatactccgacttagagaaagagaagattatgaaagaactggaaataaaggaaatgatggcaagacacaaacaagaacttactgagaaagacgccacaatcgcatccctggaggagaccaaccggaccctgactagcgacgtcgccaaccttgcaaatgaaaaagaagaactgaacaacaagctgaaggacgtgcaggagcagcttagcagactcaaagacgaagaaataagtgcagcagccattaaggcacagttcgagaaacagctgttgactgagcgaacacttaagacacaggccgtgaacaagttggccgagattatgaatcggaaggaacccgtaaaaaggggcaatgacacagacgtgcgccgcaaagagaaggaaaatcggaaactgcatatggagttgaagtctgagcgtgagaagcttactcagcagatgataaagtaccaaaaagagctgaacgaaatgcaagcccagatcgccgaggagagccagatcagaattgagctccaaatgacactagactccaaggactcggacattgagcagttgcggtcacagcttcaagccctgcacataggcctggacagcagttccattggatctggaccaggggacgccgaggctgatgacgggttcccagaaagtcggttggaggggtggctgtctctccccgtgcgtaacaatacgaagaagttcggctgggtcaagaaatatgtgatcgtgagctccaagaaaatacttttttacgattctgagcaggataaagagcagtccaatccctacatggtgctcgacatcgacaagctgttccatgtccgaccagtcacacagacagacgtatacagggccgatgccaaagaaattccccgcattttccaaatcttgtatgcaaatgaaggggagtccaagaaagaacaggagttcccagtggagccagtgggggaaaagagcaattacatttgccacaagggacacgaattcattcctaccctctaccatttccctactaattgcgaggcttgtatgaagccactctggcatatgttcaagccaccgcccgctctggaatgcaggcgctgccacatcaagtgccacaaggaccacatggacaaaaaagaagaaatcatagccccgtgtaaggtgtattacgatatttccaccgcaaaaaacctcttgctcctggctaacagcacggaagaacagcagaagtgggtcagccgcctggtcaagaagatccctaagaaaccacccgcaccggatcctttcgctcgatcgtccccacggacctccatgaaaattcaacagaatcagagtatcaggcgccccagcaggcagctggcccctaataaacctagctag

SEQ ID NO: 150194 - DNA, 4167 bp, Artificial Sequence
  derived and/or modified sequence
atgagccggcccccacccaccgggaagatgcctggggcccctgagacagcccctggagatggagctggggccagccggcagaggaagctggaggccctgatccgggaccccaggagccccatcaacgtggagagcctgctggatggcctgaacagcctggtgctggacctggacttccctgccctgaggaagaacaagaacatcgacaacttcctgaacagatatgagaagatcgtgaagaagatccggggcctgcagatgaaggccgaggactatgatgtggtgaaggtgattggccgcggggcctttggagaggtgcagctggtgcgccacaaggccagccagaaggtgtatgccatgaagctgctgagcaagtttgagatgatcaagagaagtgacagcgccttcttctgggaggagcgggacatcatggcctttgccaacagcccctgggtggtgcagctgttctacgccttccaggatgaccgctacctgtacatggtgatggagtacatgcctggaggagacctggtgaacctgatgagcaactatgatgtgcctgagaagtgggccaagttctacacagctgaggtggtgctggccctggatgccatccacagcatgggcctcatccacagagatgtgaagccagacaacatgctgctggacaagcacggccacctgaagctggccgactttggcacctgcatgaagatggatgagaccggcatggtgcactgtgacacagctgtgggcaccccagactacatcagccctgaggtgctgaagagccagggcggagatggcttctacggccgggagtgtgactggtggagcgtgggcgtcttcctgtatgagatgctggtgggggacacccccttctacgccgacagcctggtgggcacctacagcaagatcatggaccacaagaacagcctgtgcttcccagaagatgctgagatcagcaagcacgccaagaacctgatctgtgccttcctgacagaccgggaggtgcggctgggcagaaatggagtggaggagatccggcagcaccccttcttcaagaatgaccagtggcactgggacaacatccgggagacagctgcccctgtggtgcctgagctgagcagtgacatcgacagcagcaactttgatgacattgaagatgacaagggagatgtggagaccttccccatccccaaggcctttgtgggcaaccagctgcccttcatcggcttcacctactaccgggagaacctgctgctgagtgacagccccagctgccgggagacagacagcatccagagcaggaagaatgaggagagccaggagatccagaagaagctgtacaccctggaggagcacctgagcaatgagatgcaggccaaggaggagctggagcagaagtgcaagtctgtgaacacccggctggagaagacagccaaggagctggaggaggagatcaccctgaggaagtctgtggagagcgccctgcggcagctggagcgggagaaggccctgctgcagcacaagaatgctgagtaccagaggaaggctgaccatgaagctgacaagaagaggaacctggagaatgatgtgaacagcctgaaggaccagctggaggacctgaagaagaggaaccagaacagccagatcagcacagagaaggtgaaccagctgcagaggcagctggatgagaccaatgccctgctgaggacagaaagtgacacagctgcccggctgaggaagacccaggccgagagcagcaagcagatccagcagctggagagcaacaacagagacctgcaggacaagaactgcctgctggagacagccaagctgaagctggagaaggagttcatcaacctgcagagcgccctggagagcgagcggcgggacaggacccacggcagcgagatcatcaatgacctgcagggccgcatctgtggcctggaggaggacctgaagaatggcaagatcctgctggccaaggtggagctggagaagaggcagctgcaggagcgcttcacagacctggagaaggagaagagcaacatggagattgacatgacctaccagctgaaggtgatccagcagagcctggagcaggaggaggccgagcacaaggccaccaaggcccggctggccgacaagaacaagatctatgagagcattgaggaggccaagtctgaggccatgaaggagatggagaagaagctgctggaggagaggaccctgaagcagaaggtggagaacctgctgctggaggccgagaagcgctgcagcctgctggactgtgacctgaagcagagccagcagaagatcaatgagctgctgaagcagaaggatgtgctgaatgaagatgtgaggaacctgaccctgaagattgagcaggagacccagaagcgctgcctgacccagaatgacctgaagatgcagacccagcaggtgaacaccctgaagatgtctgagaagcagctgaagcaggagaacaaccacctgatggagatgaagatgaacctggagaagcagaatgctgagctgaggaaggagcggcaggatgctgatggccagatgaaggagctgcaggaccagctggaggccgagcagtacttcagcaccctgtacaagacccaggtgcgggagctgaaggaggagtgtgaggagaagaccaagctgggcaaggagctgcagcagaagaagcaggagctgcaggatgagcgggacagcctggccgcccagctggagatcaccctgaccaaggctgacagcgagcagctggcccggagcattgctgaggagcagtacagcgacctggagaaggagaagatcatgaaggagctggagatcaaggagatgatggcccggcacaagcaggagctgacagagaaggatgccaccatcgccagcctggaggagaccaacagaaccctgaccagtgatgtggccaacctggccaatgagaaggaggagctgaacaacaagctgaaggatgtgcaggagcagctgagccggctgaaggatgaggagatctctgctgctgccatcaaggcccagtttgagaagcagctgctgacagagaggaccctgaagacccaggccgtgaacaagctggccgagatcatgaacaggaaggagcctgtgaagagaggaaatgacacagatgtgcggaggaaggagaaggagaacaggaagctgcacatggagctgaagtctgagcgggagaagctgacccagcagatgatcaagtaccagaaggagctgaatgagatgcaggcccagattgctgaggagagccagatcagaattgagctgcagatgaccctggacagcaaggacagcgacatcgagcagctgcggagccagctgcaggccctgcacatcggcctggacagcagcagcatcggcagcggccctggagatgctgaggctgatgatggcttccctgagagccggctggagggctggctgagcctgcctgtgaggaacaacaccaagaagtttggctgggtgaagaagtatgtgattgtgagcagcaagaagatcctcttctatgattctgagcaggacaaggagcagagcaacccctacatggtgctggacatcgacaagctgttccacgtgcggcctgtgacccagacagatgtgtacagagcagatgccaaggagatcccccgcatcttccagatcctgtatgccaatgaaggagagagcaagaaggagcaggagttccctgtggagcctgtgggggagaagagcaactacatctgccacaagggccacgagttcatccccaccctgtaccacttccccaccaactgtgaggcctgcatgaagcccctgtggcacatgttcaagcccccaccagccctggagtgccgccgctgccacatcaagtgccacaaggaccacatggacaagaaggaggagatcatcgccccctgcaaggtgtactatgacatcagcacagccaagaacctgctgctgctggccaacagcacagaggagcagcagaagtgggtgtcccggctggtgaagaagatccccaagaagcccccagccccagacccctttgcccggagcagccccaggacctccatgaagatccagcagaaccagagcatccggcggcccagccggcagctggcccccaacaagcccagctag

SEQ ID NO: 150195 - DNA, 2241 bp, Artificial Sequence
  derived and/or modified sequence
atgatctacaaggtggagtgtggcctggaggaggacctgaagaatggcaagatcctgctggccaaggtggagctggagaagaggcagctgcaggagcgcttcacagacctggagaaggagaagagcaacatggagattgacatgacctaccagctgaaggtgatccagcagagcctggagcaggaggaggccgagcacaaggccaccaaggcccggctggccgacaagaacaagatctatgagagcattgaggaggccaagtctgaggccatgaaggagatggagaagaagctgctggaggagaggaccctgaagcagaaggtggagaacctgctgctggaggccgagaagcgctgcagcctgctggactgtgacctgaagcagagccagcagaagatcaatgagctgctgaagcagaaggatgtgctgaatgaagatgtgaggaacctgaccctgaagattgagcaggagacccagaagcgctgcctgacccagaatgacctgaagatgcagacccagcaggtgaacaccctgaagatgtctgagaagcagctgaagcaggagaacaaccacctgatggagatgaagatgaacctggagaagcagaatgctgagctgaggaaggagcggcaggatgctgatggccagatgaaggagctgcaggaccagctggaggccgagcagtacttcagcaccctgtacaagacccaggtgcgggagctgaaggaggagtgtgaggagaagaccaagctgggcaaggagctgcagcagaagaagcaggagctgcaggatgagcgggacagcctggccgcccagctggagatcaccctgaccaaggctgacagcgagcagctggcccggagcattgctgaggagcagtacagcgacctggagaaggagaagatcatgaaggagctggagatcaaggagatgatggcccggcacaagcaggagctgacagagaaggatgccaccatcgccagcctggaggagaccaacagaaccctgaccagtgatgtggccaacctggccaatgagaaggaggagctgaacaacaagctgaaggatgtgcaggagcagctgagccggctgaaggatgaggagatctctgctgctgccatcaaggcccagtttgagaagcagctgctgacagagaggaccctgaagacccaggccgtgaacaagctggccgagatcatgaacaggaaggagcctgtgaagagaggaaatgacacagatgtgcggaggaaggagaaggagaacaggaagctgcacatggagctgaagtctgagcgggagaagctgacccagcagatgatcaagtaccagaaggagctgaatgagatgcaggcccagattgctgaggagagccagatcagaattgagctgcagatgaccctggacagcaaggacagcgacatcgagcagctgcggagccagctgcaggccctgcacatcggcctggacagcagcagcatcggcagcggccctggagatgctgaggctgatgatggcttccctgagagccggctggagggctggctgagcctgcctgtgaggaacaacaccaagaagtttggctgggtgaagaagtatgtgattgtgagcagcaagaagatcctcttctatgattctgagcaggacaaggagcagagcaacccctacatggtgctggacatcgacaagctgttccacgtgcggcctgtgacccagacagatgtgtacagagcagatgccaaggagatcccccgcatcttccagatcctgtatgccaatgaaggagagagcaagaaggagcaggagttccctgtggagcctgtgggggagaagagcaactacatctgccacaagggccacgagttcatccccaccctgtaccacttccccaccaactgtgaggcctgcatgaagcccctgtggcacatgttcaagcccccaccagccctggagtgccgccgctgccacatcaagtgccacaaggaccacatggacaagaaggaggagatcatcgccccctgcaaggtgtactatgacatcagcacagccaagaacctgctgctgctggccaacagcacagaggagcagcagaagtgggtgtcccggctggtgaagaagatccccaagaagcccccagccccagacccctttgcccggagcagccccaggacctccatgaagatccagcagaaccagagcatccggcggcccagccggcagctggcccccaacaagcccagctag

SEQ ID NO: 150196 - DNA, 3438 bp, Artificial Sequence
  derived and/or modified sequence
atggtgcactgtgacacagctgtgggcaccccagactacatcagccctgaggtgctgaagagccagggcggagatggcttctacggcagagaatgtgactggtggagcgtgggcgtcttcctgtatgagatgctggtgggggacacccccttctatgctgacagcctggtgggcacctacagcaagatcatggaccacaagaacagcctgtgcttcccagaagatgctgagatcagcaagcacgccaagaacctgatctgtgccttcctgacagaccgggaggtgcggctgggcagaaatggagtggaggagatccggcagcaccccttcttcaagaatgaccagtggcactgggacaacatccgggagacagctgcccctgtggtgcctgagctgagcagtgacatcgacagcagcaactttgatgacattgaagatgacaagggagatgtggagaccttccccatccccaaggcctttgtgggcaaccagctgcccttcatcggcttcacctactaccgggagaacctgctgctgagtgacagccccagctgccgggagacagacagcatccagagcaggaagaatgaggagagccaggagatccagaagaagctgtacaccctggaggagcacctgagcaatgagatgcaggccaaggaggagctggagcagaagtgcaagtctgtgaacacccggctggagaagacagccaaggagctggaggaggagatcaccctgaggaagtctgtggagagcgccctgcggcagctggagcgggagaaggccctgctgcagcacaagaatgctgagtaccagaggaaggctgaccacgaggccgacaagaagaggaacctggagaatgatgtgaacagcctgaaggaccagctggaggacctgaagaagaggaaccagaacagccagatcagcacagagaaggtgaaccagctgcagaggcagctggatgagaccaatgccctgctgaggacagaaagtgacacagctgcccggctgaggaagacccaggccgagagcagcaagcagatccagcagctggagagcaacaacagagacctgcaggacaagaactgcctgctggagacagccaagctgaagctggagaaggagttcatcaacctgcagagcgccctggagagcgagcggcgggacaggacccacggcagcgagatcatcaatgacctgcagggccgcatctgtggcctggaggaggacctgaagaatggcaagatcctgctggccaaggtggagctggagaagaggcagctgcaggagcgcttcacagacctggagaaggagaagagcaacatggagattgacatgacctaccagctgaaggtgatccagcagagcctggagcaggaggaggccgagcacaaggccaccaaggcccggctggccgacaagaacaagatctatgagagcattgaggaggccaagtctgaggccatgaaggagatggagaagaagctgctggaggagaggaccctgaagcagaaggtggagaacctgctgctggaggccgagaagcgctgcagcctgctggactgtgacctgaagcagagccagcagaagatcaatgagctgctgaagcagaaggatgtgctgaatgaagatgtgaggaacctgaccctgaagattgagcaggagacccagaagcgctgcctgacccagaatgacctgaagatgcagacccagcaggtgaacaccctgaagatgtctgagaagcagctgaagcaggagaacaaccacctgatggagatgaagatgaacctggagaagcagaatgctgagctgaggaaggagcggcaggatgctgatggccagatgaaggagctgcaggaccagctggaggccgagcagtacttcagcaccctgtacaagacccaggtgcgggagctgaaggaggagtgtgaggagaagaccaagctgggcaaggagctgcagcagaagaagcaggagctgcaggatgagcgggacagcctggccgcccagctggagatcaccctgaccaaggctgacagcgagcagctggcccggagcattgctgaggagcagtacagcgacctggagaaggagaagatcatgaaggagctggagatcaaggagatgatggcccggcacaagcaggagctgacagagaaggatgccaccatcgccagcctggaggagaccaacagaaccctgaccagtgatgtggccaacctggccaatgagaaggaggagctgaacaacaagctgaaggatgtgcaggagcagctgagccggctgaaggatgaggagatctctgctgctgccatcaaggcccagtttgagaagcagctgctgacagagaggaccctgaagacccaggccgtgaacaagctggccgagatcatgaacaggaaggagcctgtgaagagaggaaatgacacagatgtgcggaggaaggagaaggaaaataggaagctgcacatggagctgaagtctgagcgggagaagctgacccagcagatgatcaagtaccagaaggagctgaatgagatgcaggcccagattgctgaggagagccagatccgcatcgagctgcagatgaccctggacagcaaggacagcgacatcgagcagctgcggagccagctgcaggccctgcacatcggcctggacagcagcagcatcggcagcggccctggagatgctgaggctgatgatggcttccctgagagccggctggagggctggctgagcctgcctgtgaggaacaacaccaagaagtttggctgggtgaagaagtatgtgattgtgagcagcaagaagatcctcttctatgacagcgagcaggacaaggagcagagcaacccctacatggtgctggacatcgacaagctgttccacgtgcggcctgtgacccagacagatgtgtacagagcagatgccaaggagatcccccgcatcttccagatcctgtatgccaatgaaggagagagcaagaaggagcaggagttccctgtggagcctgtgggggagaagagcaactacatctgccacaagggccacgagttcatccccaccctgtaccacttccccaccaactgtgaggcctgcatgaagcccctgtggcacatgttcaagcccccaccagccctggagtgccgccgctgccacatcaagtgccacaaggaccacatggacaagaaggaggagatcatcgccccctgcaaggtgtactatgacatcagcacagccaagaacctgctgctgctggccaacagcacagaggagcagcagaagtgggtgtcccggctggtgaagaagatccccaagaagcccccagccccagacccctttgcccggagcagccccaggacctccatgaagatccagcagaaccagagcatcagaagacccagccggcagctggcccccaacaagcccagctag

SEQ ID NO: 150197 - DNA, 4167 bp, Artificial Sequence
  derived and/or modified sequence
atgagccggcccccccccaccggcaagatgcccggcgcccccgagaccgcccctggggacggagccggggcgtcccgacagaggaaactcgaggctctcattagggacccccgttcccctattaacgtggagagcttgctggacggcctgaattcactggttcttgatttagactttcccgccctgcgcaagaacaaaaatattgataacttcctgaatagatacgaaaagattgtgaagaaaattcgtgggctgcagatgaaggccgaggattacgacgtggtgaaggtaatcggccgaggtgcatttggcgaggtccaactagtgagacacaaggcgagccagaaagtctatgccatgaagcttttgtctaagtttgagatgattaaacgatcagacagcgcctttttctgggaggagcgggacataatggcgttcgccaattccccgtgggtggtgcagctgttctacgcctttcaggacgataggtacctgtatatggtgatggagtatatgccagggggcgacctggttaatctgatgagcaactacgacgtccccgagaagtgggcaaagttttacaccgccgaagtagtgcttgcacttgatgctattcactcaatgggcctcattcaccgcgatgtgaagccggataacatgctgcttgataaacacggccacctcaagctcgcagattttggtacctgtatgaaaatggacgaaacgggaatggttcactgcgatacagctgtgggcactccggactacatcagccctgaggtcctcaagagtcagggaggtgacggcttctacgggcgcgagtgcgactggtggtcggtgggcgtgtttctgtatgaaatgctggtcggggatacgccattctacgcagatagcctcgttggcacatacagcaagatcatggaccataagaacagtctgtgcttcccggaggacgctgaaatttctaaacacgccaaaaacttgatttgcgcctttctgactgaccgcgaggtccgtttaggtcggaacggagtggaagagatcagacagcaccccttcttcaagaacgatcagtggcactgggacaatattcgggaaaccgcagcacccgtggtgccagagctctctagtgacatcgactcctcaaactttgatgatatcgaggacgacaagggtgatgtggagacgtttcccattcctaaggcatttgtcggaaaccagctgccattcattggcttcacttattaccgcgagaacctgctgctatccgacagcccttcatgccgggagaccgactccatccagtcccgtaaaaacgaggagagccaagaaattcagaaaaaattgtacacactcgaggaacatttgtctaatgagatgcaggcaaaagaggaattggagcagaaatgtaagagcgtgaatactagactggagaaaacagcaaaggaattggaagaggagattacattgagaaagtcagttgaaagtgccttgcgacagctggagcgcgaaaaagccctactgcagcacaaaaacgcagagtatcaacgcaaggccgaccacgaagcagacaagaagagaaacctggagaatgatgtgaatagtttgaaggaccagctggaggacctaaaaaagcgtaatcagaactcccagattagcactgaaaaggtgaaccagctgcagcggcagttagacgaaaccaacgccttgctcaggacggagtcagacaccgccgcaagactcagaaaaacccaggcagagtccagcaaacaaatacagcagttggaatctaacaatcgcgatctccaggacaagaactgcctgctggaaaccgccaagcttaagttggagaaggagtttatcaacctacagtccgcccttgagagtgaacggagggaccgaacccacggcagcgagattatcaacgacctccagggacgcatctgcggtcttgaagaggatctgaaaaatgggaaaattctgctggccaaggtcgagctggagaagcgacaactccaggaaaggtttactgacctggagaaagagaaatcaaacatggaaatcgatatgacgtatcagctcaaagttatccaacaaagcttggagcaggaagaggccgagcacaaagctaccaaggcacgactagcagataagaataagatctatgaatctatcgaagaggctaaaagtgaagcaatgaaggagatggagaaaaaactgctagaggagagaacccttaaacagaaggtcgaaaacttactgttagaggccgagaagaggtgcagtttgctcgactgcgacttgaagcagtctcagcaaaagattaacgaactgctgaagcagaaagacgttttgaacgaagatgtgcgcaacttaactcttaaaattgagcaggagacccagaaacggtgcctgacgcagaacgatctgaagatgcagacccagcaagtgaatacattaaagatgtccgaaaagcaactaaagcaagagaataaccacctaatggaaatgaaaatgaatctcgagaaacagaatgcggagctacgtaaagaaagacaggatgcagacggccagatgaaggagttacaggatcagctggaggctgaacagtatttttctacgttgtacaagacccaggtaagagagctgaaagaagagtgtgaggaaaagacgaagctgggaaaggagttgcagcagaagaagcaggagttacaggatgagcgggattcactggccgcacagttggagattactctcacaaaggctgattctgagcagcttgcccgctcgattgccgaggaacaatattcagacctggaaaaggaaaaaattatgaaagagttagagatcaaagagatgatggcccgccataaacaagagctgactgagaaggacgccaccatcgcatccctcgaggaaacaaaccggacgctaacctccgacgtcgctaatttagcgaacgaaaaggaggaactcaacaataagctgaaagatgtccaagaacaactcagccggctgaaggacgaggaaatttctgctgctgccatcaaggcacagtttgaaaagcagcttctcacggagcgaactctcaagactcaggccgtgaataaactggccgagatcatgaaccgtaaggaacctgtaaagcgcggtaacgacactgacgtacggcgaaaggagaaggagaaccgtaaacttcacatggagcttaaaagcgagagagagaaactgacccaacagatgattaagtaccagaaagagttaaacgagatgcaggctcagatcgcggaggaatctcaaattagaattgagctgcagatgacgctagactctaaggacagcgatattgaacagctgaggtcccagctacaggcactccatatcggcctggattcgagctccattgggagcggcccaggcgatgccgaggccgatgacgggtttccagagagtagattggagggctggttatcactgccagtgagaaacaacacaaagaaattcgggtgggtcaagaagtatgtgattgtaagttcgaagaagattttgttttacgacagtgaacaagacaaagaacagtccaatccttacatggtcctggacattgacaagctgttccacgtgagaccggtgacccagaccgatgtttatagggcggacgcaaaagaaatccccaggatatttcaaatactctacgcaaatgagggtgaaagtaagaaggaacaagagtttccagttgagccagtgggtgagaagagcaactatatttgccataaagggcacgagtttatcccaacactataccacttcccaaccaactgcgaagcctgcatgaaaccattgtggcatatgtttaagcccccccctgcgctggagtgccgccgatgccacatcaagtgtcataaggaccatatggacaaaaaagaggaaataatcgcaccctgtaaggtttactacgacatctctactgccaaaaacctgttgctgttagccaacagtaccgaggaacagcagaagtgggtgagccgcctcgtgaagaagataccgaaaaaacctccagccccggacccatttgctcgctcgagtcctcgcacatctatgaagattcagcagaaccaaagtatccggaggcctagccgacaattagcgcccaacaaaccgtcatag

SEQ ID NO: 150198 - DNA, 2241 bp, Artificial Sequence
  derived and/or modified sequence
atgatctacaaggtggagtgcggcctggaggaggacctgaagaacggaaagatcctacttgccaaggtggagctcgaaaaacggcaactccaagagcggttcacagatctggagaaggaaaaatctaacatggagattgacatgacataccagctgaaagtcatccagcaatccttggagcaagaggaagctgaacataaagcaacgaaagcacggctagcagataaaaacaagatttatgagagcatcgaagaagcaaagagcgaggcaatgaaagagatggaaaagaaactcctggaggagcgtaccctgaagcagaaggtagaaaatctgctgctggaggccgagaagagatgctctttgctggattgcgacttaaagcaatcacagcagaaaatcaacgagctccttaagcagaaagacgtgctgaacgaggacgtgcgaaacttgactctgaagattgagcaggaaactcagaagcgatgcctcacacagaatgacctcaagatgcagactcaacaggtgaacacactgaaaatgtccgaaaagcagctgaagcaggagaataatcacctaatggaaatgaagatgaacttggagaaacagaacgcagagctgcgcaaagagcgacaggatgcagatggccagatgaaagaactccaggaccagctagaggcagaacagtacttttccactctttacaaaacccaggtcagggaactcaaggaggaatgcgaggagaagacaaagctgggaaaagaactccagcagaagaaacaagagctccaggatgagcgagattcgctcgccgcccaacttgagattacattgaccaaggctgacagtgaacagctcgcaagatcaatagccgaggagcagtactccgatctggaaaaggagaagattatgaaagaactggagattaaagaaatgatggccagacacaagcaggagctcaccgagaaagacgccacaatagcctcccttgaagaaactaatcggacattgacttcagatgtcgcaaatctggccaacgagaaagaggagttaaacaacaagctcaaggacgtgcaggagcagctgtctagattaaaggacgaggagatcagcgctgcggcaattaaggcacagttcgaaaagcaacttctgaccgagcgaaccctaaaaacgcaggccgtgaacaaattagccgagatcatgaatcgtaaggagcccgttaagagagggaacgacacagacgtgcgacgaaaggaaaaggaaaaccggaagctgcacatggagctgaagtcagagagggaaaagctgacccagcaaatgatcaaatatcagaaggagttaaatgaaatgcaggcccagatcgccgaagagtctcagatcaggatagaactgcagatgactctggattccaaagatagcgatattgagcaactgcggagccagttgcaggcactgcacatcggtttggattctagttctatagggagcggcccgggcgacgctgaggctgatgatggattccctgagtccagactggaggggtggctgtctttacccgtaaggaataatacaaaaaaattcggttgggtgaagaaatatgtgatcgtgagttcaaaaaaaatcctattttacgactccgaacaggacaaagaacagagtaacccgtacatggttctcgacatcgataagctatttcacgtgcgccccgtcactcagacagatgtgtatagagcagacgctaaggaaatacccaggatttttcagatcctgtacgcaaacgagggggagtcaaaaaaggaacaggagttccctgtagagcccgtgggagaaaagagtaactacatctgtcataagggccatgagttcattccgactttgtatcactttcctactaattgtgaggcatgcatgaagccgctgtggcacatgtttaaacctccacctgcgctcgaatgccgccgatgccacatcaaatgccataaagaccatatggacaaaaaagaggagatcatcgccccatgcaaagtctactatgacatctccactgccaagaacctcctgctccttgccaactctaccgaggaacagcaaaagtgggtcagccggctggtgaagaaaattccaaagaaacctccggcccctgacccgttcgctcgttcctcacctcgaacctccatgaagattcagcaaaaccaaagcatccgcaggcctagccgccagctcgccccaaataaaccttcctag

SEQ ID NO: 150199 - DNA, 3438 bp, Artificial Sequence
  derived and/or modified sequence
atggtgcactgcgacaccgccgtgggcacccccgactacatcagcccggaagtgctcaaatcccaagggggcgacggcttctatggtagggagtgcgactggtggtctgttggagtctttctgtacgagatgttggtcggagacactccattctatgcggactctcttgttggaacctatagtaagatcatggaccacaagaactccctctgctttcctgaggacgcagagatctctaaacacgctaagaacctcatttgtgccttcctgaccgaccgggaggtgcggctcggccgtaacggcgtcgaggagatccgacaacatccattctttaaaaatgaccagtggcattgggacaacatccgagaaaccgcggcccccgtggtaccggaactgagctctgatattgatagcagtaacttcgacgatattgaggatgataagggtgacgtcgagacgtttcccatacctaaggcatttgtaggcaatcagctccctttcatagggtttacctattatagagaaaacctcctgctctcggattccccaagctgccgagagaccgattccattcagtccaggaagaatgaggaatcccaggaaatccagaagaaactctataccttagaagaacatttgagcaatgaaatgcaggctaaagaggagctggaacagaagtgtaaatcagtcaatacacgtttggaaaagactgctaaggaactcgaagaagaaataacccttaggaaatcggtcgagtccgctctgcgtcagctggaacgcgagaaggctctactgcagcataaaaacgccgaatatcagcgtaaagcagaccatgaggccgacaagaagagaaacctggagaacgacgttaactcccttaaggatcagcttgaggatctcaaaaagagaaaccaaaatagtcagataagcacagagaaggtcaatcagctgcagcgacaactagatgagactaatgctttattgcgtaccgaatccgacactgcagctaggcttaggaaaactcaagctgaatcctcaaagcagatccaacaacttgaatcaaataatcgagacctgcaggataagaattgcttactggagactgccaaactcaaactagagaaggagttcattaatctacagagtgcattggaatcagagcgaagagatcgaacacacggaagcgagataatcaatgatttacaggggcggatctgcggtctggaagaggatctgaaaaacggtaagatactgctcgcgaaggtagagttggaaaaacgccagctgcaagaaagattcaccgacttggaaaaggaaaaaagtaacatggaaattgacatgacttatcaactgaaagtaatccagcagagtcttgaacaggaggaggctgagcataaagctacgaaagcccgattagcggataagaataagatctacgaatccatagaagaggctaaatctgaggcaatgaaggaaatggagaagaagcttctagaggagaggaccttgaagcagaaggttgagaatctgctgctagaagccgagaaaagatgttccctcctggattgtgacttgaagcagtctcagcagaaaatcaatgaactgctgaagcagaaagatgtgctgaatgaggatgttaggaacctaaccctgaagatcgaacaggagacccagaagcgatgtctaacacagaatgacctgaagatgcagacacaacaggtgaatacgctgaagatgagtgagaagcaactgaagcaggaaaacaatcatttaatggagatgaaaatgaatctcgagaaacaaaatgcagaactgcgtaaagagagacaggatgctgacggacagatgaaggaactgcaagaccaacttgaagctgagcagtactttagtaccttatacaaaacacaagttagagaactgaaggaagaatgtgaagaaaaaacaaaattgggaaaagagctgcagcagaagaagcaggaactacaggatgagcgggatagcctggccgcacagctggagatcaccctgacaaaggcggattccgaacagcttgcacgaagtatcgccgaggaacagtattccgatctggaaaaggagaagatcatgaaagaactggaaattaaagagatgatggctagacacaagcaagaactaacggagaaagacgctacaatcgctagtctagaggaaaccaatcgcacactgacatccgatgtagcaaacctggccaatgagaaagaagagttgaacaataagcttaaagatgtgcaggagcagttatcaaggttgaaggatgaagaaatttctgcagctgcaataaaggcacagttcgagaagcagctgctcactgaacgcaccttgaaaacacaggcagttaataagcttgctgaaattatgaaccgtaaggagccggtgaagcgcggtaacgatacagacgtgaggagaaaggaaaaggagaatcgaaaactgcacatggagttgaagagtgagcgggaaaagcttacacagcagatgatcaaataccaaaaggagttaaatgagatgcaggcccagatcgccgaggagagtcagatccgaatcgaactgcagatgactttggacagcaaggactctgacattgagcaactcaggagtcaactccaagcattgcacatagggctggacagctccagtattggcagcggaccgggtgacgcagaagctgacgacggattcccggaatccagactggagggctggctttccctgccggtccgcaataatacaaaaaaatttggctgggtcaagaaatacgtgattgtgagctccaaaaaaattcttttctacgacagcgaacaggataaggagcagtccaatccttatatggtgttggatatagacaaattgtttcatgtaaggccggtcacccagactgacgtttatcgagcggatgccaaggagatcccccgaatatttcagattctgtacgcgaacgagggggaatcaaagaaggagcaggagtttcctgtggaacccgttggagagaagagtaattatatatgccataaagggcatgagttcatccctacactgtatcacttcccaacgaactgtgaggcttgcatgaagcccttatggcatatgtttaaaccgccccctgcactggagtgcaggcggtgtcacatcaaatgtcacaaggaccacatggataaaaaggaagaaatcattgctccatgcaaggtgtattatgacatttctacagctaagaacctgctcttgctcgccaactccacggaggagcagcagaagtgggtatccaggttggtgaagaagatcccgaagaagccaccagcacccgatccattcgcccgatccagtcccagaacatcaatgaaaatccaacagaatcagagcataagaagacccagcaggcaactggctcccaacaaaccatcatag

SEQ ID NO: 150200 - DNA, 4167 bp, Artificial Sequence
  derived and/or modified sequence
atgtccagacccccacctaccggcaaaatgcccggagccccagagaccgcgccaggagatggggcaggggcatccagacagcggaaactagaggcactgatccgagatcccagatcccccattaatgtcgagtctcttctggacggcctgaacagcctggtcctggacctggactttcctgccctgaggaagaacaaaaacattgacaacttcttaaaccgctatgaaaagatcgtgaagaaaataagaggactgcagatgaaggctgaagactatgacgtcgtgaaggttattggacggggagccttcggggaggtccagttagtgagacataaggcttctcagaaggtgtatgccatgaagctcctttccaaatttgagatgataaagagatctgacagtgcttttttctgggaggaaagggacattatggccttcgccaattccccttgggtggtgcagctattctacgcctttcaggacgacagatacctgtacatggtgatggaatatatgcctggtggggacttggtgaatttgatgagcaattatgatgtgcctgagaaatgggccaagttttacacagccgaagtggttttggccctggatgccatacacagcatgggtctgatccaccgggatgtaaagccagataatatgctgcttgacaagcacggacacctgaaactcgctgacttcgggacttgtatgaagatggatgaaaccggtatggtccattgtgacactgccgtgggcacacctgactacatttctcctgaagtacttaagtcacagggaggcgatgggttttacggtagagaatgtgactggtggtcggtgggcgtgttcctgtacgagatgcttgtgggagacacaccattctacgccgactctttggtggggacctactctaagattatggatcacaaaaacagtctctgcttccccgaggacgcagagatatctaaacacgcaaaaaacttgatttgcgctttcctgacagatcgagaagttcgcctcggaaggaatggggtggaagagattaggcagcacccattcttcaagaatgaccagtggcactgggataatatccgtgaaacagccgctccagtggtgcctgaattaagtagtgatattgatagtagcaattttgatgacatcgaggatgataagggagacgtcgagactttccctatcccaaaagccttcgtcggaaatcagttgccatttataggcttcacatattaccgggaaaatcttctgctcagcgattccccctcctgccgcgaaacagatagtatccagagccggaagaacgaagagtcccaagaaatacagaagaagctgtatacccttgaagaacatctgtccaatgagatgcaggctaaggaggaattagaacaaaaatgcaagagtgtgaacaccagattggaaaagaccgcaaaagaactcgaagaggagattacgttgaggaagtcagtggagagtgccttacgacagttagaacgcgagaaggccctgctacagcacaaaaacgctgagtatcagaggaaggccgaccatgaggcagataaaaagcgcaacctcgagaacgatgttaactccctgaaagaccagctcgaagatcttaaaaagcggaatcaaaattctcagatttccactgagaaggttaaccagctccagcgtcagctcgatgaaacgaacgccctcctgaggacagaaagcgatacagcagcacggctccgtaagactcaggcagagtctagcaagcagatccagcaactggagtccaacaacagagacctccaagacaaaaattgtctgctggagacggccaagctcaaactcgaaaaggaattcatcaatctccagtcagcgctggagtcagaacgccgagaccggacccatggatccgagataatcaatgacctgcagggccgtatctgtggattagaggaggaccttaaaaatggaaagatccttctcgccaaagtcgagttggagaagcgtcagctgcaggaacgtttcacggatctcgagaaagagaaatcaaacatggaaatagatatgacctatcaactcaaggtcatccagcagtccctggaacaggaagaggcagaacacaaggcaaccaaagctcgtcttgcggacaagaacaaaatttacgagtcaatcgaggaggccaaatcagaggccatgaaagaaatggagaaaaaactgctcgaagaacgaactctgaaacagaaggtggaaaacctgctccttgaggccgaaaagcgatgttcactgctcgattgcgatctaaaacagtctcagcaaaaaattaacgagctgctgaaacaaaaggacgtgttaaatgaagatgtgcggaacctgacgctgaagattgagcaggagactcaaaagaggtgcctcacccaaaacgacctgaaaatgcagacccagcaggtcaacaccttgaaaatgtctgaaaagcagctgaaacaggaaaacaaccacctaatggaaatgaagatgaacttggaaaagcagaacgccgaactcagaaaggagcgccaggacgctgacggccaaatgaaggagctgcaggatcagctcgaagcagaacagtatttttctacattgtacaagacccaagttcgcgaactgaaggaggaatgcgaggaaaagactaagctcggcaaggaactgcagcaaaagaagcaggaactgcaggacgaaagggatagtttggccgctcaactcgagatcacactgacgaaggcagacagcgaacaactggcacggtccatcgccgaggagcagtactccgatctggagaaagaaaaaattatgaaggaattggagatcaaggagatgatggctaggcacaaacaggagctcacagaaaaggatgccacaattgcctctctggaagagacaaatcgaactcttacaagcgatgtggctaacctagcaaatgaaaaagaagagctaaataataagctgaaagacgtgcaggaacagctgtcacgcctgaaggatgaggagatcagcgctgctgcaattaaggcccaatttgagaagcagctgctcaccgaacggacgctgaagacgcaagcagtgaacaagctcgccgaaattatgaatagaaaggagcctgtgaaaaggggaaacgacactgacgttagaagaaaagaaaaggagaaccgaaaactgcacatggagctcaagtcagaaagagaaaagctcacccagcagatgatcaagtatcagaaggaactcaatgagatgcaggctcagatagctgaggaaagccagatccgcatcgagcttcagatgacacttgatagtaaagacagtgacattgagcagttgcggtctcaactgcaagccctacacatcggattagatagttcgtctataggcagtggtccgggagacgctgaagccgatgatgggtttcccgaatccagactcgagggatggctgtcattgcctgtacgaaacaatacgaagaagtttggctgggtgaagaagtacgtcattgtctcttcaaaaaaaattctgttctatgattccgagcaggataaagagcagtccaacccttatatggtactggacatagataaactgttccacgtgagacccgtcactcaaacggacgtctatcgggctgatgctaaagagattcccaggatctttcagatcctgtacgccaatgagggagaatccaaaaaagaacaagagttcccagtcgagcctgtgggcgagaaatccaattatatctgccacaaagggcatgagtttattccaactctctaccacttcccaacaaactgtgaagcgtgcatgaaacctctctggcacatgttcaagcccccacccgctttggagtgcaggcggtgccacatcaagtgccataaggatcacatggacaaaaaagaggaaatcatcgcaccatgcaaggtatactacgatatctcaaccgcaaagaatttattacttttggccaactccaccgaggagcagcagaagtgggtgagccgtctggttaaaaagattccaaaaaagcctcccgcaccggacccgttcgcgcgaagcagccccaggacatccatgaaaatccaacagaaccagtccatacgccgtccgtccagacaattggctcccaacaagccgagttag

SEQ ID NO: 150201 - DNA, 2241 bp, Artificial Sequence
  derived and/or modified sequence
atgatttacaaggtggagtgtgggcttgaggaggatctgaagaacggcaaaatcctcctggccaaggttgagctcgagaagcggcagcttcaagagcgtttcacagatctggagaaggaaaagagtaacatggagattgatatgacgtaccagctgaaggtgatccagcagagtctcgaacaggaggaagctgaacataaagctacaaaagctaggcttgccgataagaacaagatctacgagtccatagaagaagcaaagagtgaagccatgaaggaaatggagaaaaaactgctggaagagaggactctgaagcagaaagttgagaatctcctgctagaggccgagaagaggtgctccctactagattgcgatcttaaacagagccagcagaagatcaacgagcttctcaaacagaaggatgtgctcaacgaggacgtccgtaatcttacgctaaaaattgaacaagaaacccagaaacgctgcctgactcagaacgacctgaaaatgcagactcagcaggttaataccttgaaaatgtccgagaagcagctcaaacaggagaataatcatttaatggagatgaaaatgaacttggaaaagcaaaatgcagaactgcgtaaggagcgacaagacgcagatgggcaaatgaaagaactgcaggatcagttggaggcagaacagtatttcagcacactgtataagactcaggtgcgtgagttgaaagaagaatgcgaagaaaagacaaaattaggcaaagagttacagcagaaaaaacaggagctgcaggatgagcgagactcattggcagctcagctggagattactctaacgaaagccgattctgagcagttagccaggagtatagccgaagaacagtactccgatctggaaaaagaaaaaatcatgaaagaattggagattaaagagatgatggccaggcacaagcaggaacttactgagaaggatgcgaccatcgcatctctggaggagaccaatcggactctcactagtgatgtggccaatcttgctaacgaaaaggaggaactgaataacaaattgaaggacgtccaggagcagctgtctaggctgaaagatgaggagatctcagctgctgcaatcaaagcacagtttgagaagcagctcttgaccgagcggacccttaaaacgcaggctgtgaataagctggccgagatcatgaatcgcaaggagcctgttaaacgcggtaacgatactgatgtgcggagaaaagaaaaagaaaatcgtaaacttcacatggaactgaagtccgaacgcgaaaagctgacacagcagatgataaagtaccagaaggaactaaatgaaatgcaagcccagatagcggaggagtcacagatccgtatcgagctgcagatgaccctggactcaaaagatagcgacatagaacaactgcgcagtcagctccaggcacttcacatcggtctcgacagctcaagcataggaagcggacccggagacgctgaagccgacgacgggttcccggaatccagactcgaaggctggctgagcctccccgttcgaaacaatactaagaaatttggttgggtgaagaagtacgtgatcgtctcttcgaaaaagatcctcttttacgattccgaacaggataaagaacaatctaatccctacatggtgctcgatatcgacaagctgtttcacgtgcgaccagtgacacagacggatgtgtatcgcgctgatgcaaaagagattcctcgaatctttcaaatcctttatgctaacgagggagagagcaagaaggagcaggagttccccgtggagcccgtgggagagaagtcgaattacatttgccacaaggggcatgagtttatcccgactctgtatcattttcctacgaactgcgaagcatgcatgaaacccttgtggcatatgtttaaaccccctcctgccttagagtgcagaaggtgccatattaagtgtcacaaggaccacatggacaagaaagaagagataattgcgccttgcaaggtgtactacgacatttcaaccgccaagaatctcctgttgctagccaacagcactgaggagcagcaaaagtgggtttctcgccttgtcaaaaaaatacctaaaaaacctccagctccagatccgttcgccagatcctcacctcggacaagcatgaagatccagcaaaaccagtccattagaaggccctctcggcagttggctccaaacaaaccttcctag

SEQ ID NO: 150202 - DNA, 3438 bp, Artificial Sequence
  derived and/or modified sequence
atggttcattgtgatacggccgttgggaccccagactacatatcgccagaggtgctgaagagccagggaggtgatggcttttatggacgagaatgtgactggtggagtgtgggcgtgtttctgtatgagatgctggtcggagatacgcccttttacgctgacagcctagtcggtacgtactcaaagatcatggaccataaaaactctctttgctttccagaagacgcggagatctccaagcatgcaaaaaatctgatctgcgcttttctcaccgacagagaggtaagattgggtaggaacggggtcgaggaaatacgccagcatccattctttaagaacgatcagtggcactgggacaatatccgtgaaaccgccgctcccgtggtccctgagcttagcagcgatatcgacagctctaattttgatgacatcgaagacgataagggcgacgtcgagaccttcccgataccaaaggccttcgttggtaaccaactcccttttatcggctttacttactatagggagaatctcctgctctccgattctcccagctgtagagagactgatagcatccagtctaggaagaacgaagaatcacaggaaattcagaaaaaactgtatactcttgaggagcatcttagtaatgagatgcaagcaaaggaagaattggaacaaaaatgtaaaagtgtgaatactagactggagaagaccgccaaggagttggaggaggagatcacactacggaagtccgtggagagtgctctgaggcagcttgaaagagagaaggctttactccagcacaagaatgccgaatatcagagaaaggccgaccatgaggccgataagaaacgcaatctggagaacgacgtcaacagcctgaaggaccagctagaggacctgaaaaaaaggaaccaaaactcacagataagcaccgagaaggttaaccagcttcagaggcaactggacgagactaatgcactgctgaggaccgaatctgatacagccgctcgccttaggaaaacccaggcagagagcagtaagcagatccaacagctggaaagcaataaccgcgacctgcaggacaaaaattgtcttctggagacagccaaactgaagttagagaaggaattcattaacctgcagagtgctctcgaatccgaaaggcgtgataggacacacgggtcagaaataattaacgacctgcagggcagaatttgtggactggaggaagacctcaaaaatggcaagatcctcctggctaaggtggaattagagaaacgtcaactgcaggagaggtttaccgacctcgagaaagagaagtcaaacatggagattgacatgacgtaccaactgaaggtgattcagcagagtcttgagcaggaggaagccgagcataaggccactaaggccagactcgcggacaagaacaaaatatacgagtcaatcgaagaagccaagtctgaggccatgaaggaaatggaaaagaagctgctcgaagagaggacacttaagcagaaggtagaaaacttgctgctcgaggccgagaagcgttgctctttattggactgtgatttgaaacagtctcagcaaaagattaacgaactgctgaagcagaaagacgtactgaacgaagacgtgcgcaacttaaccctgaaaattgagcaggaaactcaaaagaggtgcctaacacagaatgatctgaagatgcagacgcagcaggtgaataccttgaaaatgagcgagaagcaattaaagcaagaaaataaccatttaatggaaatgaagatgaacctagagaagcaaaacgcagaactgagaaaagagcgacaagacgcagacggccagatgaaggaactccaggatcagcttgaggccgagcagtacttctccactctgtacaagactcaggtgcgcgagctgaaggaggaatgcgaggaaaagacaaaactcggaaaagagctgcagcagaaaaagcaggagctgcaggatgaaagagatagcctcgctgcccaacttgaaattactcttactaaggctgactcagaacagctggcgagaagtattgccgaagagcagtacagtgacttggaaaaagagaaaatcatgaaagaactggagatcaaagagatgatggctcggcacaagcaggaactgactgaaaaagacgccacaattgcaagcctcgaggaaacaaatagaacactgaccagcgacgtagcaaacttagctaacgagaaagaagaactgaataacaagctgaaggatgtccaggaacaattgtctagacttaaggatgaagaaatcagcgcggcagcaatcaaggcacagttcgagaagcagctgcttactgagcgtacccttaaaacgcaggcagtgaataagttggccgagatcatgaaccggaaagaacctgttaaaagaggcaacgacacggacgtcagacggaaggaaaaggaaaatagaaagttgcacatggagctgaagtcagagagggagaaacttacacagcaaatgattaaataccaaaaggagctcaacgaaatgcaggcacagatagcagaagagagtcagatcagaatcgaacttcagatgacccttgacagcaaggacagtgatattgagcagcttagatcccagctgcaggcgctgcatattggcctcgattcgtcatccattgggtccgggccaggggacgccgaagctgatgacggtttcccagagtctagacttgaaggttggttgtccctaccggtcaggaataacaccaaaaaattcggatgggtgaagaagtacgtgatagtgagcagcaagaagattctgttctacgatagcgagcaggataaggagcagtctaacccatatatggttctggacatagacaagctcttccacgtgcgccctgtcactcagacagatgtgtatagagccgacgccaaggaaatcccaagaatcttccagatcctgtacgccaatgagggcgaaagcaagaaggaacaggagtttcctgtggaaccagtgggcgagaaaagtaactatatctgtcataaaggccatgagttcatccctactctgtaccactttcccactaattgcgaggcttgtatgaagcctttgtggcacatgtttaagccgcctcccgctcttgagtgcaggcggtgtcacataaagtgccacaaagatcacatggataaaaaagaggagatcattgccccatgcaaagtgtattatgatatttcgacagccaagaatctcttgctcctggcaaatagtactgaagaacagcagaagtgggtcagccgcttagtaaaaaagataccgaaaaaacctcccgctcctgatcctttcgctcgttccagccctaggacatctatgaagattcagcagaaccagtccatccgacggcctagtagacagttggcacctaacaagcccagctag

SEQ ID NO: 150203 - DNA, 8292 bp, Artificial Sequence
  derived and/or modified sequence
caaggcggccggcggcgaccatggcagcgggccggcggcggccgtagtggcccaggcctgggcttcagcctcccggggccccagagggcggggcggtccgggccgcggcggtggcggcgccacttccctgctcccgcccgaggactcctgcgggcactcgctgaggaccagcggaccggcggcgcgaatctgactgaggggcggggacgccgtctgttccccgccgctcccggcagggccgggccgggctgggccgggctgggccgggcgggcccctgggagcagcccccaggcgggggaccgccttggagacccgaagccggagctagaggcaggcggtgggcccgggtggagtcccggccggagctggtggttcgggggcggtgctaggccccgaggctgcgggacctgagcgcgaggagcctgagtgcgggtccagcggtggcggcatgagccggcccccgccgacggggaaaatgcccggcgcccccgagaccgcgccgggggacggggcaggcgcgagccgccagaggaagctggaggcgctgatccgagaccctcgctcccccatcaacgtggagagcttgctggatggcttaaattccttggtccttgatttagattttcctgctttgaggaaaaacaagaacatagataatttcttaaatagatatgagaaaattgtgaaaaaaatcagaggtctacagatgaaggcagaagactatgatgttgtaaaagttattggaagaggtgcttttggtgaagtgcagttggttcgtcacaaggcatcgcagaaggtttatgctatgaagcttcttagtaagtttgaaatgataaaaagatcagattctgcctttttttgggaagaaagagatattatggcctttgccaatagcccctgggtggttcagcttttttatgcctttcaagatgataggtatctgtacatggtaatggagtacatgcctggtggagaccttgtaaaccttatgagtaattatgatgtgcctgaaaaatgggccaaattttacactgctgaagttgttcttgctctggatgcaatacactccatgggtttaatacacagagatgtgaagcctgacaacatgctcttggataaacatggacatctaaaattagcagattttggcacgtgtatgaagatggatgaaacaggcatggtacattgtgatacagcagttggaacaccggattatatatcacctgaggttctgaaatcacaagggggtgatggtttctatgggcgagaatgtgattggtggtctgtaggtgttttcctttatgagatgctagtgggggatactccattttatgcggattcacttgtaggaacatatagcaaaattatggatcataagaattcactgtgtttccctgaagatgcagaaatttccaaacatgcaaagaatctcatctgtgctttcttaacagatagggaggtacgacttgggagaaatggggtggaagaaatcagacagcatcctttctttaagaatgatcagtggcattgggataacataagagaaacggcagctcctgtagtacctgaactcagcagtgacatagacagcagcaatttcgatgacattgaagatgacaaaggagatgtagaaaccttcccaattcctaaagcttttgttggaaatcagctgcctttcatcggatttacctactatagagaaaatttattattaagtgactctccatcttgtagagaaactgattccatacaatcaaggaaaaatgaagaaagtcaagagattcagaaaaaactgtatacattagaagaacatcttagcaatgagatgcaagccaaagaggaactggaacagaagtgcaaatctgttaatactcgcctagaaaaaacagcaaaggagctagaagaggagattaccttacggaaaagtgtggaatcagcattaagacagttagaaagagaaaaggcgcttcttcagcacaaaaatgcagaatatcagaggaaagctgatcatgaagcagacaaaaaacgaaatttggaaaatgatgttaacagcttaaaagatcaacttgaagatttgaaaaaaagaaatcaaaactctcaaatatccactgagaaagtgaatcaactccagagacaactggatgaaaccaatgctttactgcgaacagagtctgatactgcagcccggttaaggaaaacccaggcagaaagttcaaaacagattcagcagctggaatctaacaatagagatctacaagataaaaactgcctgctggagactgccaagttaaaacttgaaaaggaatttatcaatcttcagtcagctctagaatctgaaaggagggatcgaacccatggatcagagataattaatgatttacaaggtagaatatgtggcctagaagaagatttaaagaacggcaaaatcttactagcgaaagtagaactggagaagagacaacttcaggagagatttactgatttggaaaaggaaaaaagcaacatggaaatagatatgacataccaactaaaagttatacagcagagcctagaacaagaagaagctgaacataaggccacaaaggcacgactagcagataaaaataagatctatgagtccatcgaagaagccaaatcagaagccatgaaagaaatggagaagaagctcttggaggaaagaactttaaaacagaaagtggagaacctattgctagaagctgagaaaagatgttctctattagactgtgacctcaaacagtcacagcagaaaataaatgagctccttaaacagaaagatgtgctaaatgaggatgttagaaacctgacattaaaaatagagcaagaaactcagaagcgctgccttacacaaaatgacctgaagatgcaaacacaacaggttaacacactaaaaatgtcagaaaagcagttaaagcaagaaaataaccatctcatggaaatgaaaatgaacttggaaaaacaaaatgctgaacttcgaaaagaacgtcaggatgcagatgggcaaatgaaagagctccaggatcagctcgaagcagaacagtatttctcaaccctttataaaacacaagttagggagcttaaagaagaatgtgaagaaaagaccaaacttggtaaagaattgcagcagaagaaacaggaattacaggatgaacgggactctttggctgcccaactggagatcaccttgaccaaagcagattctgagcaactggctcgttcaattgctgaagaacaatattctgatttggaaaaagagaagatcatgaaagagctggagatcaaagagatgatggctagacacaaacaggaacttacggaaaaagatgctacaattgcttctcttgaggaaactaataggacactaactagtgatgttgccaatcttgcaaatgagaaagaagaattaaataacaaattgaaagatgttcaagagcaactgtcaagattgaaagatgaagaaataagcgcagcagctattaaagcacagtttgagaagcagctattaacagaaagaacactcaaaactcaagctgtgaataagttggctgagatcatgaatcgaaaagaacctgtcaagcgtggtaatgacacagatgtgcggagaaaagagaaggagaatagaaagctacatatggagcttaaatctgaacgtgagaaattgacccagcagatgatcaagtatcagaaagaactgaatgaaatgcaggcacaaatagctgaagagagccagattcgaattgaactgcagatgacattggacagtaaagacagtgacattgagcagctgcggtcacaactccaagccttgcatattggtctggatagttccagtataggcagtggaccaggggatgctgaggcagatgatgggtttccagaatcaagattagaaggatggctttcattgcctgtacgaaacaacactaagaaatttggatgggttaaaaagtatgtgattgtaagcagtaagaagattcttttctatgacagtgaacaagataaagaacaatccaatccttacatggttttagatatagacaagttatttcatgtccgaccagttacacagacagatgtgtatagagcagatgctaaagaaattccaaggatattccagattctgtatgccaatgaaggagaaagtaagaaggaacaagaatttccagtggagccagttggagaaaaatctaattatatttgccacaagggacatgagtttattcctactctttatcatttcccaaccaactgtgaggcttgtatgaagcccctgtggcacatgtttaagcctcctcctgctttggagtgccgccgttgccatattaagtgtcataaagatcatatggacaaaaaggaggagattatagcaccttgcaaagtatattatgatatttcaacggcaaagaatctgttattactagcaaattctacagaagagcagcagaagtgggttagtcggttggtgaaaaagatacctaaaaagcccccagctccagacccttttgcccgatcatctcctagaacttcaatgaagatacagcaaaaccagtctattagacggccaagtcgacagcttgccccaaacaaacctagctaactgccttctatgaaagcagtcattattcaaggtgatcgtattcttccagtgaaaacaagactgaaatatgatggcccaaaatttattaaaaagctatattttcctgagagactgatacatacactcatacatatatgtgttccccttttccctgtaatataaattacaaatctgggctcctttgaagcaacaggttgaaccaacaatgattggttgatagactaaggatatatgcaactcttccagacttttccataaagctctctcggcagtcgctcacactacaatgcacacaaggattgagaagagttaaaggctaaagaaaacatcttttctagcttcaacagagaggtttcaccagcacatttaccagaagaatctgggaatggattccactacagtgatattgactgcatctttaagaagtgaccattatactgtgtatatatatataaacacacacacatatatatatatatatatagtactctaatactgcaagaaggttttttaaacttcccactttattttttatacacattaatcagatatcattacttgctgcagttgcaactatgcacttgtataaagccataatgttggagtttatatcactcattcctgtgtacctgatggaagttgcatgttcatgtttaagcagttactgtaacaagaagtttaaagttaattatatcagtttcctaatgcttcatgataggcaactttacccattttgaatgccttaatttaatttttttcaaagtctcagccctgtctgtattaaaaaacaaaaaaagcgtttaccagctcttaggatgtaaactagctttgtggaagataaatcgtgcactatttttacacataaatagttatatcaatgtcagcctattttgattaacaaatgtttttaaagtattattggttatagaaacaataatggatggtgttggaactaatatatccttgatgtctgtctattattcattcaactctttttacagacctcagtattagtctgtgactacaaaatattttatttgctttaaatttgctggctaccctagatgtgtttttattcctggtaaagacatttgtgattacattttcacacttaagattcaaaatttttcccaaatataaagaaaactaagacagactgtagatgcattttaaatatttaaatatgatcctcagacatgcagctgtgtgtggcagtattttagtaccgggttaagaaaactggcaactgggaagaagtggcctcaaaggcacttaatttgatttttattttttaaatgctgtcaaagttacagtttacgcaggacattcttgccgtattctcatgatcccagataagtgtgtgttttatactgcaacaatatgcagcaatggtaagcgtaaagttttttttttgtttttgtttttttttatattatgaagtcttttaacagtctctctttatataaatacacagagtttggtatgatatttaaatacatcatctggccaggcatggtggcttacgcctgtaatcctagcactttgggaggccaagacgggcggatcacctgaggtgaggagttcaagaccagcctgcccaacatagtgaaactccgtctctaccaatatacaaaaattagccgggcatgatggtggtggcctgtaatcccagctacttgggaggctgagacaggagaatcgcttgaacccaggagacggtggttgcagtgagcgaagatcgagccactgcactccagcctgggcagctgaacaagactccgtctcaaaaaaaaaaaaaaaaaaaagtcatctaatatttcgatgaaggaaatagacatttttcattgattccctctgatgtcagttagagatatttaaaaagttagatccccataatagatactattgtggaaactgaagagtagctactggcctactgatagactgaaactggttttgttattcttaacgttctccagtctgcactctgctgtgctgtctgtgctcagactagacgtgcatgccgtttcctttgcaggtgtgttctgcagctctggttttgggggatagctcttttttaagtaagattaaaaaatgaaaaatatataaatttatatagaataaatatttccattcattagagttgttaaaaggagactgaattaatattttatataaagattttgttacattatgggaggttctatcctattctgaattggagagtatatatatatatatatatatatatatatttttaataaactttattaaggtgaaataatttcaagtttacatatgagtaactgaaatatttgagtaaaaaaggcaaaagtttaaatttggaatgctgtatatattagagaatatggggaatcatggtgtgaccaactgtacaaggaagattcatatgaaggtcttaggggaaaaagataattctgaagggtgaaaaaaaaatctctcccatggagattcttcacattatatggtttgacataagggtttataaggttgtttgtccaactaatgaaaatgcgcttaataaaaaattctgaccttgggtaagaattcgctttttaccgcattgccgctttcatgtacatacatgagtgcatgcacctatcaatgtgttttcttcccaacacttattaaatataaaacaacctgattttgtgctcgtttctcgtttttcttgaggccctgaagcttccaagataaatataagactaaaatttgcttgttccttcacacctgatttctcctagaaccataaatacctcctatggggaactaagaaatcatgaatactgggattttcttattggattttttacttttgttttgtggggataacgagacagaagtgaaaggaaaactggtgccggtattactgttgaaattaatgtacagtgaatgtttttaaagtattaattttaaaaaaccatgttctctagaaacaagttttaaaaatctatatgaaagttttaaaatgttccagctaactaatggataagcataccagtaaagccaaagtaaaggttagtgcctttaaaactaacctgtgttagagttacatgaatctggctctaaagtatctattttgcatccatttatatatagatcttaaacagaaatactctaggttgccacaccacagttttaagaagttatgctgctgctgttactctcttctaggattctggtggtaaagtagagaaactcggacactatattaaccttactgaaacatgctttaaatcgtgtctaaaatctgatttgagcaagtcactgccgagcttctgagtctgcattgacactgctactgactcacctctccttccctggaataaggcttcagcttccctatgctgtgaagacaccatttgtaagcactttgaacataagcactgtgtgacagcgctggatatcatgcttgggggggggcctctccctgactcccatccccataataatgagttttgtttggaattgtaataagtaatgaactgcatggtttagaaaattataaatatttgatcagctgtcctctctgaaaaaaattgcacccctttttcttttttaaaattttgttgcatcttcgtagtaatgtaattgtattttatgcctgcttttttataaaaaaataaaataaaataaatggagacataagcatttt

SEQ ID NO: 150204 - DNA, 2700 bp, Artificial Sequence
  derived and/or modified sequence
aagtgtgtgtatgtgtgttatgctaagcttgccactgaaatgctttttatcatagttaacagcttaaaagatcaacttgaagatttgaaaaaaagaaatcaaaactctcaaatatccactgagaaagtgaatcaactccagagacaactggatgaaaccaatgctttactgcgaacagagtctgatactgcagcccggttaaggaaaacccaggcagaaagttcaaaacagattcagcagctggaatctaacaatagagatctacaagataaaaactgcctgctggagactgccaagttaaaacttgaaaaggaatttatcaatcttcagtcagctctagaatctgaaaggagggatcgaacccatggatcagagataattaatgatttacaaggtagaatgtggcctagaagaagatttaaagaacggcaaaatcttactagcgaaagtagaactggagaagagacaacttcaggagagatttactgatttggaaaaggaaaaaagcaacatggaaatagatatgacataccaactaaaagttatacagcagagcctagaacaagaagaagctgaacataaggccacaaaggcacgactagcagataaaaataagatctatgagtccatcgaagaagccaaatcagaagccatgaaagaaatggagaagaagctcttggaggaaagaactttaaaacagaaagtggagaacctattgctagaagctgagaaaagatgttctctattagactgtgacctcaaacagtcacagcagaaaataaatgagctccttaaacagaaagatgtgctaaatgaggatgttagaaacctgacattaaaaatagagcaagaaactcagaagcgctgccttacacaaaatgacctgaagatgcaaacacaacaggttaacacactaaaaatgtcagaaaagcagttaaagcaagaaaataaccatctcatggaaatgaaaatgaacttggaaaaacaaaatgctgaacttcgaaaagaacgtcaggatgcagatgggcaaatgaaagagctccaggatcagctcgaagcagaacagtatttctcaaccctttataaaacacaagttagggagcttaaagaagaatgtgaagaaaagaccaaacttggtaaagaattgcagcagaagaaacaggaattacaggatgaacgggactctttggctgcccaactggagatcaccttgaccaaagcagattctgagcaactggctcgttcaattgctgaagaacaatattctgatttggaaaaagagaagatcatgaaagagctggagatcaaagagatgatggctagacacaaacaggaacttacggaaaaagatgctacaattgcttctcttgaggaaactaataggacactaactagtgatgttgccaatcttgcaaatgagaaagaagaattaaataacaaattgaaagatgttcaagagcaactgtcaagattgaaagatgaagaaataagcgcagcagctattaaagcacagtttgagaagcagctattaacagaaagaacactcaaaactcaagctgtgaataagttggctgagatcatgaatcgaaaagaacctgtcaagcgtggtaatgacacagatgtgcggagaaaagagaaggagaatagaaagctacatatggagcttaaatctgaacgtgagaaattgacccagcagatgatcaagtatcagaaagaactgaatgaaatgcaggcacaaatagctgaagagagccagattcgaattgaactgcagatgacattggacagtaaagacagtgacattgagcagctgcggtcacaactccaagccttgcatattggtctggatagttccagtataggcagtggaccaggggatgctgaggcagatgatgggtttccagaatcaagattagaaggatggctttcattgcctgtacgaaacaacactaagaaatttggatgggttaaaaagtatgtgattgtaagcagtaagaagattcttttctatgacagtgaacaagataaagaacaatccaatccttacatggttttagatatagacaagttatttcatgtccgaccagttacacagacagatgtgtatagagcagatgctaaagaaattccaaggatattccagattctgtatgccaatgaaggagaaagtaagaaggaacaagaatttccagtggagccagttggagaaaaatctaattatatttgccacaagggacatgagtttattcctactctttatcatttcccaaccaactgtgaggcttgtatgaagcccctgtggcacatgtttaagcctcctcctgctttggagtgccgccgttgccatattaagtgtcataaagatcatatggacaaaaaggaggagattatagcaccttgcaaagtatattatgatatttcaacggcaaagaatctgttattactagcaaattctacagaagagcagcagaagtgggttagtcggttggtgaaaaagatacctaaaaagcccccagctccagacccttttgcccgatcatctcctagaacttcaatgaagatacagcaaaaccagtctattagacggccaagtcgacagcttgccccaaacaaacctagctaactgccttctatgaaagcagtcattattcaaggtgatcgtattcttccagtgaaaacaagactgaaatatgatggccc

SEQ ID NO: 150205 - DNA, 4017 bp, Artificial Sequence
  derived and/or modified sequence
atgggccatttttgtctatcttaatctatccagctagaacttaatatccctatatatttttggtctttttgatagagtctgttatattctgcaacccttaatcaatgtttaataggtggagttttttattgtacccaaagctccctcttgtggtatttggtataatatagtgtgaaatgattaacagtgcaaattatctttaatgaaaatgaagtatgaaataatttcctaatagaatgctaaacttatgtctgctatacataagagaagatgtttttgtgttgtacttccatgaatgtattgcgattttcattaaaccaaaaacttttggcactagggtacagacaaataaatcataccacatatttttagggaagataagggtggttaaggagagcaaggtgtagagaagaagaatatggggaacgggatagaatatggtacctacagaataattgtataagcatacaggcatggtacattgtgatacagcagttggaacaccggattatatatcacctgaggttctgaaatcacaagggggtgatggtttctatgggcgagaatgtgattggtggtctgtaggtgttttcctttatgagatgctagtgggggatactccattttatgcggattcacttgtaggaacatatagcaaaattatggatcataagaattcactgtgtttccctgaagatgcagaaatttccaaacatgcaaagaatctcatctgtgctttcttaacagatagggaggtacgacttgggagaaatggggtggaagaaatcagacagcatcctttctttaagaatgatcagtggcattgggataacataagagaaacggcagctcctgtagtacctgaactcagcagtgacatagacagcagcaatttcgatgacattgaagatgacaaaggagatgtagaaaccttcccaattcctaaagcttttgttggaaatcagctgcctttcatcggatttacctactatagagaaaatttattattaagtgactctccatcttgtagagaaactgattccatacaatcaaggaaaaatgaagaaagtcaagagattcagaaaaaactgtatacattagaagaacatcttagcaatgagatgcaagccaaagaggaactggaacagaagtgcaaatctgttaatactcgcctagaaaaaacagcaaaggagctagaagaggagattaccttacggaaaagtgtggaatcagcattaagacagttagaaagagaaaaggcgcttcttcagcacaaaaatgcagaatatcagaggaaagctgatcatgaagcagacaaaaaacgaaatttggaaaatgatgttaacagcttaaaagatcaacttgaagatttgaaaaaaagaaatcaaaactctcaaatatccactgagaaagtgaatcaactccagagacaactggatgaaaccaatgctttactgcgaacagagtctgatactgcagcccggttaaggaaaacccaggcagaaagttcaaaacagattcagcagctggaatctaacaatagagatctacaagataaaaactgcctgctggagactgccaagttaaaacttgaaaaggaatttatcaatcttcagtcagctctagaatctgaaaggagggatcgaacccatggatcagagataattaatgatttacaaggtagaatatgtggcctagaagaagatttaaagaacggcaaaatcttactagcgaaagtagaactggagaagagacaacttcaggagagatttactgatttggaaaaggaaaaaagcaacatggaaatagatatgacataccaactaaaagttatacagcagagcctagaacaagaagaagctgaacataaggccacaaaggcacgactagcagataaaaataagatctatgagtccatcgaagaagccaaatcagaagccatgaaagaaatggagaagaagctcttggaggaaagaactttaaaacagaaagtggagaacctattgctagaagctgagaaaagatgttctctattagactgtgacctcaaacagtcacagcagaaaataaatgagctccttaaacagaaagatgtgctaaatgaggatgttagaaacctgacattaaaaatagagcaagaaactcagaagcgctgccttacacaaaatgacctgaagatgcaaacacaacaggttaacacactaaaaatgtcagaaaagcagttaaagcaagaaaataaccatctcatggaaatgaaaatgaacttggaaaaacaaaatgctgaacttcgaaaagaacgtcaggatgcagatgggcaaatgaaagagctccaggatcagctcgaagcagaacagtatttctcaaccctttataaaacacaagttagggagcttaaagaagaatgtgaagaaaagaccaaacttggtaaagaattgcagcagaagaaacaggaattacaggatgaacgggactctttggctgcccaactggagatcaccttgaccaaagcagattctgagcaactggctcgttcaattgctgaagaacaatattctgatttggaaaaagagaagatcatgaaagagctggagatcaaagagatgatggctagacacaaacaggaacttacggaaaaagatgctacaattgcttctcttgaggaaactaataggacactaactagtgatgttgccaatcttgcaaatgagaaagaagaattaaataacaaattgaaagatgttcaagagcaactgtcaagattgaaagatgaagaaataagcgcagcagctattaaagcacagtttgagaagcagctattaacagaaagaacactcaaaactcaagctgtgaataagttggctgagatcatgaatcgaaaagaacctgtcaagcgtggtaatgacacagatgtgcggagaaaagagaaggagaatagaaagctacatatggagcttaaatctgaacgtgagaaattgacccagcagatgatcaagtatcagaaagaactgaatgaaatgcaggcacaaatagctgaagagagccagattcgaattgaactgcagatgacattggacagtaaagacagtgacattgagcagctgcggtcacaactccaagccttgcatattggtctggatagttccagtataggcagtggaccaggggatgctgaggcagatgatgggtttccagaatcaagattagaaggatggctttcattgcctgtacgaaacaacactaagaaatttggatgggttaaaaagtatgtgattgtaagcagtaagaagattcttttctatgacagtgaacaagataaagaacaatccaatccttacatggttttagatatagacaagttatttcatgtccgaccagttacacagacagatgtgtatagagcagatgctaaagaaattccaaggatattccagattctgtatgccaatgaaggagaaagtaagaaggaacaagaatttccagtggagccagttggagaaaaatctaattatatttgccacaagggacatgagtttattcctactctttatcatttcccaaccaactgtgaggcttgtatgaagcccctgtggcacatgtttaagcctcctcctgctttggagtgccgccgttgccatattaagtgtcataaagatcatatggacaaaaaggaggagattatagcaccttgcaaagtatattatgatatttcaacggcaaagaatctgttattactagcaaattctacagaagagcagcagaagtgggttagtcggttggtgaaaaagatacctaaaaagcccccagctccagacccttttgcccgatcatctcctagaacttcaatgaagatacagcaaaaccagtctattagacggccaagtcgacagcttgccccaaacaaacctagctaactgccttctatgaaagcagtcattattcaaggtgatcgtattcttccagtgaaaacaagactgaaatatgatggcccaaaatttattaaaaagctatattttcctg

SEQ ID NO: 150206 - DNA, 4167 bp, Artificial Sequence
  derived and/or modified sequence
atgagcagacccccccccaccggcaagatgcccggcgcccccgagaccgcccccggcgacggcgccggcgccagcagacagagaaagctggaggccctgatcagagaccccagaagccccatcaacgtggagagcctgctggacggcctgaacagcctggtgctggacctggacttccccgccctgagaaagaacaagaacatcgacaacttcctgaacagatacgagaagatcgtgaagaagatcagaggcctgcagatgaaggccgaggactacgacgtggtgaaggtgatcggcagaggcgccttcggcgaggtgcagctggtgagacacaaggccagccagaaggtgtacgccatgaagctgctgagcaagttcgagatgatcaagagaagcgacagcgccttcttctgggaggagagagacatcatggccttcgccaacagcccctgggtggtgcagctgttctacgccttccaggacgacagatacctgtacatggtgatggagtacatgcccggcggcgacctggtgaacctgatgagcaactacgacgtgcccgagaagtgggccaagttctacaccgccgaggtggtgctggccctggacgccatccacagcatgggcctgatccacagagacgtgaagcccgacaacatgctgctggacaagcacggccacctgaagctggccgacttcggcacctgcatgaagatggacgagaccggcatggtgcactgcgacaccgccgtgggcacccccgactacatcagccccgaggtgctgaagagccagggcggcgacggcttctacggcagagagtgcgactggtggagcgtgggcgtgttcctgtacgagatgctggtgggcgacacccccttctacgccgacagcctggtgggcacctacagcaagatcatggaccacaagaacagcctgtgcttccccgaggacgccgagatcagcaagcacgccaagaacctgatctgcgccttcctgaccgacagagaggtgagactgggcagaaacggcgtggaggagatcagacagcaccccttcttcaagaacgaccagtggcactgggacaacatcagagagaccgccgcccccgtggtgcccgagctgagcagcgacatcgacagcagcaacttcgacgacatcgaggacgacaagggcgacgtggagaccttccccatccccaaggccttcgtgggcaaccagctgcccttcatcggcttcacctactacagagagaacctgctgctgagcgacagccccagctgcagagagaccgacagcatccagagcagaaagaacgaggagagccaggagatccagaagaagctgtacaccctggaggagcacctgagcaacgagatgcaggccaaggaggagctggagcagaagtgcaagagcgtgaacaccagactggagaagaccgccaaggagctggaggaggagatcaccctgagaaagagcgtggagagcgccctgagacagctggagagagagaaggccctgctgcagcacaagaacgccgagtaccagagaaaggccgaccacgaggccgacaagaagagaaacctggagaacgacgtgaacagcctgaaggaccagctggaggacctgaagaagagaaaccagaacagccagatcagcaccgagaaggtgaaccagctgcagagacagctggacgagaccaacgccctgctgagaaccgagagcgacaccgccgccagactgagaaagacccaggccgagagcagcaagcagatccagcagctggagagcaacaacagagacctgcaggacaagaactgcctgctggagaccgccaagctgaagctggagaaggagttcatcaacctgcagagcgccctggagagcgagagaagagacagaacccacggcagcgagatcatcaacgacctgcagggcagaatctgcggcctggaggaggacctgaagaacggcaagatcctgctggccaaggtggagctggagaagagacagctgcaggagagattcaccgacctggagaaggagaagagcaacatggagatcgacatgacctaccagctgaaggtgatccagcagagcctggagcaggaggaggccgagcacaaggccaccaaggccagactggccgacaagaacaagatctacgagagcatcgaggaggccaagagcgaggccatgaaggagatggagaagaagctgctggaggagagaaccctgaagcagaaggtggagaacctgctgctggaggccgagaagagatgcagcctgctggactgcgacctgaagcagagccagcagaagatcaacgagctgctgaagcagaaggacgtgctgaacgaggacgtgagaaacctgaccctgaagatcgagcaggagacccagaagagatgcctgacccagaacgacctgaagatgcagacccagcaggtgaacaccctgaagatgagcgagaagcagctgaagcaggagaacaaccacctgatggagatgaagatgaacctggagaagcagaacgccgagctgagaaaggagagacaggacgccgacggccagatgaaggagctgcaggaccagctggaggccgagcagtacttcagcaccctgtacaagacccaggtgagagagctgaaggaggagtgcgaggagaagaccaagctgggcaaggagctgcagcagaagaagcaggagctgcaggacgagagagacagcctggccgcccagctggagatcaccctgaccaaggccgacagcgagcagctggccagaagcatcgccgaggagcagtacagcgacctggagaaggagaagatcatgaaggagctggagatcaaggagatgatggccagacacaagcaggagctgaccgagaaggacgccaccatcgccagcctggaggagaccaacagaaccctgaccagcgacgtggccaacctggccaacgagaaggaggagctgaacaacaagctgaaggacgtgcaggagcagctgagcagactgaaggacgaggagatcagcgccgccgccatcaaggcccagttcgagaagcagctgctgaccgagagaaccctgaagacccaggccgtgaacaagctggccgagatcatgaacagaaaggagcccgtgaagagaggcaacgacaccgacgtgagaagaaaggagaaggagaacagaaagctgcacatggagctgaagagcgagagagagaagctgacccagcagatgatcaagtaccagaaggagctgaacgagatgcaggcccagatcgccgaggagagccagatcagaatcgagctgcagatgaccctggacagcaaggacagcgacatcgagcagctgagaagccagctgcaggccctgcacatcggcctggacagcagcagcatcggcagcggccccggcgacgccgaggccgacgacggcttccccgagagcagactggagggctggctgagcctgcccgtgagaaacaacaccaagaagttcggctgggtgaagaagtacgtgatcgtgagcagcaagaagatcctgttctacgacagcgagcaggacaaggagcagagcaacccctacatggtgctggacatcgacaagctgttccacgtgagacccgtgacccagaccgacgtgtacagagccgacgccaaggagatccccagaatcttccagatcctgtacgccaacgagggcgagagcaagaaggagcaggagttccccgtggagcccgtgggcgagaagagcaactacatctgccacaagggccacgagttcatccccaccctgtaccacttccccaccaactgcgaggcctgcatgaagcccctgtggcacatgttcaagcccccccccgccctggagtgcagaagatgccacatcaagtgccacaaggaccacatggacaagaaggaggagatcatcgccccctgcaaggtgtactacgacatcagcaccgccaagaacctgctgctgctggccaacagcaccgaggagcagcagaagtgggtgagcagactggtgaagaagatccccaagaagccccccgcccccgaccccttcgccagaagcagccccagaaccagcatgaagatccagcagaaccagagcatcagaagacccagcagacagctggcccccaacaagcccagctag

SEQ ID NO: 150207 - DNA, 2241 bp, Artificial Sequence
  derived and/or modified sequence
atgatctacaaggtggagtgcggcctggaggaggacctgaagaacggcaagatcctgctggccaaggtggagctggagaagagacagctgcaggagagattcaccgacctggagaaggagaagagcaacatggagatcgacatgacctaccagctgaaggtgatccagcagagcctggagcaggaggaggccgagcacaaggccaccaaggccagactggccgacaagaacaagatctacgagagcatcgaggaggccaagagcgaggccatgaaggagatggagaagaagctgctggaggagagaaccctgaagcagaaggtggagaacctgctgctggaggccgagaagagatgcagcctgctggactgcgacctgaagcagagccagcagaagatcaacgagctgctgaagcagaaggacgtgctgaacgaggacgtgagaaacctgaccctgaagatcgagcaggagacccagaagagatgcctgacccagaacgacctgaagatgcagacccagcaggtgaacaccctgaagatgagcgagaagcagctgaagcaggagaacaaccacctgatggagatgaagatgaacctggagaagcagaacgccgagctgagaaaggagagacaggacgccgacggccagatgaaggagctgcaggaccagctggaggccgagcagtacttcagcaccctgtacaagacccaggtgagagagctgaaggaggagtgcgaggagaagaccaagctgggcaaggagctgcagcagaagaagcaggagctgcaggacgagagagacagcctggccgcccagctggagatcaccctgaccaaggccgacagcgagcagctggccagaagcatcgccgaggagcagtacagcgacctggagaaggagaagatcatgaaggagctggagatcaaggagatgatggccagacacaagcaggagctgaccgagaaggacgccaccatcgccagcctggaggagaccaacagaaccctgaccagcgacgtggccaacctggccaacgagaaggaggagctgaacaacaagctgaaggacgtgcaggagcagctgagcagactgaaggacgaggagatcagcgccgccgccatcaaggcccagttcgagaagcagctgctgaccgagagaaccctgaagacccaggccgtgaacaagctggccgagatcatgaacagaaaggagcccgtgaagagaggcaacgacaccgacgtgagaagaaaggagaaggagaacagaaagctgcacatggagctgaagagcgagagagagaagctgacccagcagatgatcaagtaccagaaggagctgaacgagatgcaggcccagatcgccgaggagagccagatcagaatcgagctgcagatgaccctggacagcaaggacagcgacatcgagcagctgagaagccagctgcaggccctgcacatcggcctggacagcagcagcatcggcagcggccccggcgacgccgaggccgacgacggcttccccgagagcagactggagggctggctgagcctgcccgtgagaaacaacaccaagaagttcggctgggtgaagaagtacgtgatcgtgagcagcaagaagatcctgttctacgacagcgagcaggacaaggagcagagcaacccctacatggtgctggacatcgacaagctgttccacgtgagacccgtgacccagaccgacgtgtacagagccgacgccaaggagatccccagaatcttccagatcctgtacgccaacgagggcgagagcaagaaggagcaggagttccccgtggagcccgtgggcgagaagagcaactacatctgccacaagggccacgagttcatccccaccctgtaccacttccccaccaactgcgaggcctgcatgaagcccctgtggcacatgttcaagcccccccccgccctggagtgcagaagatgccacatcaagtgccacaaggaccacatggacaagaaggaggagatcatcgccccctgcaaggtgtactacgacatcagcaccgccaagaacctgctgctgctggccaacagcaccgaggagcagcagaagtgggtgagcagactggtgaagaagatccccaagaagccccccgcccccgaccccttcgccagaagcagccccagaaccagcatgaagatccagcagaaccagagcatcagaagacccagcagacagctggcccccaacaagcccagctag

SEQ ID NO: 150208 - DNA, 3438 bp, Artificial Sequence
  derived and/or modified sequence
atggtgcactgcgacaccgccgtgggcacccccgactacatcagccccgaggtgctgaagagccagggcggcgacggcttctacggcagagagtgcgactggtggagcgtgggcgtgttcctgtacgagatgctggtgggcgacacccccttctacgccgacagcctggtgggcacctacagcaagatcatggaccacaagaacagcctgtgcttccccgaggacgccgagatcagcaagcacgccaagaacctgatctgcgccttcctgaccgacagagaggtgagactgggcagaaacggcgtggaggagatcagacagcaccccttcttcaagaacgaccagtggcactgggacaacatcagagagaccgccgcccccgtggtgcccgagctgagcagcgacatcgacagcagcaacttcgacgacatcgaggacgacaagggcgacgtggagaccttccccatccccaaggccttcgtgggcaaccagctgcccttcatcggcttcacctactacagagagaacctgctgctgagcgacagccccagctgcagagagaccgacagcatccagagcagaaagaacgaggagagccaggagatccagaagaagctgtacaccctggaggagcacctgagcaacgagatgcaggccaaggaggagctggagcagaagtgcaagagcgtgaacaccagactggagaagaccgccaaggagctggaggaggagatcaccctgagaaagagcgtggagagcgccctgagacagctggagagagagaaggccctgctgcagcacaagaacgccgagtaccagagaaaggccgaccacgaggccgacaagaagagaaacctggagaacgacgtgaacagcctgaaggaccagctggaggacctgaagaagagaaaccagaacagccagatcagcaccgagaaggtgaaccagctgcagagacagctggacgagaccaacgccctgctgagaaccgagagcgacaccgccgccagactgagaaagacccaggccgagagcagcaagcagatccagcagctggagagcaacaacagagacctgcaggacaagaactgcctgctggagaccgccaagctgaagctggagaaggagttcatcaacctgcagagcgccctggagagcgagagaagagacagaacccacggcagcgagatcatcaacgacctgcagggcagaatctgcggcctggaggaggacctgaagaacggcaagatcctgctggccaaggtggagctggagaagagacagctgcaggagagattcaccgacctggagaaggagaagagcaacatggagatcgacatgacctaccagctgaaggtgatccagcagagcctggagcaggaggaggccgagcacaaggccaccaaggccagactggccgacaagaacaagatctacgagagcatcgaggaggccaagagcgaggccatgaaggagatggagaagaagctgctggaggagagaaccctgaagcagaaggtggagaacctgctgctggaggccgagaagagatgcagcctgctggactgcgacctgaagcagagccagcagaagatcaacgagctgctgaagcagaaggacgtgctgaacgaggacgtgagaaacctgaccctgaagatcgagcaggagacccagaagagatgcctgacccagaacgacctgaagatgcagacccagcaggtgaacaccctgaagatgagcgagaagcagctgaagcaggagaacaaccacctgatggagatgaagatgaacctggagaagcagaacgccgagctgagaaaggagagacaggacgccgacggccagatgaaggagctgcaggaccagctggaggccgagcagtacttcagcaccctgtacaagacccaggtgagagagctgaaggaggagtgcgaggagaagaccaagctgggcaaggagctgcagcagaagaagcaggagctgcaggacgagagagacagcctggccgcccagctggagatcaccctgaccaaggccgacagcgagcagctggccagaagcatcgccgaggagcagtacagcgacctggagaaggagaagatcatgaaggagctggagatcaaggagatgatggccagacacaagcaggagctgaccgagaaggacgccaccatcgccagcctggaggagaccaacagaaccctgaccagcgacgtggccaacctggccaacgagaaggaggagctgaacaacaagctgaaggacgtgcaggagcagctgagcagactgaaggacgaggagatcagcgccgccgccatcaaggcccagttcgagaagcagctgctgaccgagagaaccctgaagacccaggccgtgaacaagctggccgagatcatgaacagaaaggagcccgtgaagagaggcaacgacaccgacgtgagaagaaaggagaaggagaacagaaagctgcacatggagctgaagagcgagagagagaagctgacccagcagatgatcaagtaccagaaggagctgaacgagatgcaggcccagatcgccgaggagagccagatcagaatcgagctgcagatgaccctggacagcaaggacagcgacatcgagcagctgagaagccagctgcaggccctgcacatcggcctggacagcagcagcatcggcagcggccccggcgacgccgaggccgacgacggcttccccgagagcagactggagggctggctgagcctgcccgtgagaaacaacaccaagaagttcggctgggtgaagaagtacgtgatcgtgagcagcaagaagatcctgttctacgacagcgagcaggacaaggagcagagcaacccctacatggtgctggacatcgacaagctgttccacgtgagacccgtgacccagaccgacgtgtacagagccgacgccaaggagatccccagaatcttccagatcctgtacgccaacgagggcgagagcaagaaggagcaggagttccccgtggagcccgtgggcgagaagagcaactacatctgccacaagggccacgagttcatccccaccctgtaccacttccccaccaactgcgaggcctgcatgaagcccctgtggcacatgttcaagcccccccccgccctggagtgcagaagatgccacatcaagtgccacaaggaccacatggacaagaaggaggagatcatcgccccctgcaaggtgtactacgacatcagcaccgccaagaacctgctgctgctggccaacagcaccgaggagcagcagaagtgggtgagcagactggtgaagaagatccccaagaagccccccgcccccgaccccttcgccagaagcagccccagaaccagcatgaagatccagcagaaccagagcatcagaagacccagcagacagctggcccccaacaagcccagctag

SEQ ID NO: 150209 - protein, 504 aa, Artificial Sequence
  derived and/or modified sequence
MKAAYTAYRCLTKDLEGCAMNPELTMESLGTLHGPAGGGSGGGGGGGGGGGGGGPGHEQELLASPSPHHAGRGAAGSLRGPPPPPTAHQELGTAAAAAAAASRSAMVTSMASILDGGDYRPELSIPLHHAMSMSCDSSPPGMGMSNTYTTLTPLQPLPPISTVSDKFHHPHPHHHPHHHHHHHHQRLSGNVSGSFTLMRDERGLPAMNNLYSPYKEMPGMSQSLSPLAATPLGNGLGGLHNAQQSLPNYGPPGHDKMLSPNFDAHHTAMLTRGEQHLSRGLGTPPAAMMSHLNGLHHPGHTQSHGPVLAPSRERPPSSSSGSQVATSGQLEEINTKEVAQRITAELKRYSIPQAIFAQRVLCRSQGTLSDLLRNPKPWSKLKSGRETFRRMWKWLQEPEFQRMSALRLAACKRKEQEPNKDRNNSQKKSRLVFTDLQRRTLFAIFKENKRPSKEMQITISQQLGLELTTVSNFFMNARRRSLEKWQDDLSTGGSSSTSSTCTKA

SEQ ID NO: 150210 - protein, 485 aa, Artificial Sequence [sequence omitted]

SEQ ID NO: 150211 - DNA, 16142 bp, Artificial Sequence
  derived and/or modified sequence
gcccccgccgcccccgggccctgatggactgaatgaaggctgcctacaccgcctatcgatgcctcaccaaagacctagaaggctgcgccatgaacccggagctgacaatggaaagtctgggcactttgcacgggccggccggcggcggcagtggcgggggcggcggcgggggcggcgggggcggcggcgggggcccgggccatgagcaggagctgctggccagccccagcccccaccacgcgggccgcggcgccgctggctcgctgcggggccctccgccgcctccaaccgcgcaccaggagctgggcacggcggcagcggcggcagcggcggcgtcgcgctcggccatggtcaccagcatggcctcgatcctggacggcggcgactaccggcccgagctctccatcccgctgcaccacgccatgagcatgtcctgcgactcgtctccgcctggcatgggcatgagcaacacctacaccacgctgacaccgctccagccgctgccacccatctccaccgtgtctgacaagttccaccaccctcacccgcaccaccatccgcaccaccaccaccaccaccaccaccagcgcctgtccggcaacgtcagcggcagcttcaccctcatgcgcgacgagcgcgggctcccggccatgaacaacctctacagtccctacaaggagatgcccggcatgagccagagcctgtccccgctggccgccacgccgctgggcaacgggctaggcggcctccacaacgcgcagcagagtctgcccaactacggtccgccgggccacgacaaaatgctcagccccaacttcgacgcgcaccacactgccatgctgacccgcggtgagcaacacctgtcccgcggcctgggcaccccacctgcggccatgatgtcgcacctgaacggcctgcaccacccgggccacactcagtctcacgggccggtgctggcacccagtcgcgagcggccaccctcgtcctcatcgggctcgcaggtggccacgtcgggccagctggaagaaatcaacaccaaagaggtggcccagcgcatcacagcggagctgaagcgctacagtatcccccaggcgatctttgcgcagagggtgctgtgccggtctcaggggactctctccgacctgctccggaatccaaaaccgtggagtaaactcaaatctggcagggagaccttccgcaggatgtggaagtggcttcaggagcccgagttccagcgcatgtccgccttacgcctggcagcgtgcaaacgcaaagagcaagaaccaaacaaagacaggaacaattcccagaagaagtcccgcctggtgttcactgacctccaacgccgaacactcttcgccatcttcaaggagaacaaacgcccgtcaaaggagatgcagatcaccatttcccagcagctgggcctggagctcacaaccgtcagcaacttcttcatgaacgcccggcgccgcagcctggagaagtggcaagacgatctgagcacagggggctcctcgtccacctccagcacgtgtaccaaagcatgatggaaggactctcacttgggcacaagtcacctccaaatgaggacaacagataccaaaagaaaacaaaggaaaaagacaccggattcctagctggggcccttcactggtgatttgaaagcacaattctcttgcaaagaaacttatattctagctgtaatcataggccaggtgttcttcttttgtttttaatggctatggagtccaagtgcaagctgaaaaattaatctcttagaaccagacactgttctctgagcatgctaagcatcccagaaacccaaatggggccttcctggagcgagttaattccagtatggtgtcaaccaagctcgggattgcttaaaatatcatccatcccacttcaggtcctgtcagcttcttgcagtcagagttcctatgagtaacaataggagtttggcctatgtaaggactctgagtttaggcttccaagatacaacaataagagaagaatctagcaacgagaatgacctcatttgctttccacatgcttagcctcattataccatgttatgtccaagttcacagccacaacatcagaatggtaattactgagcacaagttttaaatatggacgttaaaaaaaaaaatccaaggacctgtttttccaacccagacatcttttcattgaatgatttagaaagctttaagttgatccagcttacaattttttttttctttacctcctggaaatctcatatggtcttggatccgtcaaaaaaaccagtcagttcacttgcgctcaaagtatcaagcacaacaaagataaacagaagtgaggaaggttctgggttcactacatctggattttcaagacacctattgtgaagtcattagggaattgatgagaatatggcttcaagcacattttgcagtttgctacaaattctgttgtacataatgcagacgcacactcaggaggccaatttaactgttaacagtgcatggagcgaatgcagcattttaaaagatctaggtttttttaggtcattaatgtgtccttggttgatcagtcatctggtccctcctactgtgtgttatgaccaccacgtaatccattctcgctctttctgatttggggtttttcctcatccatcccattagtagggatgttttctgtgttttctagcaagaaaaaaaaatcaatcaatcaaacctgcatacatgttactcatgactgtcatctagtcctaaatctcttctgttgttgaatcatccttgcaaaacagctgaatacatctggagaaaacacagcacaccaaagaagcagaatactgcaaaccaaagacatttatgacttgtcattttctagcctaaaaatactgtgattacttttagaaatcagaaaacctctgcaactccgaatggcattcagctcttgcatttggcgcatcatcgggctgagcggaccagctacaccaaggacattagccaagccacccagaggggtggctttgccacaccagttgtcaccttcccatagcaagtggaagagcgcccacagaactctgggagattgcaaaggtcacaatgtgcatatttaccagtgaatggccccgggtggggccacgtgggggtgttcaaagcaagccaaacgctgcaatcattctttacagacacttgagactgacttttttatgaattacttagtcgaaaccaaagaaactttttctgcacctacttctgcaacaaacaaaactgtcccattaaaatgaataaataaatccgtaaatcaatggaaatcaccaccaataagaaggaagcacgccagaaaataaacgaaaacaaaaacagggagacacactgtgttcaaacagacctcttgggacattttttggaagcagattttaaagaaagggttgagacaaagatagaaataaggaagagcctcagtggctgctgcttcatttgacaactcacacggtaatcttaaagctgaagattgtctttaatttgtgcctatgcagtttttcaaaagaacacggaacagagcaacagaaacctcaacagctacaataccaaagatgaggatttctcacaccttttgtttcagttcattatctcctcttgcctggctaaaatactaatagcgccattgaactgtataaaggtaatcaattatgtttctctgagcaacaaaaggaaagggccatttatttgattttattgtttcatttcaattttgtcttatggttttttgccccaacatggaatctctcaaaagtttccatggactccaagtttaagatgttgggatattgaacagttctctctgctcagcagagggtagggaataacattatcacttgaatgttctttgcttaacccttagacttggttccttctatgttcagagtctcatcatcaggggaaggaaagggagtgagggtcagggataggggtcttggtgatgcatcctctcccgagccacagaaccaaagagtttatagaggaatttacagcctcgttttcatgtgattgctacatcctaacagggcttcatttgggggtggggggaaacatgtaaaaataattgccagtttctacttttctattagctttttaaaaatcagctgtaaagttgcatttctaaagaaagatatatataatatataaaatacatatatagatcaacttgacattggtgataaccaaaattattgctgtccaaattcatgtcttgttttggtccagtgcttcatttgctaagtattcggttcagaatttttctcatttctcatgccattccagagttaatttgccactgtggatgatttgaagtattcagatctctatggaagtttctgggacaggtttaaagtcaagatcaagcattttagcatttaacctgttgataaatggatccatggtgtacatgagttttatttgtattcggagtcatctctattctatccctcagcctcgattaaggtggtgagtgaagtgcatccaacagactcggcccagaactgggtcctgacagtggggtgctcatcttctgtaactgttgggaaggctcggtggtccattttcaccagttaaagaatatgaggccagcccagaaatctgttctccaggagctgccctgtcccatctgggtgtgccagaccccctcagtgagcaggtccaccaaagggacttctcacaggggaagcccaactcctgttgcaatgggttgatagatttcctcagggtggtaattaccaattcgtattttgacaagcctatgtgcaaccacagctggcactggggtgggcagtggtgttgggtgggatgggggagagtgtctcaatcctgaagagaaaatataaagcaggttttggggagacttctggagtcctgcccctagagagccccattgttgttctttgtgccccctcctcattccccctatgtgggtctccctatgcaggagctgtgagagaatgtgactctccacaatttttataattcatccttcctaggagattgttcattggctcttcccttgtgtccctttgtcccttgctcatactccatgtttcctttgtcaaaggactaagaaaagagcatatttcagcagaggagtgttcccatgtgggttgatttcaacttgggtatttctaaaagagtccttgtgacatgtgtccagtggaaatggttgctcttttccagactggattgaggaatggagcctgtttgatttggttagtgattctttgacatactaatctcagcgtttgggtctccagcatcctctgaagatgtctagactagtagaggctgcctttgtgacctgacattacaacattggtcaaaccagtcctctgataatcagaagaacatgtcataattgtttaaaaaaaaaaaaaaggcaagaatttctctccaaggagctttaataaatgtctcattccagataatgtcataccagagaaaagtgcttgcttttagaaaattatttacatacatatataaatatatatgtgtatctatacagttatgtatcaaaattttaagccctgcagaatttcaatttgttagaaatctaacagaaaaaaatttctatattgaaaggtaatagaatttaacccagtgagtttactcaaggatttttaaatttaagttaataatttcagagaaaataaccatttgggtgtggttatagtttagtatccattacctcaatccaaggaaaattccaggcattcctcaaccatcaggaaaaggtacagtgtgaaggaacagttctcagccaaatttcacattcttgaggcaacagaaatcaaaacactcagagccattgagtggaaaaacaatttactttattcctttacacaaataggcttgcattgtttttgttttaatgtgattttggtactagggatataattatttcattccaggaaataataaaaaaaaacagacagagccaatacatttctttttttaaaggaaacagcaacaacaataaaaactcagcaccaatatttaaaagcttttccaaaatgtaaaagaagtgtttagcttgcaccatgcataaaggtgcaggctagttgaaccaggaagcatggcacttcctctggagaaatccagaaagagttgcttctaagctcccttttccccctgcaggctcttggcaattgtaggctttagcaaatccagaataattttcaattcaagctaaaataaaatcaacatttggaatgtaaatctgatacacacacacttttctaagtcaaacaacatatttcaaaaccaaaaataaataccttttagataatcagttattttctttgtctatactgggcacccacctactagtgccagtaaattcaagttgaacagatttttaaaatcactattatctgggtatgggggaaacttccccacttttgaaaatgttggtagaattataggaatgtctgtttgattatcattaccaaagtgtcatgacagtatgcctttgtagtgaactcggattttcaggagtttgaatagttggatattttaaaatctaagaagaaaaggcctgtttccaatgttgttgaagaataatgaactctattaaaaagtggagaaaaagataatacatgtggtcaaggttgaccacaaggcccaggcacaactaccttggcgataatcttctagattcgtaacaggttagagctgactttttgtttttgttgttgctgatgctgtgtgattcagacttctcagcctaaccaggaagagtaagtggaaatggtagatgaagaaggggtagagctggtgtatctataactttctgatatttgtctgccaaacttgatatattagtaatttttttatctttagctaagatcaagtcacccctgaaacaacaggagattctagttttaaaataaggccacaaaaatccttacggaatgaagaatggcaccccagttggttgtataagtctcataagataatgatgttgattttaaatatggatgtctcaatgcctgttttctatcaatgatttgtttgtttccaaggtcggggagggaaagaggggagggtttatctgttttagaaagtctcagaatacttataaaatacagaagtagttattaaaatatataggacctcacataggtagatacagaacttaccattgaggctgatgggctgttgtgtgaatcacacaggaccttaaatgaggctcattattctcacacaccaaaatgactctgacagcctgaagcagttattgctagagcccaagctttccttggaggttttggagttaggttgattggaagtaaccagctaataccttttctagtggagaaaaagacattgctaccagcttgttcatcccatagaagtcttccactctgctccatttttagcagcaagcatttcatgtagcataaaccttggcagataagtgtgcctaaggtttatacagtctgtccgcttggatgtatacaaatttagatacatattttaacatgtgttctcatagatgactttataacaacacacattacctataggtgtctagactgtgtacatacaagtgtgtacagacaagcttcatacgtatatactgtaatccgttacaacaaataaattttaaatcatcgtttaacatgtatgtggtacttctacagtgtacattgttttcattatttattgtaacattgaaaaccacagtgcagggaaaacaaaagtatcccagcatcttcatcctgtacacttggaattaatttcatttgggcatatccaagataaactcaactttcaagaaatcttgtatattatttaatcatctgtgttaggatgacacctatgattgatgacttcggttgaatagctttattctggatttttcataactaaagctaaatccaaagacctgaaaaaggacaaaaagaaaaaaaaaaaaagaaaaaacaaagaaaaagaagaaaaaataataaagtcaagcgcaaactgatggggagacagtgggctctggtttccaggattgagacaatggtactgcggtcttggggagactgcgttagctagtggggagtggtgatttttttcatgcttgtcacatctaaatggtctttaacatgagaaagttttagaggttataatttcctgctttgtttttatttagactatcaaatgaagttatacatgttgtcagtcaaaaaatgaagacaccctctgccccaccccacagaatgctttttatcttgtctctttgggttatgacccaacaagctaagtaccattaatgtaattaacttatttaaattagttcctagtacataaatgtataggatttgggtaattatttaatcatccttccttagtttgattctactccttgtacttatttatcaaaacctagaccaatggtgcatcagagatgcaaaattctacttggaatactcttgaagtttagtttgctttataaagcagtgaaattctgttacagacagggaagaaatacaggttacaaaaagagaatttgggatattcttccctcttaaattaacttttaaaatagtctaagtaacaatttttaaattatttaacttaagttcgcagccccacctggtaccaggcgaacttcacctcttaattattgtggccctcggagccttcatattgtaacttatttatttaacttattcagcatctgtgaaaggtgcactgtatagtttatatttttaatttaaaacaacagagagcactgcagtttgtttgctgtcagaacaacagagcaaattttgtggacaagcaatgactattcagcctgaacctgtgcattcagaaaacataagctgagaccctgcttcaccagcctggatttcggggcttctatacagaaactggaaaaataaattttaaaaaaatcgtaaacaaaaagagagaaacccttacactagctgcttccaagaatgaactctgtgtgtatgtaaagcaacaaaacaaaaaaggaaaaaaacaaaaagcagaaaaaagaaaaaaaaaatgaaaaactttctatttctagtgagaaccaaagaaggctacctcactgactttttccatttgtaattttaatcgtgttgatgacaccaaagataccaaagatttctttctctgtgcggtctgcattttgcttgtgctcttttataatttgaacgattttctctgacatatggtatgtacagccacagctcagataccccaaagaaataattatctatgcgacggcggctgctaatttggaaagggatattttctgtgtttctcttatatgtttgctgtctgctcgacatgttcaagatgcgagttcagatgctgctgtaattggattccttaaattctgattacaaattgaggaaggaaactggttggaaatggccttcagtcctagccatggcctctatccccgctgggacctgtcacagtaaagactgccaattactgaaccacagaagctctgaccattgagtagttgagctggaagagaccttaggaatcatttagtccaagccccggtggcccagaggaatgaaatagttatccaaatcaaataactcttgagagtgaaagcccacacatgcctcctggttcctgccccagtgctccgcttattgtacagtgctacctctgcatgagagcggtcccacattgacaaataggatggtggcaatcctttagcaatgagcagggactggggtttatctcttaacattttcagctgtaaaattagtcacaagcattttcagtgtcccattagtacatagtcacatatggtcggttgcttcgtgaaggtggcctgtcttgaaatactagggctcatacgggatttttgccctaggaaaaacatgttgatcccaatgatgtgatcacttttgaacctttccattacaaagcattgtatagataactttttaattcagtaggaggagaaagttcattcttggcctgttggctttgattattatgggtactttaaagtcagtatttatcaagaaagggaacttgaccaccattggcacatgtgacatttaagctcttcagccttttcctttttagttgtaggtgtttacatttcatttctaagccaactctgtatttatgagagaagtttaagccttacatcatttgatactaaagggttatttgtggtaaatgaaaaatgaccccaaaattacagaggaatatgccagtttaagaaatggctacttaaagttgcttctctctttccttcttactcatgaaattaattggtcttcttcaagtttctttagattccattaaatgattaaatcactattaagagccattcatcaacgtgatttgtgtgttagccaatgaatctgtctcagcttttgaccaaatgggttttagacaaatgcaaagatctgcctctagtccatatggctctttttgagtgctagtattttgcatttcacataatgtagttattttgagcttttaaagagagcatttagacaaagaagcaaagagaggaagggaccaatcaactcatcagttccatgcatcaacaaagcatagctagtagaggaatataaatgacagattgacaaactgtaggaaacactgttactctctttctgaagttttcaagcaccatcctatgtgaaagttccctcctgtccaaacaagctcaaggcccatcttctccctatacaaggcaaacctgtaaggccttccttccaaagagtacattgctttggttttcttcctaaattcctattggaattagaactctcagaatccctgggagacagagcaaagatgacttaattcattgagcagcagagctccctataagtgaacatcaccttccccatctttcctactgccacacccatacgagagaggatctagaaagagcgatggcagcctgaacacagaaaacatccccacttggcagacctctcctcagcaatccccccagcctcatgcttcacttgcaaagtgtgacataaccacgggacgagtgccttgcttgaaccaaagcaacgatttagccagtctggacctctctgtgctttttttaattcttcctgtgaatacctcagcttcaactgggcctccatacagtcagttggtgggcttattgtactgtggtgctttgcaatgcaaccctgcaaagaacaagatttgtactaataccaaaggttctttctctatgtctcctcctctgcctccctcgttcttcccttttttctagttcttcacggttccaaagctttactatgaacctgggcatgttggcaatgcagaccgcgcaattccttaccgaattttctcagatatacctcatagacaatagtgtttagagtaatgttattatagcgtatgtaataaattattcactgtttcttttggtaactgtgatttaaaaaaagaaaaaagaaaaaaaagctttatacgttttaggttgtgcttttgtaatagatgaaaaaaggtgcgcttaaaaagaaaatgtatgtttttttccccctttggattttatttatgctggattggggaaagttgcagaatgagcccaaagtttacagtttcatattttgctgaagaaacaatctgtgttcatttgctctgttgaaaagaataattattttctacatttgtgccacttggtctgaacaattaattgttccgtgttaacagtgtagtattatgattagcaactgccaatcagtgctataattttatgcatgaggctaaaaatttagcagtgtgatgcattgtggtcttaatagcaacatttttcattttgaactagatcttcccctttggttcaatggactttatttatgcatgggcgcctattgtttgttagcagttgtggaacagttgtgtatacattaaactgtgaaaatgtacacagttcagcctcagacggtggtaatattggttttattgggagatgtgtcacctcgaaaataccctttacatctgttgggatctgaaaatgagtcacattgaattgggttccagctttataatgagaaacgttattcctaatttttgagttagccaatttgcattccacaaattgggatcctcataacccaaatatatcaccgtatgtgagagggatttgaaagcgagtattgaaaaactcacctttgcatatttaatttccaccaaaaggagttattttggctttatgctcatgaacttagacctaactggccatgtatatgtagatgcaaattcatctagctgtggccctctttgatctctgcttgggaatggctatttttgactatgcgtggtttcttctcgtattttgtgatcaggtcagctcccagtagaaactcaaatggcatcaatattactaactcttctctgcccacttctcttttgtccactctcctagacattcccaccaactgttccagtgatttgggcaaaaatacgcagccatttcccaaaacttcacatgtgcagctatcatggctgtccctccctagacttggaggtgactctcacttaatttttacctgcccaacaatgttccatctaccatctaaaaggtaatataagaagaagttttgaaacccactttaggaaaaccatcttctttaaatccttcaattatctgaggcctctatatgtcaaaactatttttcagttgcaggggattgggcaaacttgttctttcttatacttgggttcaaagacccattctccagtttcatatttcccaaaccaaaatgcttgacataaagccaaatcaactgccaagcacactttattttgcataggagtatgcagcctagggaaccttggttgaaaagcagcagtctgctatgcaaaatattggaaatcactgacagtgtagcattcatattatctgtcaatgagggtatattgggaacgtgctctcgtgaataataaaaagcaacatatttttatttggccttataaattaggttgtggtaatgtaaactttgatatatagtctttttatttttctcttattaatctgccaaagatgggaacagatacaagaatttttcaaattggcttttgtaagacaattgatgattgtaatagtgtttaatcttccagaaagctttatatgttgttccacaataaaattgatatttgtttcagcaaagttttcctgacactcacaaacccacaaactgttcctcttaatgcagatattgtagaatctacaaagttcaaatccatttttgatccaaagaaagtagaggagtatttgagacatgagtgtacccagccctttttttaatcacaggcaatgcatgggtctggctggttacactttgccaagaagacttgtcttatgaaacccaaggtatattttgttatgccattttatgtccttttcttttaacattgtggaaagtggtatgttgaatcaagtgtaagctgagttttccagacaactgaagtagctacatcatgaatgttattttgttattaaagggtttttactcagtgctttgtgccaatggatgtccttttccttggagacacataactacaaaattacctcagcttggcctggttttctctcctgccctcttggggaaacatgggcctggcctgggaaaaggcaggtcatgggctggaaggtaggttttggtactaggaagaaatctctgtatctgtcagctttaaagagaactgggccaaaaatctctaacctcactctctctggactccaacacttccctgcaatcctttggtcttgagcatgtgccagcatgaaggcagactccagttcatacatgaaaggcaagaaaaagaaaatagtaaccttgaatcttctgtgggccaccaggcactcacctttccccaccttgcacactatccagtcaaggctattgcagcccatctggtggctttacatgggacattaccaaaggcttcttcctccatcctggggttgcaaaggatccaggtcccctccatccagtggggctcttccacatcagaagtccccctcccaccatcctctgcatcctgtttagctatcccatctataccttttggagatgattatttagaaaacaaagaaaggtatggaatggggtttcctattgtttgctaggttatattttagcaattctcaattctttgatctggaaaaatacaagagggaaaaggagaccccactatctccctgtgctttgctcccatctcagggggcaggggcagtgcacattgcctatgctgttgatctgtcttgggcgacaggctgaatcacagctattgccccagccaaaaacatggcccatcaatgcctactttatctctgcttgaaaatcctattcaaaaagttgtagagtttgaggtttttatccccccatatcctttgctttggtccagtttggcctttagcataagagtcagctttatctctaggaaagttttttcagattatgacaaggaacctgccacctgggaagaaaagagtccgaagactagcaatcggataggtagtcataccattaacagatacttccttgaaggtagaatattatttcctttctttacagttttgtgttacacaagtccaagtggtgccagcaaacttcttaccgtgaaatgttgtaaaacacctggcatactgaaatttctgaaacaaaaacacaagctccacattgataacttgataaataaccactaaagtttagatgcagggactgagatgatacaggcaaaatcttggtgttggtttctcttttaattcgtatcttcgatcacctaacctttctcaatccaagagcagttcagtcttttctccccaagtctaggatgccaaagagcatcataggaaaagataattagggattgaccagcatttcaattagttctcttcttcatctttgcatttctcaaaagtgttctcctggaccagagggaaagagctggtccattttttttcattctttctattcaaatttttccacccagacaatactttattaacacagatactgtagatccttccttggtcagtgaattattacaagaggagctatccttccaccaaagtgagtgaaaacaagttccagtatcttttcttccatccagttttgttctcagaatccaagtcagtcctgggtcttttctcactttagaccctggcctcagatgtgtttattcttgctatttaaaaatacctttaaatttcacatgctggcctgcagaacttgcatcctttgttctatactgttgactgcttgatggtattgaaaggtgactataatgagggaagaaaggaggaggtaaagagagaagaatttgtcccagatctgtttaaagtttcaaaatttaaaaagggacccattaaattatgggaaaatggctatagagtgtgagcctccgttgaccatatgctcaaagaccgtactctgccacctgccttccaggtagctattctagaaactcagtcctttgtggaaacccaactaccttttaaaagtctctttccagattccaaaaggacaagagatcagagagtcacatatacgcctcttgttttattttcttgctttcacgggtattattgccaagaaaatcgtagggaaaaactttaaacttttcttttcagttgatccctttgacatcacctctcatgtttaaaatcaggaaaacacacccctaaaatttgcactctcttccgttttgaaaaagaaaacccacacacaaatgcacactattaccgtctttcaccctgcgctatatttccaaagtgtattataatccagatattgccccatctcaaacatgttaagtcagactgtgctgaaagactttccagggacggtcaacagggtatatgttcagtggctgccctgaaatcctggtggggatgaggatcacgcttcatcatcaaggggatgcccatcccctgataagctcccagtccttttggaagatttctttgaatgttaattgcattttcagttttgctcatttcccaccccaatgttttgtctgcaacatcgcttacactggattctttctatttttattcctatcattaaatggtagtgctgtaaattctgcaattaatgttaaataaactgctttaattcattgaaaaaaaaaaaaaaaaaaaaa

SEQ ID NO: 150212 - DNA, 231 bp, Artificial Sequence
  derived and/or modified sequence
atgatcgccggcgagcaccggctggaccccgccaccatcagcctgggagtggaccagaccgatgatcatcagcaaccgacgcactcacggattaggaagaagcgcgtgagtccgaccagtgtctggttccagccgtacttttgtatcctgaaaacgctgtgcaccaccctggacactgtgcaagatgacgccacttcttcctggatgctgatttgtcatgtcgatttctag

SEQ ID NO: 150213 - DNA, 1515 bp, Artificial Sequence
  derived and/or modified sequence
atgaaagccgcgtataccgcgtatcggtgcttgactaaagatcttgaaggctgcgccatgaaccccgagctgacgatggaatccttgggcacccttcatggaccggccggcggcgggtccggaggtggcggcgggggcggcggcggcggcggaggtggagggcccggtcatgagcaggaattgctggcatctcctagccctcatcatgcagggcggggggcagccggcagtcttaggggacctcctcctccacccacggcgcaccaggaactggggaccgcagccgctgccgccgccgctgccagtaggtctgccatggtcacttctatggcaagtatcttagacggcggggattatcggcccgaactgtccatccctctgcaccacgcaatgtccatgtcatgcgattctagcccccctgggatgggcatgtccaacacctataccaccctcaccccattgcagcccttgccaccgatctctacggtaagcgacaaatttcaccatccccacccacaccatcaccctcatcatcaccatcaccaccatcaccagagactgtccgggaacgtgagcggctcattcactctgatgagagatgaacgcgggctccctgctatgaataacttgtactccccctataaggagatgcccggaatgtcccagtcactgagcccactcgcagctactcccctgggcaacggactgggaggtctgcacaatgcccagcaatccctccctaactacggccccccaggccacgacaaaatgctatcacctaattttgacgcccatcacacagctatgcttactcgaggcgagcagcacctgtctcgcggcctgggtacccccccagccgctatgatgtctcacctgaatggcctccaccaccctgggcatactcagtctcatggccctgtcctggctccatcccgggagagacccccctcctccagctccgggagtcaggtggctacctccgggcagctggaggaaatcaataccaaagaggtcgcacagaggattacagcagagctgaagaggtacagtataccacaagccattttcgctcagagagttctttgtcgcagccaagggactctaagcgatttgttaaggaaccctaagccgtggtcgaagctcaaatcaggccgcgaaacgttcagaaggatgtggaaatggctgcaggagcctgagttccagcgaatgtcggctctgcgacttgcagcgtgcaaacgcaaagagcaagagcctaacaaggatcggaataactcccagaagaagtccagactggtattcaccgacttacagcgaagaacgttgtttgccatatttaaggagaacaagagacccagcaaagagatgcagatcaccatttcccagcagctgggactcgaattgaccacggtcagcaactttttcatgaacgcccggcggcgcagcctggaaaaatggcaggatgacctttcaaccggcggatcgtcatccaccagttctacctgcacgaaggcgtag

SEQ ID NO: 150214 - DNA, 1458 bp, Artificial Sequence
  derived and/or modified sequence
atgaatcccgagcttacaatggagtctctgggcaccctgcacggccccgccgggggagggtcaggtggaggcggcgggggagggggtggaggtggaggcgggggccctgggcacgaacaggaacttttagcctctccttctccacaccatgctggaagaggcgccgccggtagtctcagaggcccccccccccctccgacagctcatcaagagctgggtacggccgctgcggctgcagcggctgctagccgtagtgctatggtgacatctatggcctcaatcctggacggaggcgattaccggccggagttgtcaattccactgcatcacgcaatgtcgatgtcctgtgactcttcacctcccggcatgggcatgtccaacacgtacaccactttgacacccctccagccgctgccccccatttccacagtctctgacaagtttcatcacccacatccgcatcatcatccacaccatcaccatcaccaccaccatcagagactcagcggtaatgtgtccgggagctttaccttgatgcgggacgagcggggtctacctgcgatgaataacttgtactcaccctacaaagaaatgcccggaatgtcgcagagtctgtcccctctggccgccacacctctgggtaacggactgggaggcctgcacaacgcccagcagtccctgcctaactacggcccccccggtcacgacaaaatgctgagtccgaacttcgatgctcatcatactgctatgctcacccgcggggagcagcatttgtcccgtgggttgggaacaccccccgctgccatgatgtcccacttgaatggactgcatcaccccggacatacgcagagccacggccctgttttagccccgtcacgggagagacccccttcctcttcctctggcagccaggtggctacttcagggcagctggaggagatcaacaccaaggaggtggcccagagaattactgccgagttgaagcgttactctatcccccaggcaatcttcgcccagcgagttctgtgcaggtctcaaggcactctctctgatttgcttcgcaatcctaaaccttggtccaaattaaaatcagggagggaaacgttccgtagaatgtggaagtggctgcaggaacccgagtttcagaggatgtcagctctcagactggccgcttgcaaacgaaaagaacaggaacctaacaaggataggaacaatagccagaagaagagcagactggtgtttaccgatctgcagcggcggacattgttcgccatcttcaaagagaacaaacgcccatcgaaggagatgcaaattacaatttcccagcagttggggctggagcttactacggttagcaacttcttcatgaacgcccgccgccgttcccttgaaaaatggcaggatgacctgtcaaccggaggcagttcttctaccagcagcacctgtacaaaagcctag

SEQ ID NO: 150215 - DNA, 1515 bp, Artificial Sequence
  derived and/or modified sequence
atgaaggccgcctacacagcctaccgctgcctgaccaaggacctggagggctgtgccatgaaccctgagctgaccatggagagcctgggcaccctgcacggccctgctgggggcggcagcggcggcggcggcggcggcggcggcggcggcggcggcggcggccctggccacgagcaggagctgctggccagccccagcccccaccacgccggccgcggggctgctggcagcctgcggggccccccacctccacccacagcccaccaggagctgggcacagctgctgctgctgctgctgctgccagccgcagcgccatggtgacctccatggccagcatcctggatggaggagactacagacctgagctgagcatccccctgcaccacgccatgtccatgagctgtgacagcagccccccaggcatgggcatgagcaacacctacaccaccctgacccccctgcagcccctgccccccatcagcacagtgtctgacaagttccaccacccccacccccaccaccacccccaccaccaccaccaccaccaccaccagaggctgtctggaaatgtgtctggcagcttcaccctgatgagagatgagcggggcctgcctgccatgaacaacctgtacagcccctacaaggagatgcctggcatgagccagagcctgagccccctggccgccacccccctgggcaatggcctgggcggcctgcacaatgcccagcagagcctgcccaactacggccccccaggccatgacaagatgctgagccccaactttgatgcccaccacacagccatgctgaccagaggagagcagcacctgagccggggcctgggcaccccacctgctgccatgatgagccacctgaatggcctgcaccaccctggccacacccagagccacggccctgtgctggcccccagccgggagaggcctcccagcagcagcagcggcagccaggtggccaccagcggccagctggaggagatcaacaccaaggaggtggcccagaggatcacagctgagctgaagcgctacagcatcccccaggccatctttgcccagagggtgctgtgccgcagccagggcaccctgagtgacctgctgaggaaccccaagccctggagcaagctgaagagcggccgggagaccttccggaggatgtggaagtggctgcaggagcctgagttccagaggatgtctgccctgcggctggccgcctgcaagaggaaggagcaggagcccaacaaggacaggaacaacagccagaagaagagccggctggtgttcacagacctgcagaggaggaccctgtttgccatcttcaaggagaacaagaggcccagcaaggagatgcagatcaccatcagccagcagctgggcctggagctgaccaccgtgagcaacttcttcatgaatgccaggagaagaagcctggagaagtggcaggatgacctgagcactggaggcagcagcagcaccagcagcacctgcaccaaggcctag

SEQ ID NO: 150216 - DNA, 1458 bp, Artificial Sequence
  derived and/or modified sequence
atgaaccctgagctgaccatggagagcctgggcaccctgcacggccctgctgggggcggcagcggcggcggcggcggcggcggcggcggcggcggcggcggcggccctggccacgagcaggagctgctggccagccccagcccccaccacgccggcagaggagctgctggcagcctgcggggccccccacctccacccacagcccaccaggagctgggcacagctgctgctgctgctgctgctgccagccgcagcgccatggtgacctccatggccagcatcctggatggaggagactacagacctgagctgagcatccccctgcaccacgccatgtccatgagctgtgacagcagccccccaggcatgggcatgagcaacacctacaccaccctgacccccctgcagcccctgccccccatcagcacagtgtctgacaagttccaccacccccacccccaccaccacccccaccaccaccaccaccaccaccaccagaggctgtctggaaatgtgtctggcagcttcaccctgatgagagatgagcggggcctgcctgccatgaacaacctgtacagcccctacaaggagatgcctggcatgagccagagcctgagccccctggccgccacccccctgggcaatggcctgggcggcctgcacaatgcccagcagagcctgcccaactacggccccccaggccatgacaagatgctgagccccaactttgatgcccaccacacagccatgctgaccagaggagagcagcacctgagccggggcctgggcaccccacctgctgccatgatgagccacctgaatggcctgcaccaccctggccacacccagagccacggccctgtgctggcccccagccgggagcggccccccagcagcagcagcggcagccaggtggccaccagcggccagctggaggagatcaacaccaaggaggtggcccagaggatcacagctgagctgaagcgctacagcatcccccaggccatctttgcccagagggtgctgtgccgcagccagggcaccctgagtgacctgctgaggaaccccaagccctggagcaagctgaagagcggccgggagaccttccggaggatgtggaagtggctgcaggagcctgagttccagaggatgtctgccctgcggctggccgcctgcaagaggaaggagcaggagcccaacaaggacaggaacaacagccagaagaagagccggctggtgttcacagacctgcagaggaggaccctgtttgccatcttcaaggagaacaagaggcccagcaaggagatgcagatcaccatcagccagcagctgggcctggagctgaccaccgtgagcaacttcttcatgaatgcccggcggcgcagcctggagaagtggcaggatgacctgagcactggaggcagcagcagcaccagcagcacctgcaccaaggcctag

SEQ ID NO: 150217 - DNA, 1515 bp, Artificial Sequence
  derived and/or modified sequence
atgaaggccgcctacaccgcctaccggtgcctgaccaaggacctggagggttgtgctatgaatccggaactgacaatggagtccctcggcacacttcacggacccgctggaggaggttctggtggaggggggggcgggggcggtggcgggggtggtggaggccccggacacgagcaggagttactggcgtcgccatcgccccaccatgctggaagaggagctgctggtagcctaagaggacccccacccccccctactgcccaccaagagcttgggactgctgctgctgcagcggctgccgcatcaagatcggcaatggtgacatcaatggcaagtatcctagatggaggcgattataggcctgagctgtcgatccccttgcatcacgccatgtctatgagttgcgattcctctccaccaggaatggggatgtcgaacacctacactactctcacacccctccagcccctgcctccaatcagcactgtctctgacaagttccaccatccacacccccaccaccacccccatcaccaccaccaccaccatcaccagagattgtcaggcaacgtcagtggtagttttacactgatgcgcgacgaaaggggcttacctgctatgaataatctgtatagcccttacaaggaaatgcctgggatgtcacagagtttgtccccactggccgccactcctctaggcaacgggctgggcggattgcacaatgcccaacagtcgctgcctaactacggtcctcccggtcacgacaagatgttgtcaccaaacttcgacgcgcaccacaccgccatgctgaccagaggcgaacagcatttaagccgcggactcggcacaccacctgcagccatgatgagccacctgaacggcttgcatcaccccgggcatacacagagccacggacccgtactagcgccgtctcgggaaaggcctccaagttcaagctcaggctcccaagtggcaacctccggccagcttgaggaaattaatacaaaagaagtagctcagcggatcacagcagagctgaaacgctacagtattcctcaggctatttttgcacagagagtcctatgccgctcccaggggactctttcagacctgcttcgtaatccaaagccatggtccaaactgaaatccgggagagagacttttaggcgtatgtggaaatggttgcaagagcctgaatttcagcggatgtctgctcttcgtctcgctgcctgtaagagaaaggagcaagagcccaataaggataggaacaatagccagaaaaagagtaggttagtgtttactgatcttcaaagacggactctatttgccattttcaaagagaataagcggccctctaaggagatgcagatcaccatcagtcaacagctggggctggaactgactactgtttccaacttttttatgaacgcccggagaaggagcctcgagaagtggcaagatgatttatctacaggaggctcctcctcaacttcctcaacttgtacaaaggcttag

SEQ ID NO: 150218 - DNA, 1458 bp, Artificial Sequence
  derived and/or modified sequence
atgaaccccgagctgaccatggagagcctgggcaccctgcacggccccgccggtggcggatcaggtggcggcggcggcggcggtggcggggggggtggaggaggccccggtcatgaacaggagctcctggcaagccccagtccacatcatgcaggccgtggtgcagccggcagcctgaggggccctccacctccaccaaccgctcatcaggagcttggaactgccgcagcggctgctgctgctgcttcacggtcagccatggtaacgtccatggccagcatcctggacggcggagactatcgccctgaactaagcataccactgcatcacgccatgagcatgtcctgcgatagcagcccccccggcatggggatgagtaacacctatacaaccctcacccccctgcaacctttacctccgatttccaccgtcagcgacaaattccaccatccccatccccaccaccaccctcatcatcaccaccaccaccatcaccagcgactatctggcaacgtatccggatcttttacacttatgagagatgagcgtggcctccccgccatgaataacctgtactcaccatataaagagatgcccggtatgagccagagcttaagcccccttgctgcaactcctcttggaaatgggcttggagggctgcacaatgcacagcagtcactgccgaactacggccccccagggcatgacaaaatgttgtctcctaattttgacgcccatcacacagcgatgctgacgagaggagaacaacacctatctagaggcttgggcactccgcccgccgctatgatgagtcacctgaatgggctgcaccaccctggacatacacaaagccacggccccgtcctcgctccatcacgtgagcgtcctccttcatcgtcctcaggcagccaagttgccaccagtggacagcttgaagagataaatacaaaagaagtggcccaacggattacagccgaactgaaacgctacagcattccacaagccatcttcgcccagagagtgctatgtcggagccagggcacgcttagcgacctcctgcgtaaccccaagccctggtctaagctgaagtctgggcgagagacttttagaagaatgtggaagtggctccaagaacctgagttccagagaatgagtgccttacgtctggcagcctgcaagcgtaaagaacaggagccaaataaagaccgtaataacagccaaaagaaaagcaggctcgttttcaccgatctgcaacgacgtacactcttcgctatttttaaggagaacaaaaggccatcaaaggagatgcagatcactataagccagcagctgggcctggagttgacaactgtgagcaatttttttatgaacgcacgccggaggtccctggagaagtggcaagatgacctctcaaccggaggatcaagtagtacttcctcaacatgcacaaaggcctag

SEQ ID NO: 150219 - DNA, 16121 bp, Artificial Sequence
  derived and/or modified sequence
gcccccgccgcccccgggccctgatggactgaatgaaggctgcctacaccgcctatcgatgcctcaccaaagacctagaaggctgcgccatgaacccggagctgacaatggaaagtctgggcactttgcacgggccggccggcggcggcagtggcgggggcggcggcgggggcggcgggggcggcggcgggggcccgggccatgagcaggagctgctggccagccccagcccccaccacgcgggccgcggcgccgctggctcgctgcggggccctccgccgcctccaaccgcgcaccaggagctgggcacggcggcagcggcggcagcggcggcgtcgcgctcggccatggtcaccagcatggcctcgatcctggacggcggcgactaccggcccgagctctccatcccgctgcaccacgccatgagcatgtcctgcgactcgtctccgcctggcatgggcatgagcaacacctacaccacgctgacaccgctccagccgctgccacccatctccaccgtgtctgacaagttccaccaccctcacccgcaccaccatccgcaccaccaccaccaccaccaccaccagcgcctgtccggcaacgtcagcggcagcttcaccctcatgcgcgacgagcgcgggctcccggccatgaacaacctctacagtccctacaaggagatgcccggcatgagccagagcctgtccccgctggccgccacgccgctgggcaacgggctaggcggcctccacaacgcgcagcagagtctgcccaactacggtccgccgggccacgacaaaatgctcagccccaacttcgacgcgcaccacactgccatgctgacccgcggtgagcaacacctgtcccgcggcctgggcaccccacctgcggccatgatgtcgcacctgaacggcctgcaccacccgggccacactcagtctcacgggccggtgctggcacccagtcgcgagcggccaccctcgtcctcatcgggctcgcaggtggccacgtcgggccagctggaagaaatcaacaccaaagaggtggcccagcgcatcacagcggagctgaagcgctacagtatcccccaggcgatctttgcgcagagggtgctgtgccggtctcaggggactctctccgacctgctccggaatccaaaaccgtggagtaaactcaaatctggcagggagaccttccgcaggatgtggaagtggcttcaggagcccgagttccagcgcatgtccgccttacgcctggcagcgtgcaaacgcaaagagcaagaaccaaacaaagacaggaacaattcccagaagaagtcccgcctggtgttcactgacctccaacgccgaacactcttcgccatcttcaaggagaacaaacgcccgtcaaaggagatgcagatcaccatttcccagcagctgggcctggagctcacaaccgtcagcaacttcttcatgaacgcccggcgccgcagcctggagaagtggcaagacgatctgagcacagggggctcctcgtccacctccagcacgtgtaccaaagcatgatggaaggactctcacttgggcacaagtcacctccaaatgaggacaacagataccaaaagaaaacaaaggaaaaagacaccggattcctagctggggcccttcactggtgatttgaaagcacaattctcttgcaaagaaacttatattctagctgtaatcataggccaggtgttcttcttttgtttttaatggctatggagtccaagtgcaagctgaaaaattaatctcttagaaccagacactgttctctgagcatgctaagcatcccagaaacccaaatggggccttcctggagcgagttaattccagtatggtgtcaaccaagctcgggattgcttaaaatatcatccatcccacttcaggtcctgtcagcttcttgcagtcagagttcctatgagtaacaataggagtttggcctatgtaaggactctgagtttaggcttccaagatacaacaataagagaagaatctagcaacgagaatgacctcatttgctttccacatgcttagcctcattataccatgttatgtccaagttcacagccacaacatcagaatggtaattactgagcacaagttttaaatatggacgttaaaaaaaaaaatccaaggacctgtttttccaacccagacatcttttcattgaatgatttagaaagctttaagttgatccagcttacaattttttttttctttacctcctggaaatctcatatggtcttggatccgtcaaaaaaaccagtcagttcacttgcgctcaaagtatcaagcacaacaaagataaacagaagtgaggaaggttctgggttcactacatctggattttcaagacacctattgtgaagtcattagggaattgatgagaatatggcttcaagcacattttgcagtttgctacaaattctgttgtacataatgcagacgcacactcaggaggccaatttaactgttaacagtgcatggagcgaatgcagcattttaaaagatctaggtttttttaggtcattaatgtgtccttggttgatcagtcatctggtccctcctactgtgtgttatgaccaccacgtaatccattctcgctctttctgatttggggtttttcctcatccatcccattagtagggatgttttctgtgttttctagcaagaaaaaaaaatcaatcaatcaaacctgcatacatgttactcatgactgtcatctagtcctaaatctcttctgttgttgaatcatccttgcaaaacagctgaatacatctggagaaaacacagcacaccaaagaagcagaatactgcaaaccaaagacatttatgacttgtcattttctagcctaaaaatactgtgattacttttagaaatcagaaaacctctgcaactccgaatggcattcagctcttgcatttggcgcatcatcgggctgagcggaccagctacaccaaggacattagccaagccacccagaggggtggctttgccacaccagttgtcaccttcccatagcaagtggaagagcgcccacagaactctgggagattgcaaaggtcacaatgtgcatatttaccagtgaatggccccgggtggggccacgtgggggtgttcaaagcaagccaaacgctgcaatcattctttacagacacttgagactgacttttttatgaattacttagtcgaaaccaaagaaactttttctgcacctacttctgcaacaaacaaaactgtcccattaaaatgaataaataaatccgtaaatcaatggaaatcaccaccaataagaaggaagcacgccagaaaataaacgaaaacaaaaacagggagacacactgtgttcaaacagacctcttgggacattttttggaagcagattttaaagaaagggttgagacaaagatagaaataaggaagagcctcagtggctgctgcttcatttgacaactcacacggtaatcttaaagctgaagattgtctttaatttgtgcctatgcagtttttcaaaagaacacggaacagagcaacagaaacctcaacagctacaataccaaagatgaggatttctcacaccttttgtttcagttcattatctcctcttgcctggctaaaatactaatagcgccattgaactgtataaaggtaatcaattatgtttctctgagcaacaaaaggaaagggccatttatttgattttattgtttcatttcaattttgtcttatggttttttgccccaacatggaatctctcaaaagtttccatggactccaagtttaagatgttgggatattgaacagttctctctgctcagcagagggtagggaataacattatcacttgaatgttctttgcttaacccttagacttggttccttctatgttcagagtctcatcatcaggggaaggaaagggagtgagggtcagggataggggtcttggtgatgcatcctctcccgagccacagaaccaaagagtttatagaggaatttacagcctcgttttcatgtgattgctacatcctaacagggcttcatttgggggtggggggaaacatgtaaaaataattgccagtttctacttttctattagctttttaaaaatcagctgtaaagttgcatttctaaagaaagatatatataatatataaaatacatatatagatcaacttgacattggtgataaccaaaattattgctgtccaaattcatgtcttgttttggtccagtgcttcatttgctaagtattcggttcagaatttttctcatttctcatgccattccagagttaatttgccactgtggatgatttgaagtattcagatctctatggaagtttctgggacaggtttaaagtcaagatcaagcattttagcatttaacctgttgataaatggatccatggtgtacatgagttttatttgtattcggagtcatctctattctatccctcagcctcgattaaggtggtgagtgaagtgcatccaacagactcggcccagaactgggtcctgacagtggggtgctcatcttctgtaactgttgggaaggctcggtggtccattttcaccagttaaagaatatgaggccagcccagaaatctgttctccaggagctgccctgtcccatctgggtgtgccagaccccctcagtgagcaggtccaccaaagggacttctcacaggggaagcccaactcctgttgcaatgggttgatagatttcctcagggtggtaattaccaattcgtattttgacaagcctatgtgcaaccacagctggcactggggtgggcagtggtgttgggtgggatgggggagagtgtctcaatcctgaagagaaaatataaagcaggttttggggagacttctggagtcctgcccctagagagccccattgttgttctttgtgccccctcctcattccccctatgtgggtctccctatgcaggagctgtgagagaatgtgactctccacaatttttataattcatccttcctaggagattgttcattggctcttcccttgtgtccctttgtcccttgctcatactccatgtttcctttgtcaaaggactaagaaaagagcatatttcagcagaggagtgttcccatgtgggttgatttcaacttgggtatttctaaaagagtccttgtgacatgtgtccagtggaaatggttgctcttttccagactggattgaggaatggagcctgtttgatttggttagtgattctttgacatactaatctcagcgtttgggtctccagcatcctctgaagatgtctagactagtagaggctgcctttgtgacctgacattacaacattggtcaaaccagtcctctgataatcagaagaacatgtcataattgtttaaaaaaaaaaaaaaggcaagaatttctctccaaggagctttaataaatgtctcattccagataatgtcataccagagaaaagtgcttgcttttagaaaattatttacatacatatataaatatatatgtgtatctatacagttatgtatcaaaattttaagccctgcagaatttcaatttgttagaaatctaacagaaaaaaatttctatattgaaaggtaatagaatttaacccagtgagtttactcaaggatttttaaatttaagttaataatttcagagaaaataaccatttgggtgtggttatagtttagtatccattacctcaatccaaggaaaattccaggcattcctcaaccatcaggaaaaggtacagtgtgaaggaacagttctcagccaaatttcacattcttgaggcaacagaaatcaaaacactcagagccattgagtggaaaaacaatttactttattcctttacacaaataggcttgcattgtttttgttttaatgtgattttggtactagggatataattatttcattccaggaaataataaaaaaaaacagacagagccaatacatttctttttttaaaggaaacagcaacaacaataaaaactcagcaccaatatttaaaagcttttccaaaatgtaaaagaagtgtttagcttgcaccatgcataaaggtgcaggctagttgaaccaggaagcatggcacttcctctggagaaatccagaaagagttgcttctaagctcccttttccccctgcaggctcttggcaattgtaggctttagcaaatccagaataattttcaattcaagctaaaataaaatcaacatttggaatgtaaatctgatacacacacacttttctaagtcaaacaacatatttcaaaaccaaaaataaataccttttagataatcagttattttctttgtctatactgggcacccacctactagtgccagtaaattcaagttgaacagatttttaaaatcactattatctgggtatgggggaaacttccccacttttgaaaatgttggtagaattataggaatgtctgtttgattatcattaccaaagtgtcatgacagtatgcctttgtagtgaactcggattttcaggagtttgaatagttggatattttaaaatctaagaagaaaaggcctgtttccaatgttgttgaagaataatgaactctattaaaaagtggagaaaaagataatacatgtggtcaaggttgaccacaaggcccaggcacaactaccttggcgataatcttctagattcgtaacaggttagagctgactttttgtttttgttgttgctgatgctgtgtgattcagacttctcagcctaaccaggaagagtaagtggaaatggtagatgaagaaggggtagagctggtgtatctataactttctgatatttgtctgccaaacttgatatattagtaatttttttatctttagctaagatcaagtcacccctgaaacaacaggagattctagttttaaaataaggccacaaaaatccttacggaatgaagaatggcaccccagttggttgtataagtctcataagataatgatgttgattttaaatatggatgtctcaatgcctgttttctatcaatgatttgtttgtttccaaggtcggggagggaaagaggggagggtttatctgttttagaaagtctcagaatacttataaaatacagaagtagttattaaaatatataggacctcacataggtagatacagaacttaccattgaggctgatgggctgttgtgtgaatcacacaggaccttaaatgaggctcattattctcacacaccaaaatgactctgacagcctgaagcagttattgctagagcccaagctttccttggaggttttggagttaggttgattggaagtaaccagctaataccttttctagtggagaaaaagacattgctaccagcttgttcatcccatagaagtcttccactctgctccatttttagcagcaagcatttcatgtagcataaaccttggcagataagtgtgcctaaggtttatacagtctgtccgcttggatgtatacaaatttagatacatattttaacatgtgttctcatagatgactttataacaacacacattacctataggtgtctagactgtgtacatacaagtgtgtacagacaagcttcatacgtatatactgtaatccgttacaacaaataaattttaaatcatcgtttaacatgtatgtggtacttctacagtgtacattgttttcattatttattgtaacattgaaaaccacagtgcagggaaaacaaaagtatcccagcatcttcatcctgtacacttggaattaatttcatttgggcatatccaagataaactcaactttcaagaaatcttgtatattatttaatcatctgtgttaggatgacacctatgattgatgacttcggttgaatagctttattctggatttttcataactaaagctaaatccaaagacctgaaaaaggacaaaaagaaaaaaaaaaaaagaaaaaacaaagaaaaagaagaaaaaataataaagtcaagcgcaaactgatggggagacagtgggctctggtttccaggattgagacaatggtactgcggtcttggggagactgcgttagctagtggggagtggtgatttttttcatgcttgtcacatctaaatggtctttaacatgagaaagttttagaggttataatttcctgctttgtttttatttagactatcaaatgaagttatacatgttgtcagtcaaaaaatgaagacaccctctgccccaccccacagaatgctttttatcttgtctctttgggttatgacccaacaagctaagtaccattaatgtaattaacttatttaaattagttcctagtacataaatgtataggatttgggtaattatttaatcatccttccttagtttgattctactccttgtacttatttatcaaaacctagaccaatggtgcatcagagatgcaaaattctacttggaatactcttgaagtttagtttgctttataaagcagtgaaattctgttacagacagggaagaaatacaggttacaaaaagagaatttgggatattcttccctcttaaattaacttttaaaatagtctaagtaacaatttttaaattatttaacttaagttcgcagccccacctggtaccaggcgaacttcacctcttaattattgtggccctcggagccttcatattgtaacttatttatttaacttattcagcatctgtgaaaggtgcactgtatagtttatatttttaatttaaaacaacagagagcactgcagtttgtttgctgtcagaacaacagagcaaattttgtggacaagcaatgactattcagcctgaacctgtgcattcagaaaacataagctgagaccctgcttcaccagcctggatttcggggcttctatacagaaactggaaaaataaattttaaaaaaatcgtaaacaaaaagagagaaacccttacactagctgcttccaagaatgaactctgtgtgtatgtaaagcaacaaaacaaaaaaggaaaaaaacaaaaagcagaaaaaagaaaaaaaaaatgaaaaactttctatttctagtgagaaccaaagaaggctacctcactgactttttccatttgtaattttaatcgtgttgatgacaccaaagataccaaagatttctttctctgtgcggtctgcattttgcttgtgctcttttataatttgaacgattttctctgacatatggtatgtacagccacagctcagataccccaaagaaataattatctatgcgacggcggctgctaatttggaaagggatattttctgtgtttctcttatatgtttgctgtctgctcgacatgttcaagatgcgagttcagatgctgctgtaattggattccttaaattctgattacaaattgaggaaggaaactggttggaaatggccttcagtcctagccatggcctctatccccgctgggacctgtcacagtaaagactgccaattactgaaccacagaagctctgaccattgagtagttgagctggaagagaccttaggaatcatttagtccaagccccggtggcccagaggaatgaaatagttatccaaatcaaataactcttgagagtgaaagcccacacatgcctcctggttcctgccccagtgctccgcttattgtacagtgctacctctgcatgagagcggtcccacattgacaaataggatggtggcaatcctttagcaatgagcagggactggggtttatctcttaacattttcagctgtaaaattagtcacaagcattttcagtgtcccattagtacatagtcacatatggtcggttgcttcgtgaaggtggcctgtcttgaaatactagggctcatacgggatttttgccctaggaaaaacatgttgatcccaatgatgtgatcacttttgaacctttccattacaaagcattgtatagataactttttaattcagtaggaggagaaagttcattcttggcctgttggctttgattattatgggtactttaaagtcagtatttatcaagaaagggaacttgaccaccattggcacatgtgacatttaagctcttcagccttttcctttttagttgtaggtgtttacatttcatttctaagccaactctgtatttatgagagaagtttaagccttacatcatttgatactaaagggttatttgtggtaaatgaaaaatgaccccaaaattacagaggaatatgccagtttaagaaatggctacttaaagttgcttctctctttccttcttactcatgaaattaattggtcttcttcaagtttctttagattccattaaatgattaaatcactattaagagccattcatcaacgtgatttgtgtgttagccaatgaatctgtctcagcttttgaccaaatgggttttagacaaatgcaaagatctgcctctagtccatatggctctttttgagtgctagtattttgcatttcacataatgtagttattttgagcttttaaagagagcatttagacaaagaagcaaagagaggaagggaccaatcaactcatcagttccatgcatcaacaaagcatagctagtagaggaatataaatgacagattgacaaactgtaggaaacactgttactctctttctgaagttttcaagcaccatcctatgtgaaagttccctcctgtccaaacaagctcaaggcccatcttctccctatacaaggcaaacctgtaaggccttccttccaaagagtacattgctttggttttcttcctaaattcctattggaattagaactctcagaatccctgggagacagagcaaagatgacttaattcattgagcagcagagctccctataagtgaacatcaccttccccatctttcctactgccacacccatacgagagaggatctagaaagagcgatggcagcctgaacacagaaaacatccccacttggcagacctctcctcagcaatccccccagcctcatgcttcacttgcaaagtgtgacataaccacgggacgagtgccttgcttgaaccaaagcaacgatttagccagtctggacctctctgtgctttttttaattcttcctgtgaatacctcagcttcaactgggcctccatacagtcagttggtgggcttattgtactgtggtgctttgcaatgcaaccctgcaaagaacaagatttgtactaataccaaaggttctttctctatgtctcctcctctgcctccctcgttcttcccttttttctagttcttcacggttccaaagctttactatgaacctgggcatgttggcaatgcagaccgcgcaattccttaccgaattttctcagatatacctcatagacaatagtgtttagagtaatgttattatagcgtatgtaataaattattcactgtttcttttggtaactgtgatttaaaaaaagaaaaaagaaaaaaaagctttatacgttttaggttgtgcttttgtaatagatgaaaaaaggtgcgcttaaaaagaaaatgtatgtttttttccccctttggattttatttatgctggattggggaaagttgcagaatgagcccaaagtttacagtttcatattttgctgaagaaacaatctgtgttcatttgctctgttgaaaagaataattattttctacatttgtgccacttggtctgaacaattaattgttccgtgttaacagtgtagtattatgattagcaactgccaatcagtgctataattttatgcatgaggctaaaaatttagcagtgtgatgcattgtggtcttaatagcaacatttttcattttgaactagatcttcccctttggttcaatggactttatttatgcatgggcgcctattgtttgttagcagttgtggaacagttgtgtatacattaaactgtgaaaatgtacacagttcagcctcagacggtggtaatattggttttattgggagatgtgtcacctcgaaaataccctttacatctgttgggatctgaaaatgagtcacattgaattgggttccagctttataatgagaaacgttattcctaatttttgagttagccaatttgcattccacaaattgggatcctcataacccaaatatatcaccgtatgtgagagggatttgaaagcgagtattgaaaaactcacctttgcatatttaatttccaccaaaaggagttattttggctttatgctcatgaacttagacctaactggccatgtatatgtagatgcaaattcatctagctgtggccctctttgatctctgcttgggaatggctatttttgactatgcgtggtttcttctcgtattttgtgatcaggtcagctcccagtagaaactcaaatggcatcaatattactaactcttctctgcccacttctcttttgtccactctcctagacattcccaccaactgttccagtgatttgggcaaaaatacgcagccatttcccaaaacttcacatgtgcagctatcatggctgtccctccctagacttggaggtgactctcacttaatttttacctgcccaacaatgttccatctaccatctaaaaggtaatataagaagaagttttgaaacccactttaggaaaaccatcttctttaaatccttcaattatctgaggcctctatatgtcaaaactatttttcagttgcaggggattgggcaaacttgttctttcttatacttgggttcaaagacccattctccagtttcatatttcccaaaccaaaatgcttgacataaagccaaatcaactgccaagcacactttattttgcataggagtatgcagcctagggaaccttggttgaaaagcagcagtctgctatgcaaaatattggaaatcactgacagtgtagcattcatattatctgtcaatgagggtatattgggaacgtgctctcgtgaataataaaaagcaacatatttttatttggccttataaattaggttgtggtaatgtaaactttgatatatagtctttttatttttctcttattaatctgccaaagatgggaacagatacaagaatttttcaaattggcttttgtaagacaattgatgattgtaatagtgtttaatcttccagaaagctttatatgttgttccacaataaaattgatatttgtttcagcaaagttttcctgacactcacaaacccacaaactgttcctcttaatgcagatattgtagaatctacaaagttcaaatccatttttgatccaaagaaagtagaggagtatttgagacatgagtgtacccagccctttttttaatcacaggcaatgcatgggtctggctggttacactttgccaagaagacttgtcttatgaaacccaaggtatattttgttatgccattttatgtccttttcttttaacattgtggaaagtggtatgttgaatcaagtgtaagctgagttttccagacaactgaagtagctacatcatgaatgttattttgttattaaagggtttttactcagtgctttgtgccaatggatgtccttttccttggagacacataactacaaaattacctcagcttggcctggttttctctcctgccctcttggggaaacatgggcctggcctgggaaaaggcaggtcatgggctggaaggtaggttttggtactaggaagaaatctctgtatctgtcagctttaaagagaactgggccaaaaatctctaacctcactctctctggactccaacacttccctgcaatcctttggtcttgagcatgtgccagcatgaaggcagactccagttcatacatgaaaggcaagaaaaagaaaatagtaaccttgaatcttctgtgggccaccaggcactcacctttccccaccttgcacactatccagtcaaggctattgcagcccatctggtggctttacatgggacattaccaaaggcttcttcctccatcctggggttgcaaaggatccaggtcccctccatccagtggggctcttccacatcagaagtccccctcccaccatcctctgcatcctgtttagctatcccatctataccttttggagatgattatttagaaaacaaagaaaggtatggaatggggtttcctattgtttgctaggttatattttagcaattctcaattctttgatctggaaaaatacaagagggaaaaggagaccccactatctccctgtgctttgctcccatctcagggggcaggggcagtgcacattgcctatgctgttgatctgtcttgggcgacaggctgaatcacagctattgccccagccaaaaacatggcccatcaatgcctactttatctctgcttgaaaatcctattcaaaaagttgtagagtttgaggtttttatccccccatatcctttgctttggtccagtttggcctttagcataagagtcagctttatctctaggaaagttttttcagattatgacaaggaacctgccacctgggaagaaaagagtccgaagactagcaatcggataggtagtcataccattaacagatacttccttgaaggtagaatattatttcctttctttacagttttgtgttacacaagtccaagtggtgccagcaaacttcttaccgtgaaatgttgtaaaacacctggcatactgaaatttctgaaacaaaaacacaagctccacattgataacttgataaataaccactaaagtttagatgcagggactgagatgatacaggcaaaatcttggtgttggtttctcttttaattcgtatcttcgatcacctaacctttctcaatccaagagcagttcagtcttttctccccaagtctaggatgccaaagagcatcataggaaaagataattagggattgaccagcatttcaattagttctcttcttcatctttgcatttctcaaaagtgttctcctggaccagagggaaagagctggtccattttttttcattctttctattcaaatttttccacccagacaatactttattaacacagatactgtagatccttccttggtcagtgaattattacaagaggagctatccttccaccaaagtgagtgaaaacaagttccagtatcttttcttccatccagttttgttctcagaatccaagtcagtcctgggtcttttctcactttagaccctggcctcagatgtgtttattcttgctatttaaaaatacctttaaatttcacatgctggcctgcagaacttgcatcctttgttctatactgttgactgcttgatggtattgaaaggtgactataatgagggaagaaaggaggaggtaaagagagaagaatttgtcccagatctgtttaaagtttcaaaatttaaaaagggacccattaaattatgggaaaatggctatagagtgtgagcctccgttgaccatatgctcaaagaccgtactctgccacctgccttccaggtagctattctagaaactcagtcctttgtggaaacccaactaccttttaaaagtctctttccagattccaaaaggacaagagatcagagagtcacatatacgcctcttgttttattttcttgctttcacgggtattattgccaagaaaatcgtagggaaaaactttaaacttttcttttcagttgatccctttgacatcacctctcatgtttaaaatcaggaaaacacacccctaaaatttgcactctcttccgttttgaaaaagaaaacccacacacaaatgcacactattaccgtctttcaccctgcgctatatttccaaagtgtattataatccagatattgccccatctcaaacatgttaagtcagactgtgctgaaagactttccagggacggtcaacagggtatatgttcagtggctgccctgaaatcctggtggggatgaggatcacgcttcatcatcaaggggatgcccatcccctgataagctcccagtccttttggaagatttctttgaatgttaattgcattttcagttttgctcatttcccaccccaatgttttgtctgcaacatcgcttacactggattctttctatttttattcctatcattaaatggtagtgctgtaaattctgcaattaatgttaaataaactgctttaattcattg

SEQ ID NO: 150220 - DNA, 16122 bp, Artificial Sequence
  derived and/or modified sequence
gcccccgccgcccccgggccctgatggactgaatgaaggctgcctacaccgcctatcgatgcctcaccaaagacctagaaggctgcgccatgaacccggagctgacaatggaaagtctgggcactttgcacgggccggccggcggcggcagtggcgggggcggcggcgggggcggcgggggcggcggcgggggcccgggccatgagcaggagctgctggccagccccagcccccaccacgcgggccgcggcgccgctggctcgctgcggggccctccgccgcctccaaccgcgcaccaggagctgggcacggcggcagcggcggcagcggcggcgtcgcgctcggccatggtcaccagcatggcctcgatcctggacggcggcgactaccggcccgagctctccatcccgctgcaccacgccatgagcatgtcctgcgactcgtctccgcctggcatgggcatgagcaacacctacaccacgctgacaccgctccagccgctgccacccatctccaccgtgtctgacaagttccaccaccctcacccgcaccaccatccgcaccaccaccaccaccaccaccaccagcgcctgtccggcaacgtcagcggcagcttcaccctcatgcgcgacgagcgcgggctcccggccatgaacaacctctacagtccctacaaggagatgcccggcatgagccagagcctgtccccgctggccgccacgccgctgggcaacgggctaggcggcctccacaacgcgcagcagagtctgcccaactacggtccgccgggccacgacaaaatgctcagccccaacttcgacgcgcaccacactgccatgctgacccgcggtgagcaacacctgtcccgcggcctgggcaccccacctgcggccatgatgtcgcacctgaacggcctgcaccacccgggccacactcagtctcacgggccggtgctggcacccagtcgcgagcggccaccctcgtcctcatcgggctcgcaggtggccacgtcgggccagctggaagaaatcaacaccaaagaggtggcccagcgcatcacagcggagctgaagcgctacagtatcccccaggcgatctttgcgcagagggtgctgtgccggtctcaggggactctctccgacctgctccggaatccaaaaccgtggagtaaactcaaatctggcagggagaccttccgcaggatgtggaagtggcttcaggagcccgagttccagcgcatgtccgccttacgcctggcagcgtgcaaacgcaaagagcaagaaccaaacaaagacaggaacaattcccagaagaagtcccgcctggtgttcactgacctccaacgccgaacactcttcgccatcttcaaggagaacaaacgcccgtcaaaggagatgcagatcaccatttcccagcagctgggcctggagctcacaaccgtcagcaacttcttcatgaacgcccggcgccgcagcctggagaagtggcaagacgatctgagcacagggggctcctcgtccacctccagcacgtgtaccaaagcatgatggaaggactctcacttgggcacaagtcacctccaaatgaggacaacagataccaaaagaaaacaaaggaaaaagacaccggattcctagctggggcccttcactggtgatttgaaagcacaattctcttgcaaagaaacttatattctagctgtaatcataggccaggtgttcttcttttgtttttaatggctatggagtccaagtgcaagctgaaaaattaatctcttagaaccagacactgttctctgagcatgctaagcatcccagaaacccaaatggggccttcctggagcgagttaattccagtatggtgtcaaccaagctcgggattgcttaaaatatcatccatcccacttcaggtcctgtcagcttcttgcagtcagagttcctatgagtaacaataggagtttggcctatgtaaggactctgagtttaggcttccaagatacaacaataagagaagaatctagcaacgagaatgacctcatttgctttccacatgcttagcctcattataccatgttatgtccaagttcacagccacaacatcagaatggtaattactgagcacaagttttaaatatggacgttaaaaaaaaaaatccaaggacctgtttttccaacccagacatcttttcattgaatgatttagaaagctttaagttgatccagcttacaattttttttttctttacctcctggaaatctcatatggtcttggatccgtcaaaaaaaccagtcagttcacttgcgctcaaagtatcaagcacaacaaagataaacagaagtgaggaaggttctgggttcactacatctggattttcaagacacctattgtgaagtcattagggaattgatgagaatatggcttcaagcacattttgcagtttgctacaaattctgttgtacataatgcagacgcacactcaggaggccaatttaactgttaacagtgcatggagcgaatgcagcattttaaaagatctaggtttttttaggtcattaatgtgtccttggttgatcagtcatctggtccctcctactgtgtgttatgaccaccacgtaatccattctcgctctttctgatttggggtttttcctcatccatcccattagtagggatgttttctgtgttttctagcaagaaaaaaaaatcaatcaatcaaacctgcatacatgttactcatgactgtcatctagtcctaaatctcttctgttgttgaatcatccttgcaaaacagctgaatacatctggagaaaacacagcacaccaaagaagcagaatactgcaaaccaaagacatttatgacttgtcattttctagcctaaaaatactgtgattacttttagaaatcagaaaacctctgcaactccgaatggcattcagctcttgcatttggcgcatcatcgggctgagcggaccagctacaccaaggacattagccaagccacccagaggggtggctttgccacaccagttgtcaccttcccatagcaagtggaagagcgcccacagaactctgggagattgcaaaggtcacaatgtgcatatttaccagtgaatggccccgggtggggccacgtgggggtgttcaaagcaagccaaacgctgcaatcattctttacagacacttgagactgacttttttatgaattacttagtcgaaaccaaagaaactttttctgcacctacttctgcaacaaacaaaactgtcccattaaaatgaataaataaatccgtaaatcaatggaaatcaccaccaataagaaggaagcacgccagaaaataaacgaaaacaaaaacagggagacacactgtgttcaaacagacctcttgggacattttttggaagcagattttaaagaaagggttgagacaaagatagaaataaggaagagcctcagtggctgctgcttcatttgacaactcacacggtaatcttaaagctgaagattgtctttaatttgtgcctatgcagtttttcaaaagaacacggaacagagcaacagaaacctcaacagctacaataccaaagatgaggatttctcacaccttttgtttcagttcattatctcctcttgcctggctaaaatactaatagcgccattgaactgtataaaggtaatcaattatgtttctctgagcaacaaaaggaaagggccatttatttgattttattgtttcatttcaattttgtcttatggttttttgccccaacatggaatctctcaaaagtttccatggactccaagtttaagatgttgggatattgaacagttctctctgctcagcagagggtagggaataacattatcacttgaatgttctttgcttaacccttagacttggttccttctatgttcagagtctcatcatcaggggaaggaaagggagtgagggtcagggataggggtcttggtgatgcatcctctcccgagccacagaaccaaagagtttatagaggaatttacagcctcgttttcatgtgattgctacatcctaacagggcttcatttgggggtggggggaaacatgtaaaaataattgccagtttctacttttctattagctttttaaaaatcagctgtaaagttgcatttctaaagaaagatatatataatatataaaatacatatatagatcaacttgacattggtgataaccaaaattattgctgtccaaattcatgtcttgttttggtccagtgcttcatttgctaagtattcggttcagaatttttctcatttctcatgccattccagagttaatttgccactgtggatgatttgaagtattcagatctctatggaagtttctgggacaggtttaaagtcaagatcaagcattttagcatttaacctgttgataaatggatccatggtgtacatgagttttatttgtattcggagtcatctctattctatccctcagcctcgattaaggtggtgagtgaagtgcatccaacagactcggcccagaactgggtcctgacagtggggtgctcatcttctgtaactgttgggaaggctcggtggtccattttcaccagttaaagaatatgaggccagcccagaaatctgttctccaggagctgccctgtcccatctgggtgtgccagaccccctcagtgagcaggtccaccaaagggacttctcacaggggaagcccaactcctgttgcaatgggttgatagatttcctcagggtggtaattaccaattcgtattttgacaagcctatgtgcaaccacagctggcactggggtgggcagtggtgttgggtgggatgggggagagtgtctcaatcctgaagagaaaatataaagcaggttttggggagacttctggagtcctgcccctagagagccccattgttgttctttgtgccccctcctcattccccctatgtgggtctccctatgcaggagctgtgagagaatgtgactctccacaatttttataattcatccttcctaggagattgttcattggctcttcccttgtgtccctttgtcccttgctcatactccatgtttcctttgtcaaaggactaagaaaagagcatatttcagcagaggagtgttcccatgtgggttgatttcaacttgggtatttctaaaagagtccttgtgacatgtgtccagtggaaatggttgctcttttccagactggattgaggaatggagcctgtttgatttggttagtgattctttgacatactaatctcagcgtttgggtctccagcatcctctgaagatgtctagactagtagaggctgcctttgtgacctgacattacaacattggtcaaaccagtcctctgataatcagaagaacatgtcataattgtttaaaaaaaaaaaaaaggcaagaatttctctccaaggagctttaataaatgtctcattccagataatgtcataccagagaaaagtgcttgcttttagaaaattatttacatacatatataaatatatatgtgtatctatacagttatgtatcaaaattttaagccctgcagaatttcaatttgttagaaatctaacagaaaaaaatttctatattgaaaggtaatagaatttaacccagtgagtttactcaaggatttttaaatttaagttaataatttcagagaaaataaccatttgggtgtggttatagtttagtatccattacctcaatccaaggaaaattccaggcattcctcaaccatcaggaaaaggtacagtgtgaaggaacagttctcagccaaatttcacattcttgaggcaacagaaatcaaaacactcagagccattgagtggaaaaacaatttactttattcctttacacaaataggcttgcattgtttttgttttaatgtgattttggtactagggatataattatttcattccaggaaataataaaaaaaaacagacagagccaatacatttctttttttaaaggaaacagcaacaacaataaaaactcagcaccaatatttaaaagcttttccaaaatgtaaaagaagtgtttagcttgcaccatgcataaaggtgcaggctagttgaaccaggaagcatggcacttcctctggagaaatccagaaagagttgcttctaagctcccttttccccctgcaggctcttggcaattgtaggctttagcaaatccagaataattttcaattcaagctaaaataaaatcaacatttggaatgtaaatctgatacacacacacttttctaagtcaaacaacatatttcaaaaccaaaaataaataccttttagataatcagttattttctttgtctatactgggcacccacctactagtgccagtaaattcaagttgaacagatttttaaaatcactattatctgggtatgggggaaacttccccacttttgaaaatgttggtagaattataggaatgtctgtttgattatcattaccaaagtgtcatgacagtatgcctttgtagtgaactcggattttcaggagtttgaatagttggatattttaaaatctaagaagaaaaggcctgtttccaatgttgttgaagaataatgaactctattaaaaagtggagaaaaagataatacatgtggtcaaggttgaccacaaggcccaggcacaactaccttggcgataatcttctagattcgtaacaggttagagctgactttttgtttttgttgttgctgatgctgtgtgattcagacttctcagcctaaccaggaagagtaagtggaaatggtagatgaagaaggggtagagctggtgtatctataactttctgatatttgtctgccaaacttgatatattagtaatttttttatctttagctaagatcaagtcacccctgaaacaacaggagattctagttttaaaataaggccacaaaaatccttacggaatgaagaatggcaccccagttggttgtataagtctcataagataatgatgttgattttaaatatggatgtctcaatgcctgttttctatcaatgatttgtttgtttccaaggtcggggagggaaagaggggagggtttatctgttttagaaagtctcagaatacttataaaatacagaagtagttattaaaatatataggacctcacataggtagatacagaacttaccattgaggctgatgggctgttgtgtgaatcacacaggaccttaaatgaggctcattattctcacacaccaaaatgactctgacagcctgaagcagttattgctagagcccaagctttccttggaggttttggagttaggttgattggaagtaaccagctaataccttttctagtggagaaaaagacattgctaccagcttgttcatcccatagaagtcttccactctgctccatttttagcagcaagcatttcatgtagcataaaccttggcagataagtgtgcctaaggtttatacagtctgtccgcttggatgtatacaaatttagatacatattttaacatgtgttctcatagatgactttataacaacacacattacctataggtgtctagactgtgtacatacaagtgtgtacagacaagcttcatacgtatatactgtaatccgttacaacaaataaattttaaatcatcgtttaacatgtatgtggtacttctacagtgtacattgttttcattatttattgtaacattgaaaaccacagtgcagggaaaacaaaagtatcccagcatcttcatcctgtacacttggaattaatttcatttgggcatatccaagataaactcaactttcaagaaatcttgtatattatttaatcatctgtgttaggatgacacctatgattgatgacttcggttgaatagctttattctggatttttcataactaaagctaaatccaaagacctgaaaaaggacaaaaagaaaaaaaaaaaaagaaaaaacaaagaaaaagaagaaaaaataataaagtcaagcgcaaactgatggggagacagtgggctctggtttccaggattgagacaatggtactgcggtcttggggagactgcgttagctagtggggagtggtgatttttttcatgcttgtcacatctaaatggtctttaacatgagaaagttttagaggttataatttcctgctttgtttttatttagactatcaaatgaagttatacatgttgtcagtcaaaaaatgaagacaccctctgccccaccccacagaatgctttttatcttgtctctttgggttatgacccaacaagctaagtaccattaatgtaattaacttatttaaattagttcctagtacataaatgtataggatttgggtaattatttaatcatccttccttagtttgattctactccttgtacttatttatcaaaacctagaccaatggtgcatcagagatgcaaaattctacttggaatactcttgaagtttagtttgctttataaagcagtgaaattctgttacagacagggaagaaatacaggttacaaaaagagaatttgggatattcttccctcttaaattaacttttaaaatagtctaagtaacaatttttaaattatttaacttaagttcgcagccccacctggtaccaggcgaacttcacctcttaattattgtggccctcggagccttcatattgtaacttatttatttaacttattcagcatctgtgaaaggtgcactgtatagtttatatttttaatttaaaacaacagagagcactgcagtttgtttgctgtcagaacaacagagcaaattttgtggacaagcaatgactattcagcctgaacctgtgcattcagaaaacataagctgagaccctgcttcaccagcctggatttcggggcttctatacagaaactggaaaaataaattttaaaaaaatcgtaaacaaaaagagagaaacccttacactagctgcttccaagaatgaactctgtgtgtatgtaaagcaacaaaacaaaaaaggaaaaaaacaaaaagcagaaaaaagaaaaaaaaaatgaaaaactttctatttctagtgagaaccaaagaaggctacctcactgactttttccatttgtaattttaatcgtgttgatgacaccaaagataccaaagatttctttctctgtgcggtctgcattttgcttgtgctcttttataatttgaacgattttctctgacatatggtatgtacagccacagctcagataccccaaagaaataattatctatgcgacggcggctgctaatttggaaagggatattttctgtgtttctcttatatgtttgctgtctgctcgacatgttcaagatgcgagttcagatgctgctgtaattggattccttaaattctgattacaaattgaggaaggaaactggttggaaatggccttcagtcctagccatggcctctatccccgctgggacctgtcacagtaaagactgccaattactgaaccacagaagctctgaccattgagtagttgagctggaagagaccttaggaatcatttagtccaagccccggtggcccagaggaatgaaatagttatccaaatcaaataactcttgagagtgaaagcccacacatgcctcctggttcctgccccagtgctccgcttattgtacagtgctacctctgcatgagagcggtcccacattgacaaataggatggtggcaatcctttagcaatgagcagggactggggtttatctcttaacattttcagctgtaaaattagtcacaagcattttcagtgtcccattagtacatagtcacatatggtcggttgcttcgtgaaggtggcctgtcttgaaatactagggctcatacgggatttttgccctaggaaaaacatgttgatcccaatgatgtgatcacttttgaacctttccattacaaagcattgtatagataactttttaattcagtaggaggagaaagttcattcttggcctgttggctttgattattatgggtactttaaagtcagtatttatcaagaaagggaacttgaccaccattggcacatgtgacatttaagctcttcagccttttcctttttagttgtaggtgtttacatttcatttctaagccaactctgtatttatgagagaagtttaagccttacatcatttgatactaaagggttatttgtggtaaatgaaaaatgaccccaaaattacagaggaatatgccagtttaagaaatggctacttaaagttgcttctctctttccttcttactcatgaaattaattggtcttcttcaagtttctttagattccattaaatgattaaatcactattaagagccattcatcaacgtgatttgtgtgttagccaatgaatctgtctcagcttttgaccaaatgggttttagacaaatgcaaagatctgcctctagtccatatggctctttttgagtgctagtattttgcatttcacataatgtagttattttgagcttttaaagagagcatttagacaaagaagcaaagagaggaagggaccaatcaactcatcagttccatgcatcaacaaagcatagctagtagaggaatataaatgacagattgacaaactgtaggaaacactgttactctctttctgaagttttcaagcaccatcctatgtgaaagttccctcctgtccaaacaagctcaaggcccatcttctccctatacaaggcaaacctgtaaggccttccttccaaagagtacattgctttggttttcttcctaaattcctattggaattagaactctcagaatccctgggagacagagcaaagatgacttaattcattgagcagcagagctccctataagtgaacatcaccttccccatctttcctactgccacacccatacgagagaggatctagaaagagcgatggcagcctgaacacagaaaacatccccacttggcagacctctcctcagcaatccccccagcctcatgcttcacttgcaaagtgtgacataaccacgggacgagtgccttgcttgaaccaaagcaacgatttagccagtctggacctctctgtgctttttttaattcttcctgtgaatacctcagcttcaactgggcctccatacagtcagttggtgggcttattgtactgtggtgctttgcaatgcaaccctgcaaagaacaagatttgtactaataccaaaggttctttctctatgtctcctcctctgcctccctcgttcttcccttttttctagttcttcacggttccaaagctttactatgaacctgggcatgttggcaatgcagaccgcgcaattccttaccgaattttctcagatatacctcatagacaatagtgtttagagtaatgttattatagcgtatgtaataaattattcactgtttcttttggtaactgtgatttaaaaaaagaaaaaagaaaaaaaagctttatacgttttaggttgtgcttttgtaatagatgaaaaaaggtgcgcttaaaaagaaaatgtatgtttttttccccctttggattttatttatgctggattggggaaagttgcagaatgagcccaaagtttacagtttcatattttgctgaagaaacaatctgtgttcatttgctctgttgaaaagaataattattttctacatttgtgccacttggtctgaacaattaattgttccgtgttaacagtgtagtattatgattagcaactgccaatcagtgctataattttatgcatgaggctaaaaatttagcagtgtgatgcattgtggtcttaatagcaacatttttcattttgaactagatcttcccctttggttcaatggactttatttatgcatgggcgcctattgtttgttagcagttgtggaacagttgtgtatacattaaactgtgaaaatgtacacagttcagcctcagacggtggtaatattggttttattgggagatgtgtcacctcgaaaataccctttacatctgttgggatctgaaaatgagtcacattgaattgggttccagctttataatgagaaacgttattcctaatttttgagttagccaatttgcattccacaaattgggatcctcataacccaaatatatcaccgtatgtgagagggatttgaaagcgagtattgaaaaactcacctttgcatatttaatttccaccaaaaggagttattttggctttatgctcatgaacttagacctaactggccatgtatatgtagatgcaaattcatctagctgtggccctctttgatctctgcttgggaatggctatttttgactatgcgtggtttcttctcgtattttgtgatcaggtcagctcccagtagaaactcaaatggcatcaatattactaactcttctctgcccacttctcttttgtccactctcctagacattcccaccaactgttccagtgatttgggcaaaaatacgcagccatttcccaaaacttcacatgtgcagctatcatggctgtccctccctagacttggaggtgactctcacttaatttttacctgcccaacaatgttccatctaccatctaaaaggtaatataagaagaagttttgaaacccactttaggaaaaccatcttctttaaatccttcaattatctgaggcctctatatgtcaaaactatttttcagttgcaggggattgggcaaacttgttctttcttatacttgggttcaaagacccattctccagtttcatatttcccaaaccaaaatgcttgacataaagccaaatcaactgccaagcacactttattttgcataggagtatgcagcctagggaaccttggttgaaaagcagcagtctgctatgcaaaatattggaaatcactgacagtgtagcattcatattatctgtcaatgagggtatattgggaacgtgctctcgtgaataataaaaagcaacatatttttatttggccttataaattaggttgtggtaatgtaaactttgatatatagtctttttatttttctcttattaatctgccaaagatgggaacagatacaagaatttttcaaattggcttttgtaagacaattgatgattgtaatagtgtttaatcttccagaaagctttatatgttgttccacaataaaattgatatttgtttcagcaaagttttcctgacactcacaaacccacaaactgttcctcttaatgcagatattgtagaatctacaaagttcaaatccatttttgatccaaagaaagtagaggagtatttgagacatgagtgtacccagccctttttttaatcacaggcaatgcatgggtctggctggttacactttgccaagaagacttgtcttatgaaacccaaggtatattttgttatgccattttatgtccttttcttttaacattgtggaaagtggtatgttgaatcaagtgtaagctgagttttccagacaactgaagtagctacatcatgaatgttattttgttattaaagggtttttactcagtgctttgtgccaatggatgtccttttccttggagacacataactacaaaattacctcagcttggcctggttttctctcctgccctcttggggaaacatgggcctggcctgggaaaaggcaggtcatgggctggaaggtaggttttggtactaggaagaaatctctgtatctgtcagctttaaagagaactgggccaaaaatctctaacctcactctctctggactccaacacttccctgcaatcctttggtcttgagcatgtgccagcatgaaggcagactccagttcatacatgaaaggcaagaaaaagaaaatagtaaccttgaatcttctgtgggccaccaggcactcacctttccccaccttgcacactatccagtcaaggctattgcagcccatctggtggctttacatgggacattaccaaaggcttcttcctccatcctggggttgcaaaggatccaggtcccctccatccagtggggctcttccacatcagaagtccccctcccaccatcctctgcatcctgtttagctatcccatctataccttttggagatgattatttagaaaacaaagaaaggtatggaatggggtttcctattgtttgctaggttatattttagcaattctcaattctttgatctggaaaaatacaagagggaaaaggagaccccactatctccctgtgctttgctcccatctcagggggcaggggcagtgcacattgcctatgctgttgatctgtcttgggcgacaggctgaatcacagctattgccccagccaaaaacatggcccatcaatgcctactttatctctgcttgaaaatcctattcaaaaagttgtagagtttgaggtttttatccccccatatcctttgctttggtccagtttggcctttagcataagagtcagctttatctctaggaaagttttttcagattatgacaaggaacctgccacctgggaagaaaagagtccgaagactagcaatcggataggtagtcataccattaacagatacttccttgaaggtagaatattatttcctttctttacagttttgtgttacacaagtccaagtggtgccagcaaacttcttaccgtgaaatgttgtaaaacacctggcatactgaaatttctgaaacaaaaacacaagctccacattgataacttgataaataaccactaaagtttagatgcagggactgagatgatacaggcaaaatcttggtgttggtttctcttttaattcgtatcttcgatcacctaacctttctcaatccaagagcagttcagtcttttctccccaagtctaggatgccaaagagcatcataggaaaagataattagggattgaccagcatttcaattagttctcttcttcatctttgcatttctcaaaagtgttctcctggaccagagggaaagagctggtccattttttttcattctttctattcaaatttttccacccagacaatactttattaacacagatactgtagatccttccttggtcagtgaattattacaagaggagctatccttccaccaaagtgagtgaaaacaagttccagtatcttttcttccatccagttttgttctcagaatccaagtcagtcctgggtcttttctcactttagaccctggcctcagatgtgtttattcttgctatttaaaaatacctttaaatttcacatgctggcctgcagaacttgcatcctttgttctatactgttgactgcttgatggtattgaaaggtgactataatgagggaagaaaggaggaggtaaagagagaagaatttgtcccagatctgtttaaagtttcaaaatttaaaaagggacccattaaattatgggaaaatggctatagagtgtgagcctccgttgaccatatgctcaaagaccgtactctgccacctgccttccaggtagctattctagaaactcagtcctttgtggaaacccaactaccttttaaaagtctctttccagattccaaaaggacaagagatcagagagtcacatatacgcctcttgttttattttcttgctttcacgggtattattgccaagaaaatcgtagggaaaaactttaaacttttcttttcagttgatccctttgacatcacctctcatgtttaaaatcaggaaaacacacccctaaaatttgcactctcttccgttttgaaaaagaaaacccacacacaaatgcacactattaccgtctttcaccctgcgctatatttccaaagtgtattataatccagatattgccccatctcaaacatgttaagtcagactgtgctgaaagactttccagggacggtcaacagggtatatgttcagtggctgccctgaaatcctggtggggatgaggatcacgcttcatcatcaaggggatgcccatcccctgataagctcccagtccttttggaagatttctttgaatgttaattgcattttcagttttgctcatttcccaccccaatgttttgtctgcaacatcgcttacactggattctttctatttttattcctatcattaaatggtagtgctgtaaattctgcaattaatgttaaataaactgctttaattcattga

SEQ ID NO: 150221 - DNA, 1515 bp, Artificial Sequence
  derived and/or modified sequence
atgaaagcagcgtacacagcataccggtgtctgacaaaggacctagagggttgtgccatgaatcccgaactcaccatggagtcactcggtacattgcatggaccagctgggggaggatcgggtggcggtggaggcggaggcggaggaggcggaggagggggtccgggacacgaacaggagctgttggcgtccccgagtcctcatcacgcaggcagaggagctgccggtagcttacggggtcctcctccgcctcctacagcacatcaggaactcgggacggccgcagccgcagcagctgccgctagtcgttcagcaatggtcacgtcaatggcttctatcctggacggcggtgattaccggcctgagctgagtattcccctgcaccacgccatgtctatgtcgtgcgactccagtccacccggtatggggatgtcaaacacatataccactcttactcccttgcagcccctgccaccaatttctacagtctcagacaagttccatcatccccacccacaccatcacccacatcatcatcatcaccaccatcaccagagactcagcgggaatgtatctggatcctttacattgatgagagatgaacgcggattacccgcaatgaataacttgtacagtccatacaaggaaatgcccggaatgtctcaatctttgtcacctctcgccgcaacccccctaggcaatggcttgggaggcttgcacaacgcgcagcagtctctacccaactacgggccaccaggacatgacaaaatgctctcccctaattttgacgcccaccacacagcaatgctaaccaggggggagcagcatttgtctcgtggtctgggcacaccgcctgctgcaatgatgagtcatctcaacgggttgcatcacccgggacacacccagtcccatggaccagtgctagcacccagtagggaaaggccgccaagctcaagtagtggttcacaagtagccacctccggtcaattggaggaaatcaatacaaaggaagtcgctcaacgcattactgctgaactcaagagatactccattccacaagctatattcgctcaacgggtgctctgtaggagtcaaggaacgctgtcagatttactgcggaacccgaagccctggagtaaattgaagagcggcagagaaacatttcgtaggatgtggaaatggctccaagagcctgagttccagcgaatgtccgctctgagactcgcagcttgcaaacgaaaggagcaggagccaaacaaggaccggaacaatagtcagaagaagtcccggcttgtgtttacagacctgcagaggcgcaccctgttcgcgatcttcaaggagaataaaaggccatctaaagagatgcagatcaccatctcacagcagctcggactggagctgacgacagtctctaatttttttatgaacgccaggaggcggagtctggaaaaatggcaggacgatctgtctaccgggggtagtagcagtacgtcttccacgtgcacgaaagcctag

SEQ ID NO: 150222 - DNA, 1458 bp, Artificial Sequence
  derived and/or modified sequence
atgaaccccgaactgactatggaaagcttaggtaccctccatggcccagccggaggagggtccggagggggtggcggaggtggtgggggtggcggaggtggtgggcctggacatgaacaggaattactggccagtccctccccccaccacgctggcaggggagctgctgggagcctgcggggaccaccgcctccaccaactgcgcatcaggaacttggcacagccgctgccgcagctgcagccgcatcacgatcagccatggttaccagcatggcaagcatcctggacggcggtgattatcggccagaactcagcattcctctacaccatgccatgagtatgtcatgcgactccagtcccccagggatgggaatgtcaaatacatataccacccttacccccctccagcctctgccgccaatctccaccgtgagcgacaaatttcaccacccccacccccaccatcatccccaccaccaccaccatcaccaccaccagcggctctccggcaatgtctccggatcctttactcttatgagggacgagcggggactacccgcaatgaataacctgtattcaccctacaaagagatgcccggaatgtctcagtcattgtcccccctcgctgcaaccccactgggaaacggtctgggtggtctgcacaacgcccaacagtcactgccgaattacggacccccagggcatgataagatgctctcgccaaatttcgatgcccatcatacggcaatgttgacgagaggagagcagcaccttagtaggggtttgggaactcccccagctgccatgatgtcccatttgaatggtttacaccatcccggtcacacgcagagccatggaccagtcttggctcccagcagagaaagacccccaagctcctcttctgggtctcaggtcgccaccagcggccagctggaagagatcaacacaaaggaggttgcacagagaatcaccgctgagctgaaacgatattcgatcccacaggccatcttcgcccagagggtcctctgccgatcccaaggcacactgagcgatttgctgcgaaatccgaaaccgtggtccaagttaaagtcaggcagagaaacctttaggcggatgtggaagtggctccaagaacccgaattccagagaatgtctgcgcttcggctggcagcatgcaaacgcaaagagcaagaaccaaataaagaccggaataattctcagaagaaaagcaggctcgtctttaccgatctccagaggagaactttgttcgcaatcttcaaggaaaataagcgcccttctaaggagatgcagatcaccatcagtcagcaactagggcttgaattaacgaccgtgagtaatttctttatgaacgcgcgaagaaggtcactggagaagtggcaggacgacttgtccacgggagggtcgagcagcacgtccagcacctgtaccaaggcatag

SEQ ID NO: 150223 - DNA, 1515 bp, Artificial Sequence
  derived and/or modified sequence
atgaaggccgcctacaccgcctacagatgcctgaccaaggacctggagggctgcgccatgaaccccgagctgaccatggagagcctgggcaccctgcacggccccgccggcggcggcagcggcggcggcggcggcggcggcggcggcggcggcggcggcggccccggccacgagcaggagctgctggccagccccagcccccaccacgccggcagaggcgccgccggcagcctgagaggccccccccccccccccaccgcccaccaggagctgggcaccgccgccgccgccgccgccgccgccagcagaagcgccatggtgaccagcatggccagcatcctggacggcggcgactacagacccgagctgagcatccccctgcaccacgccatgagcatgagctgcgacagcagcccccccggcatgggcatgagcaacacctacaccaccctgacccccctgcagcccctgccccccatcagcaccgtgagcgacaagttccaccacccccacccccaccaccacccccaccaccaccaccaccaccaccaccagagactgagcggcaacgtgagcggcagcttcaccctgatgagagacgagagaggcctgcccgccatgaacaacctgtacagcccctacaaggagatgcccggcatgagccagagcctgagccccctggccgccacccccctgggcaacggcctgggcggcctgcacaacgcccagcagagcctgcccaactacggcccccccggccacgacaagatgctgagccccaacttcgacgcccaccacaccgccatgctgaccagaggcgagcagcacctgagcagaggcctgggcaccccccccgccgccatgatgagccacctgaacggcctgcaccaccccggccacacccagagccacggccccgtgctggcccccagcagagagagaccccccagcagcagcagcggcagccaggtggccaccagcggccagctggaggagatcaacaccaaggaggtggcccagagaatcaccgccgagctgaagagatacagcatcccccaggccatcttcgcccagagagtgctgtgcagaagccagggcaccctgagcgacctgctgagaaaccccaagccctggagcaagctgaagagcggcagagagaccttcagaagaatgtggaagtggctgcaggagcccgagttccagagaatgagcgccctgagactggccgcctgcaagagaaaggagcaggagcccaacaaggacagaaacaacagccagaagaagagcagactggtgttcaccgacctgcagagaagaaccctgttcgccatcttcaaggagaacaagagacccagcaaggagatgcagatcaccatcagccagcagctgggcctggagctgaccaccgtgagcaacttcttcatgaacgccagaagaagaagcctggagaagtggcaggacgacctgagcaccggcggcagcagcagcaccagcagcacctgcaccaaggcctag

SEQ ID NO: 150224 - DNA, 1458 bp, Artificial Sequence
  derived and/or modified sequence
atgaaccccgagctgaccatggagagcctgggcaccctgcacggccccgccggcggcggcagcggcggcggcggcggcggcggcggcggcggcggcggcggcggccccggccacgagcaggagctgctggccagccccagcccccaccacgccggcagaggcgccgccggcagcctgagaggccccccccccccccccaccgcccaccaggagctgggcaccgccgccgccgccgccgccgccgccagcagaagcgccatggtgaccagcatggccagcatcctggacggcggcgactacagacccgagctgagcatccccctgcaccacgccatgagcatgagctgcgacagcagcccccccggcatgggcatgagcaacacctacaccaccctgacccccctgcagcccctgccccccatcagcaccgtgagcgacaagttccaccacccccacccccaccaccacccccaccaccaccaccaccaccaccaccagagactgagcggcaacgtgagcggcagcttcaccctgatgagagacgagagaggcctgcccgccatgaacaacctgtacagcccctacaaggagatgcccggcatgagccagagcctgagccccctggccgccacccccctgggcaacggcctgggcggcctgcacaacgcccagcagagcctgcccaactacggcccccccggccacgacaagatgctgagccccaacttcgacgcccaccacaccgccatgctgaccagaggcgagcagcacctgagcagaggcctgggcaccccccccgccgccatgatgagccacctgaacggcctgcaccaccccggccacacccagagccacggccccgtgctggcccccagcagagagagaccccccagcagcagcagcggcagccaggtggccaccagcggccagctggaggagatcaacaccaaggaggtggcccagagaatcaccgccgagctgaagagatacagcatcccccaggccatcttcgcccagagagtgctgtgcagaagccagggcaccctgagcgacctgctgagaaaccccaagccctggagcaagctgaagagcggcagagagaccttcagaagaatgtggaagtggctgcaggagcccgagttccagagaatgagcgccctgagactggccgcctgcaagagaaaggagcaggagcccaacaaggacagaaacaacagccagaagaagagcagactggtgttcaccgacctgcagagaagaaccctgttcgccatcttcaaggagaacaagagacccagcaaggagatgcagatcaccatcagccagcagctgggcctggagctgaccaccgtgagcaacttcttcatgaacgccagaagaagaagcctggagaagtggcaggacgacctgagcaccggcggcagcagcagcaccagcagcacctgcaccaaggcctag

SEQ ID NO: 150225 - protein, 236 aa, Artificial Sequence
  derived and/or modified sequence
MAPDPWFSTYDSTCQIAQEIAEKIQQRNQYERKGEKAPKLTVTIRALLQNLKEKIALLKDLLLRAVSTHQITQLEGDRRQNLLDDLVTRERLLLASFKNEGAEPDLIRSSLMSEEAKRGAPNPWLFEEPEETRGLGFDEIRQQQQKIIQEQDAGLDALSSIISRQKQMGQEIGNELDEQNEIIDDLANLVENTDEKLRNETRRVNMVDRKSASCGMIMVILLLLVAIVVVAVWPTN

SEQ ID NO: 150226 - DNA, 711 bp, Artificial Sequence
  derived and/or modified sequence
atggcccccgacccctggttcagcacctacgacagcacctgccagatcgcccaggagatcgccgagaagatccagcagagaaaccagtacgagagaaagggcgagaaggcccccaagctgaccgtgaccatcagagccctgctgcagaacctgaaggagaagatcgccctgctgaaggacctgctgctgagagccgtgagcacccaccagatcacccagctggagggcgacagaagacagaacctgctggacgacctggtgaccagagagagactgctgctggccagcttcaagaacgagggcgccgagcccgacctgatcagaagcagcctgatgagcgaggaggccaagagaggcgcccccaacccctggctgttcgaggagcccgaggagaccagaggcctgggcttcgacgagatcagacagcagcagcagaagatcatccaggagcaggacgccggcctggacgccctgagcagcatcatcagcagacagaagcagatgggccaggagatcggcaacgagctggacgagcagaacgagatcatcgacgacctggccaacctggtggagaacaccgacgagaagctgagaaacgagaccagaagagtgaacatggtggacagaaagagcgccagctgcggcatgatcatggtgatcctgctgctgctggtggccatcgtggtggtggccgtgtggcccaccaactag

SEQ ID NO: 150227 - DNA, 711 bp, Artificial Sequence
  derived and/or modified sequence
atggcccccgacccctggttttccacatatgacagtacctgtcagatcgctcaggaaattgcagagaagatccagcaacgtaatcagtacgagcgaaagggcgagaaagcacctaagctgactgtgaccattcgggccctgctgcagaatctgaaggaaaaaattgcgcttctgaaagacttactcctgcgagcagttagcacacaccaaataacccagctcgagggggaccgacgacaaaaccttctcgatgacctagttaccagggagcgattactactggcaagtttcaaaaatgagggggccgagccagatctgattcggtcttctctcatgagtgaggaggccaaaagaggggcgcccaatccctggctattcgaagagccagaggagacgagaggcctcggttttgacgagatccggcagcaacagcagaaaattattcaagagcaggacgctggtctggacgccttgtcttccatcatcagcagacagaagcagatgggccaggagatcggaaacgaattagatgaacagaatgaaattatcgatgatctggcgaacctagtggagaatactgatgagaagctgagaaacgagacccgaagggtcaacatggtcgacaggaagtccgcctcttgcggtatgatcatggtcattcttcttctgctcgtggctatcgtggtggtcgctgtttggcctaccaactag

SEQ ID NO: 150228 - DNA, 711 bp, Artificial Sequence
  derived and/or modified sequence
atggccccagacccctggttcagcacctatgacagcacctgccagatcgcccaggagattgctgagaagatccagcagaggaaccagtatgaaagaaaaggagagaaggcccccaagctgactgtgaccatccgggccctgctgcagaacctgaaggagaagatcgccctgctgaaggacctgctgctgcgggctgtgtccacccaccagatcacccagctggagggggaccggcggcagaacctgctggatgacctggtgacccgggagcggctgctgctggccagcttcaagaatgaaggagctgagccagacctgatccgcagcagcctgatgtctgaggaggccaagagaggagcccccaacccctggctgtttgaggagcctgaggagacccggggcctgggctttgatgagatccggcagcagcagcagaagatcatccaggagcaggatgctggcctggatgccctgagcagcatcatcagccggcagaagcagatgggccaggagattggaaatgagctggatgagcagaatgagatcattgatgacctggccaacctggtggagaacacagatgagaagctgagaaatgagacccggcgggtgaacatggtggacaggaagagcgccagctgtggcatgatcatggtgatcctgctgctgctggtggccatcgtggtggtggccgtgtggcccaccaactag

SEQ ID NO: 150229 - DNA, 711 bp, Artificial Sequence
  derived and/or modified sequence
atggcccccgacccctggttcagcacctacgacagcacctgccagattgcgcaggagattgcagagaaaattcaacagcggaaccaatatgagcgcaaaggggagaaggctcccaaacttacagtgaccattcgggccttgctgcagaatctgaaggagaaaattgccctgttgaaggacctcctgctccgagctgtcagtactcatcagatcacgcagcttgagggcgataggcggcaaaatctcctcgacgatctcgtcacgagagagcgtctgttgctggcctcctttaaaaatgagggggctgagcctgacctcatccggagttccctgatgtccgaggaggccaagcgcggtgcccccaacccctggttgtttgaagagccggaggagacccggggactcggttttgacgagatccgtcagcagcagcagaagatcatccaggagcaagatgcaggcttagacgccttaagctcaattatctctagacagaagcagatgggtcaggaaattggaaatgaactcgacgagcaaaatgaaatcatcgacgatctggccaatcttgtggagaacaccgatgagaaactgaggaatgaaacccgccgagtaaacatggttgatagaaagtcggcatcatgcggaatgattatggtgattcttctgttgctggtggccatcgtggtcgtcgctgtgtggcccaccaactag

SEQ ID NO: 150230 - DNA, 711 bp, Artificial Sequence
  derived and/or modified sequence
atggcgcctgatccctggttcagtacgtatgactctacatgtcagatcgctcaggaaatcgctgagaaaatacagcagcgcaaccagtatgagcggaagggggaaaaggccccaaagctaactgtgacaatccgagcactgctgcagaatctcaaagaaaaaatcgcactgttgaaagaccttctgctgcgtgccgtgagtacccatcagatcacacagttggaaggggaccgccgacagaatctgctggacgacctggttactcgcgaacggctcctgctggcctctttcaagaatgagggagcagaacctgacctgatcaggtcctcactgatgtcggaagaagcaaagagaggcgctcccaacccttggctctttgaagagcccgaagagacgcgcggactgggcttcgatgagattcggcagcaacagcagaaaattatacaggaacaggacgccggactggacgcattaagcagcataatatccagacagaagcaaatggggcaggagataggcaatgagttggacgagcagaatgaaattatcgatgacctggccaacctcgtggagaacacagatgagaagttgcgaaacgagactcggagagtgaacatggtggacagaaagagtgcttcttgcggaatgatcatggtcatcttgttactcctggtggcaattgtcgtcgtcgccgtctggcccacaaactag

SEQ ID NO: 150231 - DNA, 967 bp, Artificial Sequence
  derived and/or modified sequence
ctgattatagttctgaggccctagctactcactttgcaaactccaggctccggtcgcgcacgggacgaactgcggggagtgagccgcgcgggccgccgtagtcagctgctaagagcaggaagagtccgagcggcgggcggagtctgcaggatggcaccggacccctggttctccacatacgattctacttgtcaaattgcccaagaaattgctgagaaaattcaacaacgaaatcaatatgaaagaaaaggtgaaaaggcaccaaagcttaccgtgacaatcagagctttgttgcagaacctgaaggaaaagatcgcccttttgaaggacttattgctaagagctgtgtcaacacatcagataacacagcttgaaggggaccgaagacagaacctcttggatgatcttgtaactcgagagagactacttctggcatcctttaagaatgagggtgccgaaccagatctaatcaggtccagcctgatgagtgaagaggctaagcgaggagcacccaacccttggctctttgaggagccagaggagaccagaggcttgggttttgatgaaatccggcaacagcagcagaaaattatccaagaacaggacgcaggccttgatgccctttcctctatcataagtcgccaaaaacaaatggggcaggaaattgggaatgaattggatgaacaaaatgagataattgacgaccttgccaacctagtggagaacacagatgaaaaacttcgcaatgaaaccaggcgggtaaacatggtggacagaaagtcagcctcttgtgggatgatcatggtgattttactgctgcttgtggctatcgtggttgttgcagtctggccgaccaactgatggcagtaaagagaccaccagcagtgacacctgccaatgacagatgcaagcccaacacccttttggtacgcaaaacctgctctcaataaattcccccaaagctctg

SEQ ID NO: 150232 - protein, 356 aa, Artificial Sequence
  derived and/or modified sequence
MHHQWLLLAACFWVIFMFMVASKFITLTFKDPDVYSAKQEFLFLTTMPEVRKLPEEKHIPEELKPTGKELPDSQLVQPLVYMERLELIRNVCRDDALKNLSHTPVSKFVLDRIFVCDKHKILFCQTPKVGNTQWKKVLIVLNGAFSSIEEIPENVVHDHEKNGLPRLSSFSDAEIQKRLKTYFKFFIVRDPFERLISAFKDKFVHNPRFEPWYRHEIAPGIIRKYRRNRTETRGIQFEDFVRYLGDPNHRWLDLQFGDHIIHWVTYVELCAPCEIMYSVIGHHETLEDDAPYILKEAGIDHLVSYPTIPPGITVYNRTKVEHYFLGISKRDIRRLYARFEGDFKLFGYQKPDFLLN

SEQ ID NO: 150233 - protein, 141 aa, Artificial Sequence
  derived and/or modified sequence
MHHQWLLLAACFWVIFMFMVASKFITLTFKDPDVYSAKQEFLFLTTMPEVRKLPEEKHIPEELKPTGKELPDSQLVQPLVYMERLELIRNVCRDDALKNLSHTPVSKFVLDRIFVCDKHKILFCQTPKVGNTQWKKVLIVL

SEQ ID NO: 150234 - protein, 64 aa, Artificial Sequence
  derived and/or modified sequence
MHHQWLLLAACFWVIFMFMVASKFITLTFKDPDVYSAKQEFLFLTTMPEVRKLPEEKHIPEELK

SEQ ID NO: 150235 - protein, 133 aa, Artificial Sequence
  derived and/or modified sequence
MHHQWLLLAACFWVIFMFMVASKFITLTFKDPDVYSAKQEFLFLTTMPEVRKLPEEKHIPEELKPTGKELPDSQLVQPLVYMERLELIRNVCRDDALKNLSHTPVSKFVLDRIFVCDKHKILFCQTPKVGNTQ

SEQ ID NO: 150236 - protein, 85 aa, Artificial Sequence
  derived and/or modified sequence
MHHQWLLLAACFWVIFMFMVASKFITLTFKDPDVYSAKQEFLFLTTMPEVRKLPEEKHIPEELKPTGKELPDSQLVQPLVYMERL

SEQ ID NO: 150237 - protein, 33 aa, Artificial Sequence
  derived and/or modified sequence
MHHQWLLLAACFWVIFMFMVASKFITLTFKDPD

SEQ ID NO: 150238 - protein, 404 aa, Artificial Sequence
  derived and/or modified sequence
MQRKAGKKEHVQLRDKRNQEPQFRGNTARKCEPQAAEGRVSEWLRCDNMHHQWLLLAACFWVIFMFMVASKFITLTFKDPDVYSAKQEFLFLTTMPEVRKLPEEKHIPEELKPTGKELPDSQLVQPLVYMERLELIRNVCRDDALKNLSHTPVSKFVLDRIFVCDKHKILFCQTPKVGNTQWKKVLIVLNGAFSSIEEIPENVVHDHEKNGLPRLSSFSDAEIQKRLKTYFKFFIVRDPFERLISAFKDKFVHNPRFEPWYRHEIAPGIIRKYRRNRTETRGIQFEDFVRYLGDPNHRWLDLQFGDHIIHWVTYVELCAPCEIMYSVIGHHETLEDDAPYILKEAGIDHLVSYPTIPPGITVYNRTKVEHYFLGISKRDIRRLYARFEGDFKLFGYQKPDFLLN

SEQ ID NO: 150239 - DNA, 1071 bp, Artificial Sequence
  derived and/or modified sequence
atgcatcatcaatggttgctgctggcagcttgcttttgggtgatatttatgttcatggtagcaagcaagtttatcaccctgacgtttaaggaccccgacgtgtactccgcaaaacaagagtttctgttcttgacaacgatgcctgaggttagaaagttacccgaggaaaagcacatacctgaagaactgaaacccacaggcaaggaactgccagatagtcagctcgttcagcctctggtgtatatggaacgactggagttgatccggaacgtgtgccgcgacgacgccttaaaaaacctgagtcatacccctgtcagcaaattcgtgctggaccgtatcttcgtgtgtgataaacataaaatcttgttttgtcagactcccaaggtgggtaacactcaatggaaaaaggtgctcatcgtgctcaacggggccttcagttcaatagaggaaatccctgagaatgtggtgcatgatcatgagaaaaacggcctgccaagactcagttcctttagcgatgctgagatccaaaagcggctgaagacttacttcaagttctttatagtacgtgacccctttgaacggctgatatcggcattcaaggacaagtttgttcataatccccggttcgagccctggtacagacacgagatagccccagggattattcgcaagtatcgccggaacaggacggaaacacggggaatacagtttgaagactttgttcgctatttgggggacccgaatcatcgctggttggatcttcagttcggcgatcatatcatccactgggtaacctatgtagaactgtgtgcaccatgtgagatcatgtattccgtaataggacatcacgagaccctcgaagatgacgctccatacatcctgaaggaggccggcatagaccatctggttagttaccccacaatccctcccggcatcactgtttacaatcgcaccaaagttgagcattacttccttggcatctccaaacgggatatccggagattgtacgcgcggttcgaaggggatttcaagctcttcggctatcagaagccggatttccttctgaattag

SEQ ID NO: 150240 - DNA, 426 bp, Artificial Sequence
  derived and/or modified sequence
atgcatcaccagtggctcctgctggcagcatgtttctgggttatctttatgtttatggtagcctctaaatttatcactttgacctttaaagatcccgacgtctattcagcgaaacaggaattccttttcctgactacaatgcccgaggtccggaagttgccagaggaaaaacacataccagaagaattaaaacccaccgggaaagagctccctgatagccagctggtgcaacccctggtttatatggaacggcttgagctcatccgaaacgtttgcagagacgatgctctcaagaacctgtcacacacacctgtgtcaaagtttgtcctggatcgaatcttcgtctgcgacaaacataaaatcctgttctgccagacgcccaaagtcggtaacacacagtggaaaaaagtgctaattgtgctctag

SEQ ID NO: 150241 - DNA, 1071 bp, Artificial Sequence
  derived and/or modified sequence
atgcatcaccagtggctgctgctggctgcgtgtttctgggtgatcttcatgttcatggtagctagcaagtttatcaccctcactttcaaggacccagatgtgtactccgcaaaacaagaatttctgtttctgacaactatgccagaggttcggaagctgcctgaagagaagcacatacccgaagagctaaagcctacgggcaaggagctccctgacagtcaactagttcagcctctcgtttatatggaaaggctcgaactgatcagaaatgtgtgtcgggacgatgccctgaagaatctgagccacacacctgtgtccaagtttgtgctggacaggatatttgtgtgtgacaagcataagatcctattttgtcagacacccaaggtgggcaacacgcagtggaagaaggtcttaattgtcctgaacggagctttttcgtcaatcgaggagattcctgagaacgttgtgcatgaccacgagaagaatggacttcctcgcctatcttcattctcagacgccgaaattcagaagagactgaagacgtactttaagtttttcatcgtgcgggaccccttcgagcgacttattagtgctttcaaagacaagtttgttcacaatccacgattcgagccatggtatagacatgagatcgcccctggcattattcggaaatatcggaggaaccgaacagagaccaggggcattcagttcgaggatttcgttagataccttggcgaccctaatcacagatggctggatctgcaattcggcgatcacatcatccactgggtcacatacgtggaactctgtgccccatgcgagattatgtatagtgttattggccatcacgagactctagaggacgacgcaccatatatcttgaaggaggccggtatcgatcatctcgtctcttatccaaccatccctccaggtattacagtctacaaccggactaaagtggaacactattttctgggcatttcaaagcgggacatcagacgactatacgcaaggtttgaaggagacttcaagctgtttggatatcagaagcccgattttcttttaaattag

SEQ ID NO: 150242 - DNA, 195 bp, Artificial Sequence
  derived and/or modified sequence
atgcatcaccagtggttgttgctggctgcttgtttttgggttatattcatgttcatggtggcctcaaaattcattacacttacattcaaagaccctgatgtctattctgctaaacaggagtttctgtttttgaccacaatgccagaggttcgcaaactgcctgaggagaagcatatccctgaagagctgaagtag

SEQ ID NO: 150243 - DNA, 402 bp, Artificial Sequence
  derived and/or modified sequence
atgcatcaccaatggttgctcctcgccgcatgtttctgggtgattttcatgtttatggtggcatccaagtttatcactctgacattcaaagatccagacgtctactccgctaagcaggagttcctttttctgaccactatgcctgaggtgaggaaactacccgaggagaaacacataccagaggagctgaaacctacaggcaaagagcttccagatagtcaattggtccaacccctcgtctatatggagaggctcgagctaatccgaaatgtctgtcgcgacgacgctctcaaaaacctgtcgcatacacccgtttctaagtttgtccttgatcgaatctttgtctgcgataagcacaaaatcctgttctgccagacacctaaagtgggtaacacccagtag

SEQ ID NO: 150244 - DNA, 258 bp, Artificial Sequence
  derived and/or modified sequence
atgcaccaccagtggctgttattggctgcctgtttctgggttatctttatgttcatggttgcctctaagttcatcactctgaccttcaaagaccccgacgtctacagtgccaaacaggaattcctgtttctcacgacaatgccggaggttcgaaagcttcctgaggaaaaacatatcccggaggaacttaagcccaccggaaaggagctgcccgattcccaactcgtgcagcctctcgtttacatggaacggctatag

SEQ ID NO: 150245 - DNA, 102 bp, Artificial Sequence
  derived and/or modified sequence
atgcaccaccagtggctgctactggcagcgtgtttctgggtcatcttcatgttcatggtagcctcaaagtttattaccctcacttttaaggaccccgactag

SEQ ID NO: 150246 - DNA, 1215 bp, Artificial Sequence
  derived and/or modified sequence
atgcagagaaaagcaggcaaaaaagagcatgtgcagctacgagataagcggaaccaggaaccacagttcagaggcaacactgcccgaaagtgtgagccacaggccgcagagggtcgcgtgtccgagtggttacgctgcgataatatgcaccatcagtggttgctccttgccgcctgcttttgggtcatctttatgtttatggtggctagtaagttcataaccttgacttttaaggaccccgatgtctactcagctaagcaggaattcctattcctgacaacaatgcccgaggtgaggaaactcccagaggaaaagcacatcccagaggagttaaaacccacaggaaaggaactgcctgattcccagctcgtgcaaccattagtctatatggagcgcctggagttaattcgaaacgtgtgcagagatgatgccctgaagaacctaagccacactccagtgagcaagttcgttcttgatagaatctttgtgtgcgacaagcacaaaattcttttttgccagacaccaaaggttggcaacacacaatggaagaaggtactgatcgtactgaacggagcgttctcctcaattgaggagatccccgagaatgtggtgcacgaccatgagaaaaacggtctgcctcgcctctctagtttcagtgacgcggaaatccagaagcgtctgaaaacctactttaaatttttcatagtgagggacccctttgaacgactgataagcgcatttaaggataagtttgtccacaaccccaggttcgaaccgtggtatcggcacgagattgcacctggtattatcaggaaatacagaaggaacagaacggagaccaggggcatacagttcgaggactttgtcaggtatttaggtgaccccaaccaccggtggctcgacctccagtttggagatcacatcattcattgggtcacatacgtagagttatgcgcaccctgtgaaatcatgtacagcgtcatcgggcaccatgagaccctggaagacgacgcaccatacatccttaaagaagcaggaatcgaccacctcgtgtcttatccaacaatcccacccggaatcacagtttacaataggactaaggttgaacactatttcctgggcatcagtaagcgcgatattagacggttgtacgcacgctttgagggagacttcaagctttttggctatcagaagcctgacttcctcctgaactag

SEQ ID NO: 150247 - DNA, 1071 bp, Artificial Sequence
  derived and/or modified sequence
atgcaccaccagtggctgctgctggccgcctgcttctgggtgatcttcatgttcatggtggccagcaagttcatcaccctgaccttcaaggaccctgatgtgtacagcgccaagcaggagttcctgttcctgaccaccatgcctgaggtgaggaagctgcctgaggagaagcacatccctgaggagctgaagcccaccgggaaggagctgcctgacagccagctggtgcagcccctggtgtacatggagcggctggagctgatcagaaatgtgtgcagagatgatgccctgaagaacctgagccacacccctgtgtccaagtttgtgctggaccgcatctttgtgtgtgacaagcacaagatcctcttctgccagacccccaaggtgggcaacacccagtggaagaaggtgctgattgtgctgaatggagccttcagcagcattgaggagatcccagaaaatgtggtgcatgaccacgagaagaatggcctgccccggctgagcagcttcagtgatgctgagatccagaagaggctgaagacctacttcaagttcttcatcgtgcgggacccctttgagcggctcatcagcgccttcaaggacaagtttgtgcacaaccccaggtttgagccctggtacagacatgaaattgcccctggcatcatcaggaagtacagaagaaacagaacagagacccggggcatccagtttgaggactttgtgcgctacctgggggaccccaaccaccgctggctggacctgcagtttggagaccacatcatccactgggtgacctacgtggagctgtgtgccccctgtgagatcatgtacagcgtcatcggccaccacgagaccctggaggatgatgccccctacatcctgaaggaggccggcatcgaccacctggtgtcctaccccaccatccccccaggcatcaccgtgtacaacagaaccaaggtggagcactacttcctgggcatcagcaagagggacatccggcggctgtatgccaggtttgaaggagacttcaagctgtttggctaccagaagccagacttcctgctgaactag

SEQ ID NO: 150248 - DNA, 426 bp, Artificial Sequence
  derived and/or modified sequence
atgcaccaccagtggctgctgctggccgcctgcttctgggtgatcttcatgttcatggtggccagcaagttcatcaccctgaccttcaaggaccctgatgtgtacagcgccaagcaggagttcctgttcctgaccaccatgcctgaggtgaggaagctgcctgaggagaagcacatccctgaggagctgaagcccaccgggaaggagctgcctgacagccagctggtgcagcccctggtgtacatggagcggctggagctgatcagaaatgtgtgcagagatgatgccctgaagaacctgagccacacccctgtgtccaagtttgtgctggaccgcatctttgtgtgtgacaagcacaagatcctcttctgccagacccccaaggtgggcaacacccagtggaagaaggtgctgattgtgctgtag

SEQ ID NO: 150249 - DNA, 195 bp, Artificial Sequence
  derived and/or modified sequence
atgcaccaccagtggctgctgctggccgcctgcttctgggtgatcttcatgttcatggtggccagcaagttcatcaccctgaccttcaaggaccctgatgtgtacagcgccaagcaggagttcctgttcctgaccaccatgcctgaggtgaggaagctgcctgaggagaagcacatccctgaggagctgaagtag

SEQ ID NO: 150250 - DNA, 402 bp, Artificial Sequence
  derived and/or modified sequence
atgcaccaccagtggctgctgctggccgcctgcttctgggtgatcttcatgttcatggtggccagcaagttcatcaccctgaccttcaaggaccctgatgtgtacagcgccaagcaggagttcctgttcctgaccaccatgcctgaggtgaggaagctgcctgaggagaagcacatccctgaggagctgaagcccaccgggaaggagctgcctgacagccagctggtgcagcccctggtgtacatggagcggctggagctgatcagaaatgtgtgcagagatgatgccctgaagaacctgagccacacccctgtgtccaagtttgtgctggaccgcatctttgtgtgtgacaagcacaagatcctcttctgccagacccccaaggtgggcaacacccagtag

SEQ ID NO: 150251 - DNA, 258 bp, Artificial Sequence
  derived and/or modified sequence
atgcaccaccagtggctgctgctggccgcctgcttctgggtgatcttcatgttcatggtggccagcaagttcatcaccctgaccttcaaggaccctgatgtgtacagcgccaagcaggagttcctgttcctgaccaccatgcctgaggtgaggaagctgcctgaggagaagcacatccctgaggagctgaagcccaccgggaaggagctgcctgacagccagctggtgcagcccctggtgtacatggagcggctgtag

SEQ ID NO: 150252 - DNA, 102 bp, Artificial Sequence
  derived and/or modified sequence
atgcaccaccagtggctgctgctggccgcctgcttctgggtgatcttcatgttcatggtggccagcaagttcatcaccctgaccttcaaggaccctgactag

SEQ ID NO: 150253 - DNA, 1215 bp, Artificial Sequence
  derived and/or modified sequence
atgcagaggaaggccggcaagaaggagcacgtgcagctgcgggacaagaggaaccaggagccccagttccggggcaacacagccaggaaatgtgagccccaggccgctgagggccgggtgtctgagtggctgcgctgtgacaacatgcaccaccagtggctgctgctggccgcctgcttctgggtgatcttcatgttcatggtggccagcaagttcatcaccctgaccttcaaggaccctgatgtgtacagcgccaagcaggagttcctgttcctgaccaccatgcctgaggtgaggaagctgcctgaggagaagcacatccctgaggagctgaagcccaccgggaaggagctgcctgacagccagctggtgcagcccctggtgtacatggagcggctggagctgatcagaaatgtgtgcagagatgatgccctgaagaacctgagccacacccctgtgtccaagtttgtgctggaccgcatctttgtgtgtgacaagcacaagatcctcttctgccagacccccaaggtgggcaacacccagtggaagaaggtgctgattgtgctgaatggagccttcagcagcattgaggagatcccagaaaatgtggtgcatgaccacgagaagaatggcctgccccggctgagcagcttcagtgatgctgagatccagaagaggctgaagacctacttcaagttcttcatcgtgcgggacccctttgagcggctcatcagcgccttcaaggacaagtttgtgcacaaccccaggtttgagccctggtacagacatgaaattgcccctggcatcatcaggaagtacagaagaaacagaacagagacccggggcatccagtttgaggactttgtgcgctacctgggggaccccaaccaccgctggctggacctgcagtttggagaccacatcatccactgggtgacctacgtggagctgtgtgccccctgtgagatcatgtacagcgtcatcggccaccacgagaccctggaggatgatgccccctacatcctgaaggaggccggcatcgaccacctggtgtcctaccccaccatccccccaggcatcaccgtgtacaacagaaccaaggtggagcactacttcctgggcatcagcaagagggacatccggcggctgtatgccaggtttgaaggagacttcaagctgtttggctaccagaagccagacttcctgctgaactag

SEQ ID NO: 150254 - DNA, 1071 bp, Artificial Sequence
  derived and/or modified sequence
atgcaccaccagtggctgctgctggccgcctgcttctgggtgatctttatgtttatggtcgcttcaaagtttatcacgctgactttcaaagacccggacgtttatagcgctaagcaggaatttctctttctgacaaccatgcctgaagtacggaagctgccagaagagaaacacattccggaagagctgaagcccacaggcaaggagcttcccgacagccagctcgtgcagccattagtgtacatggagcgcctggaactgataaggaacgtctgtcgagacgacgctctgaagaatttgtcacacacaccagtcagtaaatttgtgctggatcggattttcgtctgtgacaaacataagatattgttttgccagacccccaaagttggaaacacacaatggaagaaagtgctgattgtgctgaatggggctttctcatctatcgaagaaattcctgagaacgtcgtgcacgaccatgaaaagaacgggctccctcgattaagcagtttctccgatgctgaaattcagaaaaggctcaagacatactttaaattcttcatagtccgagaccccttcgagcgcctgatcagcgccttcaaggacaagtttgtgcataacccaaggttcgagccctggtatcgccacgaaatcgcaccaggcataatccgcaagtaccggcgcaataggaccgaaaccagagggatccaattcgaagatttcgtcaggtacctcggcgaccccaaccaccgttggctcgatctgcaattcggtgaccacattatccactgggtgacatatgtggagctttgtgctccctgtgaaatcatgtacagcgtaattggtcatcacgagacactggaagacgacgccccttatattcttaaggaagccggcatagatcatctcgtatcgtacccaaccattccacctggaatcactgtgtataacagaaccaaggtcgagcactatttcctgggtattagcaaaagggacattcgacgtctgtacgcccgatttgaaggcgactttaagctgttcggctaccaaaagcccgacttcttgctgaactag

SEQ ID NO: 150255 - DNA, 426 bp, Artificial Sequence
  derived and/or modified sequence
atgcaccaccagtggctgctgctggccgcctgcttctgggtgatcttcatgtttatggtggcgagcaagttcattaccctaacctttaaggaccccgacgtgtattcagcaaagcaggagttcctgtttctcactacgatgcccgaggtgagaaaactgcctgaggaaaaacacatcccggaggaattaaaacccaccgggaaggagctgcccgatagccaactggtgcagccactcgtttacatggagcggttagaactcattcgcaatgtgtgtagagatgatgcactgaaaaatctgtctcatacccctgtgtccaagttcgtcctggaccggatcttcgtctgtgataaacataagatcctgttctgtcagacccccaaggtaggcaatacgcagtggaaaaaggtgctcatcgtcttatag

SEQ ID NO: 150256 - DNA, 1071 bp, Artificial Sequence
  derived and/or modified sequence
atgcaccaccagtggctgctgctggccgcctgcttctgggtgatcttcatgtttatggtggcctccaagttcattactttgaccttcaaggatcctgatgtgtattccgcaaaacaggaattcctgttcttgactaccatgccggaagttcgcaagttgccggaggagaaacacattcctgaggaactgaaaccaaccgggaaagaattacccgatagccaactcgtccagccactggtttatatggaacggttggagctgatccggaacgtttgcagggatgatgcgctgaaaaatctgagccataccccggtaagcaagtttgtgctggacaggatctttgtgtgcgacaagcacaaaatcctgttttgccaaacccccaaggtggggaacacccagtggaaaaaagttctcatcgtattaaatggcgccttttcttcaattgaagagatcccagagaatgtagtgcacgatcatgaaaagaatggacttccacgtctgagctcattcagcgacgccgaaatccagaagagactgaaaacctacttcaagtttttcatcgtccgggatccttttgagcggcttatctctgccttcaaagataagttcgttcataaccctcgatttgagccttggtatagacatgagatcgcaccaggtattattcggaagtaccgacggaaccgcaccgaaactcgtggaatacagttcgaggacttcgttcgttatcttggtgatcccaaccaccgatggcttgacctgcaattcggcgaccacatcatccattgggtaacctacgtcgagctgtgtgctccctgcgagatcatgtacagcgttattgggcatcatgagactctagaggatgacgcaccttacatccttaaagaggctggcattgatcacctcgtctcatatccaacaataccaccaggaatcactgtctacaacaggaccaaagtcgagcactatttcctgggcatctccaaacgagatattcgtcgcctatacgccaggtttgagggggatttcaaactttttgggtatcagaaacctgattttctgctcaactag

SEQ ID NO: 150257 - DNA, 195 bp, Artificial Sequence
  derived and/or modified sequence
atgcaccaccagtggctgctgctggccgcctgcttctgggtgatcttcatgtttatggtagctagtaaatttatcactctcacctttaaggatcccgatgtgtattccgcaaagcaggagttcctttttttgaccactatgcccgaggtgaggaaacttcctgaggaaaagcacatccccgaggagctgaagtag

SEQ ID NO: 150258 - DNA, 402 bp, Artificial Sequence
  derived and/or modified sequence
atgcaccaccagtggctgctgctggccgcctgcttctgggtgatctttatgttcatggtggctagcaaattcattaccctcacatttaaggacccggatgtttacagtgccaaacaagagttcctgtttctgactacaatgccagaggtacgcaaactgcctgaggagaagcacatacccgaagaacttaagccgaccggaaaagaactaccggattcacagctggtgcaaccgttggtgtatatggagcggcttgaactcattagaaacgtgtgcagagacgatgccctgaagaatttgtcacatactcctgtgtccaagttcgttcttgaccgaatctttgtgtgtgacaaacacaaaattctgttctgccagacgccaaaagttgggaatacacagtag

SEQ ID NO: 150259 - DNA, 258 bp, Artificial Sequence
  derived and/or modified sequence
atgcaccaccagtggctgctgctggccgcctgcttctgggtgatcttcatgtttatggtcgcatctaaattcattacgttaacatttaaggaccctgatgtgtatagcgctaagcaggagttcctgtttctgactacgatgcctgaagtgcgaaaactcccagaagaaaagcatatcccagaggaactgaaacctacgggcaaagaactgcccgacagtcagctcgtccagcccctggtgtatatggagcgtctatag

SEQ ID NO: 150260 - DNA, 102 bp, Artificial Sequence
  derived and/or modified sequence
atgcaccaccagtggctgctgctggccgcctgcttctgggtgatctttatgttcatggtcgccagcaagttcatcaccctgacctttaaggatcccgactag

SEQ ID NO: 150261 - DNA, 1215 bp, Artificial Sequence
  derived and/or modified sequence
atgcagcggaaggccggcaagaaggagcacgtgcagctgcgggacaagaggaatcaggagccacagtttagagggaatacagcaagaaaatgtgagccccaagcggccgaaggaagagttagtgaatggctacgctgtgacaatatgcaccatcaatggcttctattggccgcatgcttttgggtcatctttatgttcatggttgccagtaaattcataactctcactttcaaggacccagatgtttatagcgccaaacaggagtttctgtttcttacaaccatgccggaagtccggaaactgcctgaggagaaacacatcccggaagagcttaagcccaccggtaaagaactgccagactcacagctggttcagccccttgtgtacatggagcggctggaactcatcaggaacgtatgtcgtgatgacgctttgaagaatttgagtcatacacccgtctcaaagttcgtgctggatcgaatttttgtgtgcgacaagcataagatactattctgccagacaccgaaggtcggcaacacccagtggaagaaggtgctcatcgttctgaacggagccttttcgagtatagaagaaattcccgaaaacgtcgtgcatgatcatgagaaaaacggattgcctcggttatccagcttcagcgatgcggagattcagaaacgcctcaagacttactttaaattctttatcgtgcgtgacccgttcgaacgcctcataagcgcatttaaagacaagttcgtccacaaccccagattcgaaccctggtaccggcacgaaatcgctcccgggattattcgaaagtatagaaggaataggaccgaaaccaggggtatacagttcgaagactttgtcagatatttaggtgatcctaaccatcggtggctcgatctgcagtttggggatcatattattcactgggtgacttatgttgaattatgcgcaccttgtgaaattatgtacagcgtgattgggcatcacgagactttggaggacgatgctccatacatcctgaaggaggctggcattgaccacctcgtttcttaccctacaatcccccctggcatcacagtttacaatagaacaaaagtcgagcattacttcctgggaattagtaagagagacattaggcggttatatgcccggtttgagggagatttcaagctgtttggatatcagaaaccagactttctgctgaattag

SEQ ID NO: 150262 - DNA, 1071 bp, Artificial Sequence
  derived and/or modified sequence
atgcaccatcagtggctgctgctggccgcatgtttctgggtgatattcatgttcatggtggcctctaaattcattaccctgacgtttaaagatcctgatgtttactctgccaagcaggaatttttgtttctgactaccatgcccgaggtcagaaaattgccagaagaaaaacacatacctgaagagctgaaaccaacaggaaaggagctcccagactctcagttggttcagcccctggtctacatggagcgcctggagttgattcgaaatgtatgtcgcgatgacgcgttgaagaatttatctcacacccctgtctctaaattcgtcctcgatcggatctttgtatgtgacaagcataagatacttttttgtcagacacccaaagttggtaacacacaatggaagaaagttctgatcgttcttaacggggctttttctagcattgaggagatccctgagaatgtggttcatgaccatgagaagaatggactccccaggctcagctctttttctgatgcagagatccagaagcgcttgaaaacctactttaaattttttattgtccgagatccattcgaacgattaattagcgcctttaaggacaagttcgtgcacaaccccagatttgagccctggtatcgccatgagatcgcgccaggtatcatcaggaaatatagacgcaacagaaccgagacccgcggaattcagtttgaagacttcgttaggtacctgggagaccccaatcatcggtggctggatctgcagtttggtgatcatataattcattgggtgacttatgtggagctgtgcgctccctgtgagataatgtacagcgtgattggacatcacgaaaccctggaggatgacgctccttacatcttgaaagaagctggcatcgatcacctcgtttcataccccacaatacccccaggaatcacagtctacaaccgcacaaaagtggagcattactttctgggcatttctaagagagacatccgccgactgtacgcacgcttcgaaggcgatttcaaactgtttggctatcagaaaccagactttttgctgaactag

SEQ ID NO: 150263 - DNA, 426 bp, Artificial Sequence
  derived and/or modified sequence
atgcatcatcagtggctcctgttagccgcttgcttctgggttatattcatgtttatggtggcaagcaagttcataacgctaacttttaaggatccagacgtttacagtgcaaaacaggagttccttttcctcacaaccatgccggaggtccggaaattacccgaggagaaacatatccccgaagagttaaagccaacgggtaaagaacttcctgacagtcagcttgtacaacctctcgtgtacatggagcgcctggaactgataaggaatgtatgccgcgatgacgccttgaagaacctcagccacaccccagtctcaaaatttgtgctagaccggatcttcgtatgtgataaacataagatcctgttttgtcagacgcctaaagtgggcaacactcagtggaagaaggtactgatagtcctgtag

SEQ ID NO: 150264 - DNA, 1071 bp, Artificial Sequence
  derived and/or modified sequence
atgcatcaccagtggctgcttttggcagcatgcttttgggtgatttttatgtttatggttgcctccaaattcattactttaacgttcaaggatccagatgtctactccgccaaacaggagttcctctttctcacgactatgcctgaggttcggaagctcccagaagagaagcacataccagaagaactgaagcctacaggcaaggaattacccgatagtcagctggtgcagcctcttgtgtacatggaacggctggaactgattaggaacgtgtgtcgtgatgatgcactgaaaaatctgtcacataccccggtgtcaaaatttgtcttggataggattttcgtctgcgacaagcacaagatcctgttctgccagacccccaaggttggcaatactcagtggaaaaaagttctgatagtgctgaacggggctttctcctccattgaagaaataccggaaaatgtggtgcacgaccatgagaaaaatggcctaccacgcttaagcagtttcagtgacgcagaaatccagaaaaggctgaagacatattttaagttcttcatcgtgagagacccatttgagcgccttatctccgcctttaaggataagttcgtgcataatccacgttttgagccatggtaccggcatgagatcgcgccaggcatcatacgaaaataccggcgtaaccgaaccgagactaggggaatccaattcgaagacttcgtgcgttacctgggtgatcctaaccatcggtggctggacttacagttcggtgaccacataatacactgggtcacctacgtggagttgtgtgcaccctgcgagattatgtattcagttattggccaccatgagacattggaggatgatgccccttatattctcaaagaggctggcatcgatcatctcgtatcatatcccacgatcccccctgggatcacagtgtacaataggaccaaggttgagcactactttctgggcatatctaagcgcgatatccgcagactttacgcacgatttgagggggatttcaagctttttggttaccagaagcccgatttcctgttaaactag

SEQ ID NO: 150265 - DNA, 195 bp, Artificial Sequence
  derived and/or modified sequence
atgcatcaccagtggttgcttttggccgcttgcttttgggtgatttttatgttcatggttgcaagcaaatttatcacccttacatttaaagaccccgatgtctactcggcgaagcaggagttcttattcctgacaacaatgcctgaagtgagaaagcttccggaggagaagcacatcccggaagagctcaagtag

SEQ ID NO: 150266 - DNA, 402 bp, Artificial Sequence
  derived and/or modified sequence
atgcatcaccaatggttgttgttggccgcatgtttttgggtgatcttcatgttcatggtggcctccaagtttattacactgaccttcaaagaccctgatgtgtattcggccaaacaggaatttctcttcctcactaccatgccagaagttcggaagctccccgaggagaagcacattcctgaggagttaaagccgaccgggaaggagttgcctgattctcagctggtccaaccgctggtgtatatggaacggttggaactcataagaaacgtatgccgcgacgacgctcttaaaaaccttagccacactccagtgtccaagtttgtgcttgacaggatcttcgtctgcgataagcacaagatcctgttttgtcagacaccaaaagtgggcaatacccaatag

SEQ ID NO: 150267 - DNA, 258 bp, Artificial Sequence
  derived and/or modified sequence
atgcaccaccagtggctgctgttggccgcatgtttttgggtgatatttatgtttatggtagcttctaagttcattacacttacttttaaggaccctgacgtgtatagcgcgaaacaggaattcctcttcttgaccaccatgcccgaggtgcggaaactgccggaagagaagcacatccctgaggaactgaagccgacagggaaggagcttcctgactcacaactggtgcagcccttggtatacatggagcgcttatag

SEQ ID NO: 150268 - DNA, 102 bp, Artificial Sequence
  derived and/or modified sequence
atgcaccaccaatggcttttgttagcagcttgtttttgggtcattttcatgtttatggtggcctccaaattcattaccctgacttttaaggatcctgattag

SEQ ID NO: 150269 - DNA, 1215 bp, Artificial Sequence
  derived and/or modified sequence
atgcagagaaaagccggaaagaaggagcacgtacagctccgcgataagaggaaccaggagccacagtttaggggcaacaccgccagaaagtgtgagcctcaggcggcagaaggaagagtcagtgagtggctgcggtgcgacaacatgcaccaccagtggcttttgctggcagcttgtttttgggtcatctttatgttcatggtcgccagcaaatttataacgctgaccttcaaggaccccgatgtttactccgcaaaacaggagttcctgttcttaactaccatgcccgaggtgcgaaaactgccagaagaaaaacacatcccagaagaattaaaaccgactggaaaagagctgcctgacagccagctggtacagccccttgtgtacatggagaggctggagctcatccgcaacgtttgcagagacgacgcattgaagaatctgtcccacacgccagtgagcaagtttgtgctggaccggattttcgtatgcgacaaacacaaaatcctcttctgccagacccccaaggttggcaacacccagtggaaaaaggtactcatcgtgctcaatggtgctttctctagcatagaagagatccctgaaaacgtggtgcatgaccatgagaaaaatggcctcccacgcttatcctccttcagcgatgctgaaatccagaagcgcttgaagacatacttcaaattcttcatcgttcgcgatccctttgagcgcttgatctcggcttttaaagacaaatttgttcacaacccccgatttgaaccatggtaccggcacgagatagcccctgggattattcgcaagtatcggcgtaatcgcaccgagacacgtgggatacaatttgaggatttcgtccgctacctcggcgaccccaatcatcgatggctcgatctgcagttcggagaccacataattcattgggttacctatgtggaactttgtgcaccctgtgagatcatgtacagtgttattggccaccacgagaccttggaagatgatgcaccctatatattaaaagaggcgggtatcgatcatctcgttagctaccccaccatccctccgggtattacagtgtataatagaaccaaagttgagcattactttcttggcatatcgaagagggacattcggagactctacgcccgttttgagggggacttcaagttgtttggctaccagaagccagattttctcttaaattag

SEQ ID NO: 150270 - DNA, 2837 bp, Artificial Sequence
  derived and/or modified sequence
cggccggataggcgcgagggggccgcgtgaggcggtgccggcgttctggcccccaaagccggtctagcgcgccgggcgtcttccttacttccgctgccgccgccgccacatcccgggacccgacgggccgcggcgcggaggcctcggggcaaggtggggcgggcctcccgagctcccaggaccccgcgcgcttcgcccacaggcccggcgaagcccgacccgcgcggcgcccccagggccaggggaggagcctaaggacccggacgagcgccgctccagtaggtgacaagaggaaccaagaacctcagttcaggggaaacacagcaaggaaatgtgagccccaggctgcagaaggaagagtcagtgaatggctgcggtgtgacaacatgcaccaccagtggcttctgctggccgcatgcttttgggtgattttcatgttcatggtggctagcaagttcatcacgttgacctttaaagacccagatgtgtacagtgccaaacaggagtttctgttcctgacaaccatgccggaagtgaggaagttgccagaagagaagcacattcctgaggaactgaagccaactgggaaggagcttccagacagccagctcgttcagcccctggtctacatggagcgcctggaactcatcagaaacgtctgcagggatgatgccctgaagaatctctcgcacactcctgtctccaagtttgtcctggaccgaatatttgtctgtgacaagcacaagattcttttctgccagactcccaaagtgggcaacacccagtggaagaaagtgctgattgttctaaatggagcattttcttccattgaggagatccccgaaaacgtggtgcacgaccacgagaagaacggccttcctcggctctcttccttcagtgatgcagaaattcagaagcgattgaaaacatacttcaagttttttattgtaagagatcccttcgaaagacttatttctgcatttaaggataaatttgttcacaatccccggtttgagccttggtacaggcatgagattgctcctggcatcatcagaaaatacaggaggaaccggacagagacccgggggatccagtttgaagatttcgtgcgctacctcggcgatccgaaccacagatggctagaccttcagtttggggaccacatcattcactgggtgacgtatgtagagctctgtgctccctgtgagataatgtacagtgtgattggacaccacgagaccctggaggacgatgccccatacatcttaaaagaggctggcattgaccacctggtgtcatacccgactatccctccgggcattaccgtgtataacagaaccaaggtggagcactatttcctgggcatcagcaaacgagacatccgacgcctgtatgcccgtttcgaaggggactttaagctctttgggtaccagaaaccagactttttgctaaactaatgcataagacctatgaattcaaatatctttattagacctggggctaaccaggtgaagatctgagcccagaaatgacccttcctccaccacacccctcctttgaggacgcccggggtctcccacaggcctgtgagttgcctcggcatatgacgcagaaccccaactgttacaacttagtttggatgtaagatgctctgaggaccctgcccacacccctgcgtgcattaggatgtcgctggcctttgctcacctcagaggggagaaaaggctaaagatttgcagtttgacagcccagcagggaggaagcatcacacagcgttaggagccgtttccttcaggtgttaaggaaggggatgcccctgaggttctcctggctagtcagggtggcttcacccatcactggtgggttgcaggaacagcacccaggactctgaggagggacagagaagcaagggggctgctgaaatcgcagagacttttgcagcatcagatctgaggagtaaaacggcacctctggccttcatcttggtgctgcgacaattgtggaggcaaagcattctttctgtgactattttgttcctgtagacagtcagcgatggccagagggtggtgtggtgtccaggggtccatctttccagaatccatgcctgtgtaatgctggtccatgcttctgaacctgtgtctgccaagcgcctatttcattcagcacaagacatacgattttagaaggtgaggggaggggaggctttttctacctgagaaggggagtgtctttgagggccttaaaaggaccatggcccaggaatgggggcgctggttgggcttggagctcaggctgctgtggatcccggcgcatcagttctgacttgccttacctgggtggacagcagtgaatctccacctgtcttctccagggagctcccatgttggggctgaagacgagcaggggcaacctgccagcatcacagaattcagtgtagtttatacatttcgattcctttcatctcagcaaaatgggcactgccagagccatttctgatcacaccaccatcctggaccatgtgactggaaggtgggtaaccaagttcaccagcaataaaacccagcgcccaggtagcctccagcagtgcggcttcctggcaacaaggtaggccctggtgcagggcaagccgcagcgaccatttcagataccgtccacagccaggaccgctgagaactgggacagtttcctgggatgagtgccagcctgagcctgcatggtgccgccgagcccggggtggaggagggagccaggcttcgcttcaaggcggcctctaccttttctcagaatggtttcctgattgtgtcaatgtgaaagttaaataaaatttatgtgccaaa

SEQ ID NO: 150271 - DNA, 604 bp, Artificial Sequence
  derived and/or modified sequence
tgggcccctctccccgccgcggggcgcacggaaaaaccggggaacccgcgggttttgtcctggcgagccacatcccgtgacaagaggaaccaagaacctcagttcaggggaaacacagcaaggaaatgtgagccccaggctgcagaaggaagagtcagtgaatggctgcggtgtgacaacatgcaccaccagtggcttctgctggccgcatgcttttgggtgattttcatgttcatggtggctagcaagttcatcacgttgacctttaaagacccagatgtgtacagtgccaaacaggagtttctgttcctgacaaccatgccggaagtgaggaagttgccagaagagaagcacattcctgaggaactgaagccaactgggaaggagcttccagacagccagctcgttcagcccctggtctacatggagcgcctggaactcatcagaaacgtctgcagggatgatgccctgaagaatctctcgcacactcctgtctccaagtttgtcctggaccgaatatttgtctgtgacaagcacaagattcttttctgccagactcccaaagtgggcaacacccagtggaagaaagtgctgattgttctaa

SEQ ID NO: 150272 - DNA, 1338 bp, Artificial Sequence
  derived and/or modified sequence
aagaaggagcatgtgcagcttcggtgcgaggggagtcaggggtgggaatgcacgttccctgcctgaggggccccggggtgccctgagcctctgatcttcgctgtcaggaggcctgtccgaagttggaggttgaggcatgcagttctgcacttctggctgggaagtgacaagaggaaccaagaacctcagttcaggggaaacacagcaaggaaatgtgagccccaggctgcagaaggaagagtcagtgaatggctgcggtgtgacaacatgcaccaccagtggcttctgctggccgcatgcttttgggtgattttcatgttcatggtggctagcaagttcatcacgttgacctttaaagacccagatgtgtacagtgccaaacaggagtttctgttcctgacaaccatgccggaagtgaggaagttgccagaagagaagcacattcctgaggaactgaagccaactgggaaggagcttccagacagccagctcgttcagcccctggtctacatggagcgcctggaactcatcagaaacgtctgcagggatgatgccctgaagaatctctcgcacactcctgtctccaagtttgtcctggaccgaatatttgtctgtgacaagcacaagattcttttctgccagactcccaaagtgggcaacacccagtggaagaaagtgctgattgttctaaatggagcattttcttccattgaggagatccccgaaaacgtggtgcacgaccacgagaagaacggccttcctcggctctcttccttcagtgatgcagaaattcagaagcgattgaaaacatacttcaagttttttattgtaagagatcccttcgaaagacttatttctgcatttaaggataaatttgttcacaatccccggtttgagccttggtacaggcatgagattgctcctggcatcatcagaaaatacaggaggaaccggacagagacccgggggatccagtttgaagatttcgtgcgctacctcggcgatccgaaccacagatggctagaccttcagtttggggaccacatcattcactgggtgacgtatgtagagctctgtgctccctgtgagataatgtacagtgtgattggacaccacgagaccctggaggacgatgccccatacatcttaaaagaggctggcattgaccacctggtgtcatacccgactatccctccgggcattaccgtgtataacagaaccaaggtggagcactatttcctgggcatcagcaaacgagacatccgacgcctgtatgcccgtttcgaaggggactttaagctctttgggtaccagaaaccagactttttgctaaactaa

SEQ ID NO: 150273 - DNA, 692 bp, Artificial Sequence
  derived and/or modified sequence
gggtgggtttcagcgcctgggcccctctccccgccgcggggcgcacggaaaaaccggggaacccgcgggttttgtcctggcgagccacatcccgtgactgggttaaaatgaaaagacacaaagagagaagtggtcttttcccttccctccccattataattaagagcttagtccatcttggctcagaattggaattcagaattcagaattgctcttgaccctgaagaatagaatctcaaagaaatacctgagcagaaaattctcttcttcgctgaaatgaaaattggagtgtttgcaaaactgaacaaagaaaggaaagaatttgtaaacatcacaggcaacttgcagttatattcggatcatttttcagtgtttgaggagttcatacaataaaaagtgacaagaggaaccaagaacctcagttcaggggaaacacagcaaggaaatgtgagccccaggctgcagaaggaagagtcagtgaatggctgcggtgtgacaacatgcaccaccagtggcttctgctggccgcatgcttttgggtgattttcatgttcatggtggctagcaagttcatcacgttgacctttaaagacccagatgtgtacagtgccaaacaggagtttctgttcctgacaaccatgccggaagtgaggaagttgccagaagagaagcacattcctgaggaactgaag

SEQ ID NO: 150274 - DNA, 574 bp, Artificial Sequence
  derived and/or modified sequence
actatctaggtttatgtaagaacgctctgatgtttgcagaagaacatcgcctaacgatacatttctcagaagtgacaagaggaaccaagaacctcagttcaggggaaacacagcaaggaaatgtgagccccaggctgcagaaggaagagtcagtgaatggctgcggtgtgacaacatgcaccaccagtggcttctgctggccgcatgcttttgggtgattttcatgttcatggtggctagcaagttcatcacgttgacctttaaagacccagatgtgtacagtgccaaacaggagtttctgttcctgacaaccatgccggaagtgaggaagttgccagaagagaagcacattcctgaggaactgaagccaactgggaaggagcttccagacagccagctcgttcagcccctggtctacatggagcgcctggaactcatcagaaacgtctgcagggatgatgccctgaagaatctctcgcacactcctgtctccaagtttgtcctggaccgaatatttgtctgtgacaagcacaagattcttttctgccagactcccaaagtgggcaacacccag

SEQ ID NO: 150275 - DNA, 559 bp, Artificial Sequence
  derived and/or modified sequence
agcgcctgggcccctctccccgccgcggggcgcacggaaaaaccggggaacccgcgggttttgtcctggcgagccacatcccgtgacaagaggaaccaagaacctcagttcaggggaaacacagcaaggaaatgtgagccccaggctgcagaagaccctactgtcgcattaatttctggcaaccacactgagaaaggtgtagattaagctggaaaatcacgaagagtgccaagggattggtcagtttttactgggggtctgcaccaggccaggaagagtcagtgaatggctgcggtgtgacaacatgcaccaccagtggcttctgctggccgcatgcttttgggtgattttcatgttcatggtggctagcaagttcatcacgttgacctttaaagacccagatgtgtacagtgccaaacaggagtttctgttcctgacaaccatgccggaagtgaggaagttgccagaagagaagcacattcctgaggaactgaagccaactgggaaggagcttccagacagccagctcgttcagcccctggtctacatggagcgcctg

SEQ ID NO: 150276 - DNA, 673 bp, Artificial Sequence
  derived and/or modified sequence
agtagggtgagctcggggacgcgcaggcgggtgggtttcagcgcctgggcccctctccccgccgcggggcgcacggaaaaaccggggaacccgcgggttttgtcctggcgagccacatcccgatggagagaggaagaaagggttcagcttgggtccaaggagcatgcagaggaaggcagggaagaaggagcatgtgcagcttcggtgcgaggggagtcaggggtgggaatgcacgttccctgcctgaggggccccggggtgccctgagcctctgatcttcgctgtcaggaggcctgtccgaagttggaggttgaggcatgcagttctgcacttctggctgggaaggtgaaccaggttttccaaaatgtcatttttgctttccaagtctgcaaggcaggaaagggttgggcagtgaatggaaagtagtgcagccaggttctggttagctcagcggcaggactgtcataacgtgacaagaggaaccaagaacctcagttcaggggaaacacagcaaggaaatgtgagccccaggctgcagaaggaagagtcagtgaatggctgcggtgtgacaacatgcaccaccagtggcttctgctggccgcatgcttttgggtgattttcatgttcatggtggctagcaagttcatcacgttgacctttaaagacccagatg

SEQ ID NO: 150277 - DNA, 1476 bp, Artificial Sequence
  derived and/or modified sequence
atgcaataagaaggcgtccttgtgcgggatgctgtgacccgcggaattattgatattgtgcgagcctacaatttacttctttcatccttggctgagaatttgcgtttgtaattgtagatggagagaggaagaaagggttcagcttgggtccaaggagcatgcagaggaaggcagggaagaaggagcatgtgcagcttcgtgacaagaggaaccaagaacctcagttcaggggaaacacagcaaggaaatgtgagccccaggctgcagaaggaagagtcagtgaatggctgcggtgtgacaacatgcaccaccagtggcttctgctggccgcatgcttttgggtgattttcatgttcatggtggctagcaagttcatcacgttgacctttaaagacccagatgtgtacagtgccaaacaggagtttctgttcctgacaaccatgccggaagtgaggaagttgccagaagagaagcacattcctgaggaactgaagccaactgggaaggagcttccagacagccagctcgttcagcccctggtctacatggagcgcctggaactcatcagaaacgtctgcagggatgatgccctgaagaatctctcgcacactcctgtctccaagtttgtcctggaccgaatatttgtctgtgacaagcacaagattcttttctgccagactcccaaagtgggcaacacccagtggaagaaagtgctgattgttctaaatggagcattttcttccattgaggagatccccgaaaacgtggtgcacgaccacgagaagaacggccttcctcggctctcttccttcagtgatgcagaaattcagaagcgattgaaaacatacttcaagttttttattgtaagagatcccttcgaaagacttatttctgcatttaaggataaatttgttcacaatccccggtttgagccttggtacaggcatgagattgctcctggcatcatcagaaaatacaggaggaaccggacagagacccgggggatccagtttgaagatttcgtgcgctacctcggcgatccgaaccacagatggctagaccttcagtttggggaccacatcattcactgggtgacgtatgtagagctctgtgctccctgtgagataatgtacagtgtgattggacaccacgagaccctggaggacgatgccccatacatcttaaaagaggctggcattgaccacctggtgtcatacccgactatccctccgggcattaccgtgtataacagaaccaaggtggagcactatttcctgggcatcagcaaacgagacatccgacgcctgtatgcccgtttcgaaggggactttaagctctttgggtaccagaaaccagactttttgctaaactaatgcataagacctatgaattcaaatatctttattagacctggggctaaccaggtgaagatctgagcccagaaatgacccttcctccaccacacccctcctttga

SEQ ID NO: 150278 - DNA, 1071 bp, Artificial Sequence
  derived and/or modified sequence
atgcaccaccagtggctgctgctggccgcctgcttctgggtgatcttcatgttcatggtggccagcaagttcatcaccctgaccttcaaggaccccgacgtgtacagcgccaagcaggagttcctgttcctgaccaccatgcccgaggtgagaaagctgcccgaggagaagcacatccccgaggagctgaagcccaccggcaaggagctgcccgacagccagctggtgcagcccctggtgtacatggagagactggagctgatcagaaacgtgtgcagagacgacgccctgaagaacctgagccacacccccgtgagcaagttcgtgctggacagaatcttcgtgtgcgacaagcacaagatcctgttctgccagacccccaaggtgggcaacacccagtggaagaaggtgctgatcgtgctgaacggcgccttcagcagcatcgaggagatccccgagaacgtggtgcacgaccacgagaagaacggcctgcccagactgagcagcttcagcgacgccgagatccagaagagactgaagacctacttcaagttcttcatcgtgagagaccccttcgagagactgatcagcgccttcaaggacaagttcgtgcacaaccccagattcgagccctggtacagacacgagatcgcccccggcatcatcagaaagtacagaagaaacagaaccgagaccagaggcatccagttcgaggacttcgtgagatacctgggcgaccccaaccacagatggctggacctgcagttcggcgaccacatcatccactgggtgacctacgtggagctgtgcgccccctgcgagatcatgtacagcgtgatcggccaccacgagaccctggaggacgacgccccctacatcctgaaggaggccggcatcgaccacctggtgagctaccccaccatcccccccggcatcaccgtgtacaacagaaccaaggtggagcactacttcctgggcatcagcaagagagacatcagaagactgtacgccagattcgagggcgacttcaagctgttcggctaccagaagcccgacttcctgctgaactag

SEQ ID NO: 150279 - DNA, 426 bp, Artificial Sequence
  derived and/or modified sequence
atgcaccaccagtggctgctgctggccgcctgcttctgggtgatcttcatgttcatggtggccagcaagttcatcaccctgaccttcaaggaccccgacgtgtacagcgccaagcaggagttcctgttcctgaccaccatgcccgaggtgagaaagctgcccgaggagaagcacatccccgaggagctgaagcccaccggcaaggagctgcccgacagccagctggtgcagcccctggtgtacatggagagactggagctgatcagaaacgtgtgcagagacgacgccctgaagaacctgagccacacccccgtgagcaagttcgtgctggacagaatcttcgtgtgcgacaagcacaagatcctgttctgccagacccccaaggtgggcaacacccagtggaagaaggtgctgatcgtgctgtag

SEQ ID NO: 150280 - DNA, 195 bp, Artificial Sequence
  derived and/or modified sequence
atgcaccaccagtggctgctgctggccgcctgcttctgggtgatcttcatgttcatggtggccagcaagttcatcaccctgaccttcaaggaccccgacgtgtacagcgccaagcaggagttcctgttcctgaccaccatgcccgaggtgagaaagctgcccgaggagaagcacatccccgaggagctgaagtag

SEQ ID NO: 150281 - DNA, 402 bp, Artificial Sequence
  derived and/or modified sequence
atgcaccaccagtggctgctgctggccgcctgcttctgggtgatcttcatgttcatggtggccagcaagttcatcaccctgaccttcaaggaccccgacgtgtacagcgccaagcaggagttcctgttcctgaccaccatgcccgaggtgagaaagctgcccgaggagaagcacatccccgaggagctgaagcccaccggcaaggagctgcccgacagccagctggtgcagcccctggtgtacatggagagactggagctgatcagaaacgtgtgcagagacgacgccctgaagaacctgagccacacccccgtgagcaagttcgtgctggacagaatcttcgtgtgcgacaagcacaagatcctgttctgccagacccccaaggtgggcaacacccagtag

SEQ ID NO: 150282 - DNA, 258 bp, Artificial Sequence
  derived and/or modified sequence
atgcaccaccagtggctgctgctggccgcctgcttctgggtgatcttcatgttcatggtggccagcaagttcatcaccctgaccttcaaggaccccgacgtgtacagcgccaagcaggagttcctgttcctgaccaccatgcccgaggtgagaaagctgcccgaggagaagcacatccccgaggagctgaagcccaccggcaaggagctgcccgacagccagctggtgcagcccctggtgtacatggagagactgtag

SEQ ID NO: 150283 - DNA, 102 bp, Artificial Sequence
  derived and/or modified sequence
atgcaccaccagtggctgctgctggccgcctgcttctgggtgatcttcatgttcatggtggccagcaagttcatcaccctgaccttcaaggaccccgactag

SEQ ID NO: 150284 - DNA, 1215 bp, Artificial Sequence
  derived and/or modified sequence
atgcagagaaaggccggcaagaaggagcacgtgcagctgagagacaagagaaaccaggagccccagttcagaggcaacaccgccagaaagtgcgagccccaggccgccgagggcagagtgagcgagtggctgagatgcgacaacatgcaccaccagtggctgctgctggccgcctgcttctgggtgatcttcatgttcatggtggccagcaagttcatcaccctgaccttcaaggaccccgacgtgtacagcgccaagcaggagttcctgttcctgaccaccatgcccgaggtgagaaagctgcccgaggagaagcacatccccgaggagctgaagcccaccggcaaggagctgcccgacagccagctggtgcagcccctggtgtacatggagagactggagctgatcagaaacgtgtgcagagacgacgccctgaagaacctgagccacacccccgtgagcaagttcgtgctggacagaatcttcgtgtgcgacaagcacaagatcctgttctgccagacccccaaggtgggcaacacccagtggaagaaggtgctgatcgtgctgaacggcgccttcagcagcatcgaggagatccccgagaacgtggtgcacgaccacgagaagaacggcctgcccagactgagcagcttcagcgacgccgagatccagaagagactgaagacctacttcaagttcttcatcgtgagagaccccttcgagagactgatcagcgccttcaaggacaagttcgtgcacaaccccagattcgagccctggtacagacacgagatcgcccccggcatcatcagaaagtacagaagaaacagaaccgagaccagaggcatccagttcgaggacttcgtgagatacctgggcgaccccaaccacagatggctggacctgcagttcggcgaccacatcatccactgggtgacctacgtggagctgtgcgccccctgcgagatcatgtacagcgtgatcggccaccacgagaccctggaggacgacgccccctacatcctgaaggaggccggcatcgaccacctggtgagctaccccaccatcccccccggcatcaccgtgtacaacagaaccaaggtggagcactacttcctgggcatcagcaagagagacatcagaagactgtacgccagattcgagggcgacttcaagctgttcggctaccagaagcccgacttcctgctgaactag

SEQ ID NO: 150285 - protein, 856 aa, Artificial Sequence
  derived and/or modified sequence
MKSARAKTPRKPTVKKGSQTNLKDPVGVYCRVRPLGFPDQECCIEVINNTTVQLHTPEGYRLNRNGDYKETQYSFKQVFGTHTTQKELFDVVANPLVNDLIHGKNGLLFTYGVTGSGKTHTMTGSPGEGGLLPRCLDMIFNSIGSFQAKRYVFKSNDRNSMDIQCEVDALLERQKREAMPNPKTSSSKRQVDPEFADMITVQEFCKAEEVDEDSVYGVFVSYIEIYNNYIYDLLEEVPFDPIKPKPPQSKLLREDKNHNMYVAGCTEVEVKSTEEAFEVFWRGQKKRRIANTHLNRESSRSHSVFNIKLVQAPLDADGDNVLQEKEQITISQLSLVDLAGSERTNRTRAEGNRLREAGNINQSLMTLRTCMDVLRENQMYGTNKMVPYRDSKLTHLFKNYFDGEGKVRMIVCVNPKAEDYEENLQVMRFAEVTQEVEVARPVDKAICGLTPGRRYRNQPRGPVGNEPLVTDVVLQSFPPLPSCEILDINDEQTLPRLIEALEKRHNLRQMMIDEFNKQSNAFKALLQEFDNAVLSKENHMQGKLNEKEKMISGQKLEIERLEKKNKTLEYKIEILEKTTTIYEEDKRNLQQELETQNQKLQRQFSDKRRLEARLQGMVTETTMKWEKECERRVAAKQLEMQNKLWVKDEKLKQLKAIVTEPKTEKPERPSRERDREKVTQRSVSPSPVPLLFQPDQNAPPIRLRHRRSRSAGDRWVDHKPASNMQTETVMQPHVPHAITVSVANEKALAKCEKYMLTHQELASDGEIETKLIKGDIYKTRGGGQSVQFTDIETLKQESPNGSRKRRSSTVAPAQPDGAESEWTDVETRCSVAVEMRAGSQLGPGYQHHAQPKRKKP

SEQ ID NO: 150286 - DNA, 2571 bp, Artificial Sequence
  derived and/or modified sequence
atgaaaagcgcccgtgccaagacccccaggaagccaaccgtgaaaaagggctctcagactaatttaaaagatcccgtgggtgtctactgtagagtgagaccgttgggtttccctgatcaggagtgctgtatcgaagttatcaacaacacaactgtgcagcttcacacacccgaaggataccggctgaacagaaacggggactacaaggaaactcaatatagcttcaaacaagtgttcggtacacatacaacacagaaggaattgtttgatgtagtagctaaccccctggtgaacgatctcattcacggcaagaatggcctactgttcacctatggagtcacgggatcagggaagacccacaccatgactggaagcccgggagaaggtggactcctacctcgatgtctggacatgatctttaatagcattggctcatttcaggccaaacgctacgtctttaagagcaatgacaggaattcaatggacattcagtgtgaggtcgatgcgttactggaaaggcagaagagagaagcgatgccaaatcccaaaacaagctcatcgaagcgtcaggtggaccctgaatttgcagatatgattacagttcaggaattttgcaaagctgaagaagtggacgaagactctgtgtatggagtattcgtttcctacatcgagatctacaataattatatttacgacctgttagaggaggttccatttgaccctatcaaaccgaaaccgccccagtccaaactgctcagggaagataaaaatcacaatatgtatgtggcagggtgtaccgaggtcgaggtaaagagcactgaggaggcgttcgaggttttttggcggggacagaagaagagaaggattgcgaatacccacctgaatagggagagctctcggtctcattccgttttcaatatcaagctggtgcaagctccgctcgacgcagatggcgacaacgtgctgcaagaaaaggaacagattaccatttctcagctaagcctggtcgatctggctggttctgaacggacaaacagaacacgggccgaggggaaccgtctccgcgaggctggaaacattaaccagagcctcatgacactgcggacctgtatggatgtgctccgggaaaaccagatgtatggaactaataaaatggtgccgtacagagattccaagctcacccacttgtttaagaactattttgacggtgaaggcaaggttcgcatgattgtctgtgtgaatccaaaagccgaggactatgaggagaatctccaggtgatgcggtttgccgaggtcacacaggaggtggaggtggcccgccctgtggacaaggccatatgcgggctgactcctggcaggcgctaccgaaatcagcccagagggcccgtcgggaacgaacctctggtaactgacgtcgtcctacagagcttccccccactccctagctgcgagatcctagacatcaatgacgagcagactctgccgcgtctcattgaagccctcgagaagcggcacaaccttcggcagatgatgattgacgagtttaacaagcagtctaacgccttcaaggcactgctccaagagttcgacaatgccgtactctccaaggaaaaccatatgcagggcaagcttaatgagaaggaaaaaatgatttccggacaaaagctggagattgaacgcctcgagaagaaaaataaaactttggagtacaaaatagagatactggagaagaccacgacaatttacgaggaagataagcgaaatttgcagcaggaattggagacgcaaaatcagaaacttcaaaggcagttctctgataagcgacggctggaagcaaggcttcaggggatggtcactgaaactacaatgaagtgggagaaagagtgcgaaaggcgcgtggcagccaagcagctggagatgcagaacaagctgtgggtgaaggacgagaagcttaagcagctgaaagccatcgtgacagaaccgaaaaccgaaaaacctgaaagaccctcaagagagagagaccgggaaaaagttactcagcgctccgtcagtcctagcccggttcccttactgttccagcccgaccaaaacgccccaccaatccggctgcgccacaggcggagtcgaagtgcaggcgatcgttgggtggatcataaacctgcctcaaatatgcaaactgagactgtgatgcagccccacgtgccacatgccattacagtaagtgtggcaaacgaaaaggccctggccaaatgcgagaagtacatgctgactcatcaggagctggcctcggatggtgaaatcgagactaaactcattaaaggagacatctacaagaccaggggagggggtcagagtgtccaatttaccgatatcgagacactaaagcaggaatcccctaatgggagcagaaaaagacgcagctctaccgtggcccccgcccaacccgatggggcggaaagcgagtggacagatgtggagacccgctgctccgtggcggtcgagatgcgagcagggagtcaactggggccgggataccagcatcacgcacagcccaaaaggaagaagccatag

SEQ ID NO: 150287 - DNA, 3409 bp, Artificial Sequence
  derived and/or modified sequence
ttccgcggaggtcctgcctctccctgcggacgggcgctgattggcccgtttgaaatgcgccaggcgggagctcacctgggctcttagcgtcgccgccggcttcgcagagcaccgcgccttagccgcgaagttctagttcttgctgccggtcctaacgtcccgcagtcttcgccagccagccgtcccgcatgcgcgtttgggcggcgtggagcctgctgccatgaagtcagcgagagctaagacaccccggaaacctaccgtgaaaaaagggtcccaaacgaaccttaaagacccagttggggtatactgtagggtgcgcccactgggctttcctgatcaagagtgttgcatagaagtgatcaataatacaactgttcagcttcatactcctgagggctacagactcaaccgaaatggagactataaggagactcagtattcatttaaacaagtatttggcactcacaccacccagaaggaactctttgatgttgtggctaatcccttggtcaatgacctcattcatggcaaaaatggtcttctttttacatatggtgtgacgggaagtggaaaaactcacacaatgactggttctccaggggaaggagggctgcttcctcgttgtttggacatgatctttaacagtatagggtcatttcaagctaaacgatatgttttcaaatctaatgataggaatagtatggatatacagtgtgaggttgatgccttattagaacgtcagaaaagagaagctatgcccaatccaaagacttcttctagcaaacgacaagtagatccagagtttgcagatatgataactgtacaagaattctgcaaagcagaagaggttgatgaagatagtgtctatggtgtatttgtctcttatattgaaatatataataattacatatatgatctattggaagaggtgccgtttgatcccataaaacccaaacctccacaatctaaattgcttcgtgaagataagaaccataacatgtatgttgcaggatgtacagaagttgaagtgaaatctactgaggaggcttttgaagttttctggagaggccagaaaaagagacgtattgctaatacccatttgaatcgtgagtccagccgttcccatagcgtgttcaacattaaattagttcaggctcccttggatgcagatggagacaatgtcttacaggaaaaagaacaaatcactataagtcagttgtccttggtagatcttgctggaagtgaaagaactaaccggaccagagcagaagggaacagattacgtgaagctggtaatattaatcagtcactaatgacgctaagaacatgtatggatgtcctaagagagaaccaaatgtatggaactaacaagatggttccatatcgagattcaaagttaacccatctgttcaagaactactttgatggggaaggaaaagtgcggatgatcgtgtgtgtgaaccccaaggctgaagattatgaagaaaacttgcaagtcatgagatttgcggaagtgactcaagaagttgaagtagcaagacctgtagacaaggcaatatgtggtttaacgcctgggaggagatacagaaaccagcctcgaggtccagttggaaatgaaccattggttactgacgtggttttgcagagttttccacctttgccatcatgcgaaattttggatatcaacgatgagcagacacttccaaggctgattgaagccttagagaaacgacataacttacgacaaatgatgattgatgagtttaacaaacaatctaatgcttttaaagctttgttacaagaatttgacaatgctgttttaagtaaagaaaaccacatgcaagggaaactaaatgaaaaggagaagatgatctcaggacagaaattggaaatagaacgactggaaaagaaaaacaaaactttagaatataagattgagattttagagaaaacaactactatctatgaggaagataaacgcaatttgcaacaggaacttgaaactcagaaccagaaacttcagcgacagttttctgacaaacgcagattagaagccaggttgcaaggcatggtgacagaaacgacaatgaagtgggagaaagaatgtgagcgtagagtggcagccaaacagctggagatgcagaataaactctgggttaaagatgaaaagctgaaacaactgaaggctattgttaccgaacctaaaactgagaagccagagagaccctctcgggagcgagatcgagaaaaagttactcaaagatctgtttctccatcacctgtgcctttactctttcaacctgatcagaacgcaccaccaattcgtctccgacacagacgatcacgctctgcaggagacagatgggtagatcataagcccgcctctaacatgcaaactgaaacagtcatgcagccacatgtccctcatgccatcacagtatctgttgcaaatgaaaaggcactagctaagtgtgagaagtacatgctgacccaccaggaactagcctccgatggggagattgaaactaaactaattaagggtgatatttataaaacaaggggtggtggacaatctgttcagtttactgatattgagactttaaagcaagaatcaccaaatggtagtcgaaaacgaagatcttccacagtagcacctgcccaaccagatggtgcagagtctgaatggaccgatgtagaaacaaggtgttctgtggctgtggagatgagagcaggatcccagctgggacctggatatcagcatcacgcacaacccaagcgcaaaaagccatgaactgacagtcccagtactgaaagaacattttcatttgtgtggatgatttctcgaaagccatgccagaagcagtcttccaggtcatcttgtagaactccagctttgttgaaaatcacggacctcagctacatcatacactgacccagagcaaagctttccctatggttccaaagacaactagtattcaacaaaccttgtatagtatatgttttgccatatttaatattaatagcagaggaagactccttttttcatcactgtatgaattttttataatgtttttttaaaatatatttcatgtatacttataaactaattcacacaagtgtttgtcttagatgattaaggaagactatatctagatcatgtctgattttttattgtgacttctccagccctggtctgaatttcttaaggttttataaacaaatgctgctatttattagctgcaagaatgcactttagaactatttgacaattcagactttcaaaataaagatgtaaatgactggccaataataaccattttaggaaggtgttttgaattctgtatgtatatattcactttctgacatttagatatgccaaaagaattaaaatcaaaagcactaagaaata

SEQ ID NO: 150288 - DNA, 2571 bp, Artificial Sequence
  derived and/or modified sequence
atgaagagcgcccgggccaagacccccaggaagcccaccgtgaagaagggcagccagaccaacctgaaggaccctgtgggcgtgtactgccgggtgcggcccctgggcttcccagaccaggagtgctgcatcgaggtgatcaacaacaccaccgtgcagctgcacaccccagagggctaccgcctgaacagaaatggagactacaaggagacccagtacagcttcaagcaggtgtttggcacccacaccacccagaaggagctgtttgatgtggtggccaaccccctggtgaatgacctgatccacggcaagaatggcctgctcttcacctatggagtgacaggcagcggcaagacccacaccatgacaggcagccctggagagggcggcctgctgccccgctgcctggacatgatcttcaacagcatcggcagcttccaggccaagagatatgtgttcaagagcaatgacaggaacagcatggacatccagtgtgaggtggatgccctgctggagcggcagaagcgggaggccatgcccaaccccaagaccagcagcagcaagaggcaggtggaccctgagtttgctgacatgatcaccgtgcaggagttctgcaaggccgaggaggtggatgaggacagcgtgtatggagtgtttgtgtcctacatcgagatctacaacaactacatctatgacctgctggaggaggtgccctttgaccccatcaagcccaagccaccccagagcaagctgctgcgggaggacaagaaccacaacatgtatgtggccggctgcacagaggtggaggtgaagagcacagaggaggcctttgaggtgttctggaggggccagaagaagagaagaattgccaacacccacctgaaccgggagagcagccgcagccacagcgtcttcaacatcaagctggtgcaggcccccctggatgctgatggagacaacgtgctgcaggagaaggagcagatcaccatcagccagctgagcctggtggacctggccggcagcgagaggaccaacagaaccagggctgagggcaaccggctgcgggaggccggcaacatcaaccagagcctgatgaccctgcggacctgcatggatgtgctgcgggagaaccagatgtatggcaccaacaagatggtgccctacagagacagcaagctgacccacctgttcaagaactactttgatggagagggcaaggtgaggatgattgtgtgtgtgaaccccaaggccgaggactatgaggagaacctgcaggtgatgagatttgctgaggtgacccaggaggtggaggtggcccggcctgtggacaaggccatctgtggcctgaccccaggaagacgctacagaaaccagccccggggccctgtgggcaatgagcccctggtgacagatgtggtgctgcagagcttcccccccctgcccagctgtgagatcctggacatcaatgatgagcagaccctgcccaggctcatcgaggccctggagaagaggcacaacctgcggcagatgatgattgatgagttcaacaagcagagcaatgccttcaaggccctgctgcaggagtttgacaatgctgtgctgagcaaagaaaaccacatgcagggcaagctgaatgagaaggagaagatgatcagcggccagaagctggagattgaaaggctggagaagaagaacaagaccctggagtacaagattgagatcctggagaagaccaccaccatctatgaggaggacaagaggaacctgcagcaggagctggagacccagaaccagaagctgcagaggcagttcagtgacaagaggcggctggaggcccggctgcagggcatggtgacagagaccaccatgaagtgggagaaggaatgtgaaagaagagtggccgccaagcagctggagatgcagaacaagctgtgggtgaaggatgagaagctgaagcagctgaaggccatcgtgacagagcccaagacagagaagccagagcggcccagccgggagcgggaccgggagaaggtgacccagaggtctgtgagccccagccctgtgcccctgctcttccagcctgaccagaatgccccacccatccggctgcggcaccggcgcagccgctctgctggggaccgctgggtggaccacaagccagccagcaacatgcagacagagaccgtgatgcagccccacgtgccccacgccatcaccgtgtctgtggccaatgagaaggccctggccaagtgtgagaagtacatgctgacccaccaggagctggccagtgatggagaaattgagaccaagctgatcaagggggacatctacaagacccggggcggcggccagagcgtgcagttcacagacatcgagaccctgaagcaggagagccccaacggcagcaggaagagaagaagcagcacagtggccccagcccagccagatggagctgagagcgagtggacagatgtggagacccgctgcagcgtggccgtggagatgagagctggcagccagctgggccctggctaccagcaccacgcccagcccaagaggaagaagccctag

SEQ ID NO: 150289 - DNA, 2571 bp, Artificial Sequence
  derived and/or modified sequence
atgaagagcgcccgggccaagaccccccggaagcccaccgtgaagaagggctcccagaccaaccttaaggacccggtaggagtgtactgtcgtgtaagacccttgggattccccgaccaagagtgctgcatagaagtgattaacaacactactgtgcagttacacacccctgagggctacagactgaatcgaaatggcgattacaaggagactcaatactccttcaaacaggtgtttgggacccacacgactcagaaagagttattcgacgtcgtagctaacccactcgtgaacgatctcatccacggcaagaacggactcctattcacttacggggtgacagggtcggggaaaacacatactatgaccggatctcccggcgaaggtggactcctccccagatgcttagacatgatattcaacagcatcggctcattccaggcgaagcgctacgtgttcaagagcaatgatcgaaacagtatggacatccagtgtgaggtcgacgcccttctggagaggcagaagagagaggccatgcccaatccaaagacatccagtagcaaaagacaggtcgatcccgaatttgcagacatgatcacagtgcaggaattctgtaaggcagaagaagtggatgaggattccgtgtatggcgtattcgtgtcgtacattgagatttataataactacatctatgacttactggaggaagtaccatttgatcctatcaagccaaaacctcctcagagtaagctactgcgagaggataagaaccacaacatgtacgtggcaggttgcaccgaagtcgaggttaagagtacggaggaagcatttgaagttttctggaggggtcagaagaagagacgaatcgctaacactcacctgaaccgggagtcctctcgttctcatagtgtattcaatataaagctggtgcaggcccccctggatgcagatggcgacaatgttcttcaggaaaaggagcagataacaatcagccagttgagcctcgtcgacctcgcagggagtgagaggacaaatcgtacccgggctgagggtaatagattaagagaagccggaaacataaaccagtctcttatgaccctgaggacctgtatggacgtcctgcgggaaaatcaaatgtacggcaccaataagatggtgccttatagggactctaagctcactcacctctttaagaattattttgatggggaagggaaagtgcggatgatagtctgtgttaatcccaaggccgaggattatgaggagaatttacaagtcatgaggttcgctgaggtgacccaggaagtcgaggtggcacgcccggtcgataaggcgatttgtggcctgacgcctggtcgtaggtataggaatcaaccaaggggtcccgttgggaacgaaccactggtgaccgacgtggtgctgcagtccttcccacccctgccgagctgtgagatcttggatattaatgacgagcagactctgccccgcctcattgaagctttggaaaaacggcacaatctacggcagatgatgatcgacgaatttaacaagcagagcaatgcctttaaggccttgctgcaggaattcgacaacgctgtcctttctaaagagaaccatatgcagggcaagttaaacgaaaaagagaagatgatctcgggtcaaaagttggagattgagcgcttagagaagaaaaacaaaaccctggagtataagatcgagatattggaaaaaactactaccatctatgaagaggacaagcgaaaccttcagcaagagttggagacccagaatcaaaagttgcagcgacagttctcagataaacgacggctcgaagcacgcctccagggtatggtgactgaaactacgatgaagtgggagaaggagtgtgaacgacgggtggcagccaaacagctggaaatgcaaaataagttgtgggtcaaagatgagaagctgaagcaattgaaagccatcgtcactgaacccaagaccgagaaaccagagaggccttcacgtgagcgggaccgggaaaaggtgacccagcgcagcgtgagtccctcaccagtgccgctgcttttccagccagatcaaaacgcaccgcccatccgactgcgacatagacggtctcggagcgccggcgaccggtgggtcgaccacaagccagccagcaatatgcaaacagaaaccgtgatgcagccccatgttcctcacgcaataacagtgtctgttgcaaacgaaaaggcccttgcaaagtgcgaaaaatacatgctgacccatcaggagctagcatccgatggcgaaattgaaaccaagctcatcaagggcgacatctacaaaacaaggggcggaggacagagcgtccagtttacagatattgagaccctcaagcaagaatcccctaatgggtcgaggaagcgaaggagtagcaccgtggccccggcgcagcctgatggggctgagtcggaatggacagatgtggaaactcgttgttcagtcgccgtggagatgcgcgccggcagccaactgggccctggataccagcaccacgctcagcccaagcgtaagaaaccttag

SEQ ID NO: 150290 - DNA, 2571 bp, Artificial Sequence
  derived and/or modified sequence
atgaaaagtgcccgagctaagacgccgaggaagcccacggtcaagaaaggaagccagactaacctaaaagacccggttggcgtctattgccgggtaagaccacttggatttcccgaccaggagtgttgtatcgaggtaattaacaacaccacagttcagctgcacacacccgaggggtataggctgaacaggaacggcgattataaagagacccagtactcattcaagcaggtgttcggcacgcatacaacccagaaggaactgttcgatgtcgtcgcaaatccactggtcaatgatctgattcatggcaagaacggcctcttgttcacctacggtgttactggctccggaaaaacacacacaatgaccggatcaccgggtgaaggcggactgctcccgcgttgcctggatatgattttcaatagcataggttcatttcaagctaaaaggtatgtctttaagtccaacgaccggaactccatggacatacaatgcgaagtggacgcgctgctggaaagacaaaaacgggaagccatgccaaaccctaaaaccagttcttccaagcgccaagtggatccagaattcgctgacatgatcaccgtgcaagaattctgtaaggcagaggaagtggacgaggattccgtttatggcgtgttcgtgtcatacattgaaatttacaacaactatatatacgacctccttgaggaagtcccgtttgaccctattaaacccaagccaccccagtctaagctcttgagagaagataagaatcataacatgtacgtggccggatgtaccgaagtcgaagtcaagtccaccgaagaggcctttgaggtgttttggcgaggccagaaaaagaggcgaattgccaacactcaccttaaccgagagagttctcgctcccacagcgttttcaacatcaagctggtgcaggcccctctggacgctgacggtgataatgtactacaggaaaaggagcagatcactatttctcagctttccctagtggacctagcgggtagtgagcggacaaatcgcaccagggccgagggaaatcggctgagggaggccggtaacatcaaccagagcctgatgacactgaggacatgcatggatgtgctaagagaaaaccagatgtatggtactaacaagatggtgccatacagggactctaaattaacccacctgtttaaaaactacttcgatggggaggggaaagttagaatgatcgtttgcgtgaacccaaaggctgaggattacgaggaaaatctccaggtgatgcgctttgctgaggtaactcaagaggtagaagtggcaagaccagtggacaaggctatttgcggtctgactcctggcagacgctacagaaaccaaccccgaggtcccgtgggaaacgagccactggtgactgacgtggttctccagtcattccctcccttgcctagctgtgaaatcctagacatcaatgatgaacagacgctgccgaggctcatcgaggcactggagaaacgacataacctacgacagatgatgattgacgagttcaataaacagtcaaatgcctttaaggctttgctccaggagtttgacaatgcagttctttcaaaggagaatcacatgcagggcaaattgaatgaaaaggaaaaaatgatctccggccaaaaactggagatcgagagactggagaagaaaaacaagactctcgagtacaagatcgagatcctcgagaagacaaccactatctatgaggaagataaaagaaacctccagcaggagctagagacccaaaaccagaagctccagagacagttctctgacaagaggcgcctggaggcgaggctgcaaggaatggtcactgagaccactatgaagtgggagaaagagtgtgagaggcgagttgccgctaaacagttagaaatgcaaaataaactgtgggtgaaggatgagaaacttaagcaactgaaggccattgtgacggaacccaaaaccgaaaagcctgaaaggccatctcgtgagcgggacagagaaaaggtgacgcagcggtcagtgagcccctcacccgtgcctctgctgtttcagcctgaccagaatgcaccccctatacgcttaaggcataggcgctcccgctcggctggcgacaggtgggtagatcacaaacctgcctcaaacatgcagacagaaaccgtgatgcagcctcacgtaccacatgccattacagtgtctgtggccaacgagaaggctctagctaagtgcgaaaagtatatgctgacccatcaagaactcgcctctgacggtgagatcgagaccaagctgattaaaggtgacatttataaaacaaggggcggaggccagtcagttcagtttaccgatatcgagaccctaaaacaggagtctccaaacggctcccgtaagaggcggagctcaaccgtcgcccctgcccaaccagacggcgctgaaagtgagtggaccgacgtcgaaacaaggtgtagcgtggctgtcgagatgcgggcagggagccagcttggaccgggttaccagcaccatgcccagcccaaaagaaagaagccttag

SEQ ID NO: 150291 - DNA, 2571 bp, Artificial Sequence
  derived and/or modified sequence
atgaagagcgccagagccaagacccccagaaagcccaccgtgaagaagggcagccagaccaacctgaaggaccccgtgggcgtgtactgcagagtgagacccctgggcttccccgaccaggagtgctgcatcgaggtgatcaacaacaccaccgtgcagctgcacacccccgagggctacagactgaacagaaacggcgactacaaggagacccagtacagcttcaagcaggtgttcggcacccacaccacccagaaggagctgttcgacgtggtggccaaccccctggtgaacgacctgatccacggcaagaacggcctgctgttcacctacggcgtgaccggcagcggcaagacccacaccatgaccggcagccccggcgagggcggcctgctgcccagatgcctggacatgatcttcaacagcatcggcagcttccaggccaagagatacgtgttcaagagcaacgacagaaacagcatggacatccagtgcgaggtggacgccctgctggagagacagaagagagaggccatgcccaaccccaagaccagcagcagcaagagacaggtggaccccgagttcgccgacatgatcaccgtgcaggagttctgcaaggccgaggaggtggacgaggacagcgtgtacggcgtgttcgtgagctacatcgagatctacaacaactacatctacgacctgctggaggaggtgcccttcgaccccatcaagcccaagcccccccagagcaagctgctgagagaggacaagaaccacaacatgtacgtggccggctgcaccgaggtggaggtgaagagcaccgaggaggccttcgaggtgttctggagaggccagaagaagagaagaatcgccaacacccacctgaacagagagagcagcagaagccacagcgtgttcaacatcaagctggtgcaggcccccctggacgccgacggcgacaacgtgctgcaggagaaggagcagatcaccatcagccagctgagcctggtggacctggccggcagcgagagaaccaacagaaccagagccgagggcaacagactgagagaggccggcaacatcaaccagagcctgatgaccctgagaacctgcatggacgtgctgagagagaaccagatgtacggcaccaacaagatggtgccctacagagacagcaagctgacccacctgttcaagaactacttcgacggcgagggcaaggtgagaatgatcgtgtgcgtgaaccccaaggccgaggactacgaggagaacctgcaggtgatgagattcgccgaggtgacccaggaggtggaggtggccagacccgtggacaaggccatctgcggcctgacccccggcagaagatacagaaaccagcccagaggccccgtgggcaacgagcccctggtgaccgacgtggtgctgcagagcttcccccccctgcccagctgcgagatcctggacatcaacgacgagcagaccctgcccagactgatcgaggccctggagaagagacacaacctgagacagatgatgatcgacgagttcaacaagcagagcaacgccttcaaggccctgctgcaggagttcgacaacgccgtgctgagcaaggagaaccacatgcagggcaagctgaacgagaaggagaagatgatcagcggccagaagctggagatcgagagactggagaagaagaacaagaccctggagtacaagatcgagatcctggagaagaccaccaccatctacgaggaggacaagagaaacctgcagcaggagctggagacccagaaccagaagctgcagagacagttcagcgacaagagaagactggaggccagactgcagggcatggtgaccgagaccaccatgaagtgggagaaggagtgcgagagaagagtggccgccaagcagctggagatgcagaacaagctgtgggtgaaggacgagaagctgaagcagctgaaggccatcgtgaccgagcccaagaccgagaagcccgagagacccagcagagagagagacagagagaaggtgacccagagaagcgtgagccccagccccgtgcccctgctgttccagcccgaccagaacgccccccccatcagactgagacacagaagaagcagaagcgccggcgacagatgggtggaccacaagcccgccagcaacatgcagaccgagaccgtgatgcagccccacgtgccccacgccatcaccgtgagcgtggccaacgagaaggccctggccaagtgcgagaagtacatgctgacccaccaggagctggccagcgacggcgagatcgagaccaagctgatcaagggcgacatctacaagaccagaggcggcggccagagcgtgcagttcaccgacatcgagaccctgaagcaggagagccccaacggcagcagaaagagaagaagcagcaccgtggcccccgcccagcccgacggcgccgagagcgagtggaccgacgtggagaccagatgcagcgtggccgtggagatgagagccggcagccagctgggccccggctaccagcaccacgcccagcccaagagaaagaagccctag

SEQ ID NO: 150292 - protein, 427 aa, Artificial Sequence
  derived and/or modified sequence
METTISEIHVENKDEKRSAEGSPGAERQKEKASMLCFKRRKKAAKALKPKAGSEAADVARKCPQEAGASDQPEPTRGAWASLKRLVTRRKRSESSKQQKPLEGEMQPAINAEDADLSKKKAKSRLKIPCIKFPRGPKRSNHSKIIEDSDCSIKVQEEAEILDIQTQTPLNDQATKAKSTQDLSEGISRKDGDEVCESNVSNSTTSGEKVISVELGLDNGHSAIQTGTLILEEIETIKEKQDVQPQQASPLETSETDHQQPVLSDVPPLPAIPDQQIVEEASNSTLESAPNGKDYESTEIVAEETKPKDTELSQESDFKENGITEEKSKSEESKRMEPIAIIITDTEISEFDVTKSKNVPKQFLISAENEQVGVFANDNGFEDRTSEQYETLLIETASSLVKNAIQLSIEQLVNEMASDDNKINNLLQ

SEQ ID NO: 150293 - DNA, 1284 bp, Artificial Sequence
  derived and/or modified sequence
atggagaccaccatcagcgagatccacgtggagaacaaggacgagaagagaagcgccgagggcagccccggcgccgagagacagaaggagaaggccagcatgctgtgcttcaagagaagaaagaaggccgccaaggccctgaagcccaaggccggcagcgaggccgccgacgtggccagaaagtgcccccaggaggccggcgccagcgaccagcccgagcccaccagaggcgcctgggccagcctgaagagactggtgaccagaagaaagagaagcgagagcagcaagcagcagaagcccctggagggcgagatgcagcccgccatcaacgccgaggacgccgacctgagcaagaagaaggccaagagcagactgaagatcccctgcatcaagttccccagaggccccaagagaagcaaccacagcaagatcatcgaggacagcgactgcagcatcaaggtgcaggaggaggccgagatcctggacatccagacccagacccccctgaacgaccaggccaccaaggccaagagcacccaggacctgagcgagggcatcagcagaaaggacggcgacgaggtgtgcgagagcaacgtgagcaacagcaccaccagcggcgagaaggtgatcagcgtggagctgggcctggacaacggccacagcgccatccagaccggcaccctgatcctggaggagatcgagaccatcaaggagaagcaggacgtgcagccccagcaggccagccccctggagaccagcgagaccgaccaccagcagcccgtgctgagcgacgtgccccccctgcccgccatccccgaccagcagatcgtggaggaggccagcaacagcaccctggagagcgcccccaacggcaaggactacgagagcaccgagatcgtggccgaggagaccaagcccaaggacaccgagctgagccaggagagcgacttcaaggagaacggcatcaccgaggagaagagcaagagcgaggagagcaagagaatggagcccatcgccatcatcatcaccgacaccgagatcagcgagttcgacgtgaccaagagcaagaacgtgcccaagcagttcctgatcagcgccgagaacgagcaggtgggcgtgttcgccaacgacaacggcttcgaggacagaaccagcgagcagtacgagaccctgctgatcgagaccgccagcagcctggtgaagaacgccatccagctgagcatcgagcagctggtgaacgagatggccagcgacgacaacaagatcaacaacctgctgcagtag

SEQ ID NO: 150294 - DNA, 2601 bp, Artificial Sequence
  derived and/or modified sequence
tttttttactaatgaaacactgcagattagtatccccaaacaattcattttctgacgaaactcttaaagcccagtttcagaacataagctttaagcaacaagcaatcttgtgttaatctgagctctgttacagctctgccgtaatctcagccaaattgcttcatctgtacgtggtgataccaccatctttgtaatattgtggtgaggattagagatgtatgtaaaagtgcatgcactgcctaatacccaagaattgctcaataaatgtcagctattactactcttactgacttccaactatgtgcagattatggtggaaacatgtgatacagcagatacagtacttaaatgaaaatgtcaaaattgtacaactaatttaagagtgggaaatgacagtaatgctaaattttcctaagaatatgtatgaaaaatagcacttccttgatggaacatacatttttagaacagaaaccttatgttataatggtaaaactagagagtcaaagtctctagttctaactctggctatgaccttatctagttgcatggcttttgacaagacaactgctcccctctggagttcagttttgtcatctggctggatttgagtaatctcaaataatctctaaagtcctttgcagctttaaaattatctattgagtgtgataaagattacatcagcttgcttttcatcctgcacttcatttttggttcttgttgtttgcttaacttgcactttagagtcataagcaattcacacagacaacacaactaaagaactgataatatcagacttgcagggtaatccaaaatgaagtttcaacaaggaggataaaacaaaatagaatcacactgaactctttaatagggccaaagtaaaccccaatgtttattctccagtcatttcattaagttattatatggaaaatatgcctggtagaatcttatacattcactgaaatagtctccacagaaaataataggctcatagtgaaataaaataccactttcttttctctcatcaggttgatctttaaataaagcaaaaatttatccaaagaagggctttcatcaagaaattaaagagagaaattacaagccatagagaaactgggcatttctatactagagaaaccacctaaaacaactgtatggagtaagatgaaaggtatgaatatgcctggaagaaattttacctagtgtgacatttttgctcatctttttgtcacaaaaggctgctaaggaagagagaatacagttttctagagaataagagtgcagtgtaaaaatggaaaccacaatttcagaaattcatgtagaaaacaaggatgagaagagatcagcagaaggtagtcctggggctgaaaggcagaaggaaaaggcatccatgctttgcttcaagagaagaaagaaagcagccaaagcactgaagcccaaagctggctctgaagctgctgatgtggcaaggaagtgtccacaagaagcaggagcttctgatcagccagagcccacacggggggcctgggcctcactcaaacgtcttgtaacacgcaggaaaaggtcagagtcttcaaagcagcaaaagccattggagggtgaaatgcaacctgcaataaatgctgaggatgctgatctttctaagaaaaaggcaaaatctagacttaagattccctgcataaaattcccaagagggccaaaaaggagtaatcattccaaaattatagaagactcagactgcagcatcaaagtccaggaagaagctgaaattttggatatacaaacacagaccccattgaatgatcaggcaacaaaggctaagtcaacccaggatctaagtgaaggcatctcacggaaagatggtgatgaggtctgtgaatcaaatgtgagcaatagcacaacttctggagagaaagtgatttcagtagaacttggattagataatgggcattctgctattcaaacgggaactctaatccttgaagaaattgaaacgatcaaggaaaaacaagatgttcaaccccagcaagcaagcccacttgaaacttcagaaacagaccatcagcagccagtactttctgatgttcctcctttacctgcaattccagatcaacaaattgtggaagaagccagtaacagtaccctagaaagtgcaccaaatggaaaagactatgaaagtacagagattgtagctgaagaaactaagccaaaagatactgaattgagccaagaatcagattttaaagaaaatgggatcactgaagagaaatccaaatcagaagaaagcaaaagaatggagccaattgctattattattacagacactgaaatcagtgaatttgatgttacaaaatctaaaaatgtccctaagcaattcttaatttcagctgaaaatgagcaagtaggggtttttgctaatgataatggttttgaggatagaacttcagaacaatatgaaacactcttaattgaaacagcctcttctctagtcaagaatgctattcagttgtcaatagaacagctggttaatgaaatggcctctgatgataataaaataaacaatcttctacagtgacttactctccagagtcacggcagaaaaaa

SEQ ID NO: 150295 - DNA, 1662 bp, Artificial Sequence
  derived and/or modified sequence
gcagagggcgccttgctccgggtgcgaccgcggctccctggaggcctgggcggcgggccccgcgagcgcgccgccacctcgggagcagtgttggccaaggaccccgacgccctacgttgatctttaaataaagcaaaaatttatccaaagaagggctttcatcaagaaattaaagagagaaattacaagccatagagaaactgggcatttctatactagagaaaccacctaaaacaactgtatggagtaagatgaaaggtatgaatatgcctggaagaaattttacctagtgtgacatttttgctcatctttttgtcacaaaaggctgctaaggaagagagaatacagttttctagagaataagagtgcagtgtaaaaatggaaaccacaatttcagaaattcatgtagaaaacaaggatgagaagagatcagcagaaggtagtcctggggctgaaaggcagaaggaaaaggcatccatgctttgcttcaagagaagaaagaaagcagccaaagcactgaagcccaaagctggctctgaagctgctgatgtggcaaggaagtgtccacaagaagcaggagcttctgatcagccagagcccacacggggggcctgggcctcactcaaacgtcttgtaacacgcaggaaaaggtcagagtcttcaaagcagcaaaagccattggagggtgaaatgcaacctgcaataaatgctgaggatgctgatctttctaagaaaaaggcaaaatctagacttaagattccctgcataaaattcccaagagggccaaaaaggagtaatcattccaaaattatagaagactcagactgcagcatcaaagtccaggaagaagctgaaattttggatatacaaacacagaccccattgaatgatcaggcaacaaaggctaagtcaacccaggatctaagtgaaggcatctcacggaaagatggtgatgaggtctgtgaatcaaatgtgagcaatagcacaacttctggagagaaagtgatttcagtagaacttggattagataatgggcattctgctattcaaacgggaactctaatccttgaagaaattgaaacgatcaaggaaaaacaagatgttcaaccccagcaagcaagcccacttgaaacttcagaaacagaccatcagcagccagtactttctgatgttcctcctttacctgcaattccagatcaacaaattgtggaagaagccagtaacagtaccctagaaagtgcaccaaatggaaaagactatgaaagtacagagattgtagctgaagaaactaagccaaaagatactgaattgagccaagaatcagattttaaagaaaatgggatcactgaagagaaatccaaatcagaagaaagcaaaagaatggagccaattgctattattattacagacactgaaatcagtgaatttgatgttacaaaatctaaaaatgtccctaagcaattcttaatttcagctgaaaatgagcaagtaggggtttttgctaatgataatggttttgaggatagaacttcagaacaatatgaaacactcttaattgaaacagcctcttctctagtcaagaatgctattcagttgtcaatagaacagctggttaatgaaatggcctctgatgataataaaataaacaatcttctacagtga

SEQ ID NO: 150296 - DNA, 1284 bp, Artificial Sequence
  derived and/or modified sequence
atggagaccacgatcagcgagattcacgtggagaacaaagacgaaaagcgctctgcagagggtagccccggagctgagagacagaaggagaaggcttcaatgctgtgttttaagaggcggaagaaggccgccaaagcacttaaaccaaaagcagggtctgaggcagcggacgtcgcccggaaatgcccccaggaagctggtgcaagcgaccagccagagccaacccggggcgcatgggcatctcttaaacgcttagtgacacgcagaaaacggagcgagtcatccaagcagcagaaaccgctcgagggcgaaatgcaacctgcaattaatgcagaagatgccgacctctcgaaaaagaaggccaaatcgcgacttaagatcccctgtatcaaatttccacggggccccaaaaggtccaatcattccaagataatcgaggacagtgattgctcaattaaggtccaggaggaagcagaaattctcgacattcaaacccagacacccttgaatgaccaggccaccaaagcgaagtccactcaggatctgagtgaaggaatttcgcgcaaagacggagacgaggtttgcgagagtaacgtgagcaattccaccaccagcggcgaaaaagtgatcagcgtggagctcggattagacaatggccactccgccattcaaactggcacactgattctggaggagatagaaactatcaaagagaagcaagatgttcagccccagcaggctagccctctggagacctccgaaaccgaccaccagcagcctgtcctcagcgacgtaccgcccctgccagcaatacccgatcagcagattgtggaggaggcttccaacagtaccctggagtctgcacccaacggtaaggattacgaatccaccgagatcgtagctgaggaaacgaagcctaaagacacagagctcagccaggagtctgacttcaaagagaacgggataaccgaagagaagtccaagtctgaagagtccaagcggatggagccaatcgccattataataacagacaccgagatcagcgagttcgatgtgaccaagtccaagaatgtgcccaagcagtttctgatcagcgcagaaaatgagcaggtcggcgttttcgctaatgataatggattcgaggaccgtaccagcgaacaatacgagacactcctgattgaaactgcatcctcactggttaaaaatgcaattcagctctcgattgaacaactggtaaatgagatggcgtctgacgataacaaaatcaacaatcttcttcagtag

SEQ ID NO: 150297 - DNA, 1284 bp, Artificial Sequence
  derived and/or modified sequence
atggaaaccacaatcagcgaaatccacgtcgaaaataaggacgaaaaaagaagcgccgagggtagtcctggtgccgagcggcaaaaggagaaggcctccatgctgtgttttaaaaggagaaaaaaggccgctaaggcattaaaacctaaagccggttccgaagcagccgacgtggcaagaaagtgtccccaggaagcgggagcctctgatcagcctgagccaacccgtggcgcctgggccagcctcaaacggctggtgacccgaaggaagcggtcggagagctctaagcagcagaagcctctcgagggtgagatgcagcccgctatcaatgcagaggatgccgacttgtcaaagaagaaagccaaatctcgcctgaagatcccatgcattaagtttccccgagggcccaaacggagcaaccactccaagattatagaagattccgattgcagtataaaagttcaggaagaggcggagattctcgatattcagactcaaaccccattaaatgaccaggcgaccaaggcaaaaagtacccaggatctcagcgaggggatttcccgcaaggatggcgacgaggtgtgcgagtccaatgtgtctaattccacaacttccggcgagaaggtgattagcgtcgaacttggtctggataacggacacagtgctatccaaactggcaccctgattttagaagaaattgaaacaattaaggagaaacaagatgtgcaaccacagcaagcgtcacccttagaaacttctgagacggatcaccagcaaccagtactctccgacgtgccaccactgccagctattcctgaccagcagatagtcgaagaggcgtcaaacagcacgttagaatcagctcctaacggcaaagactatgagagcacggagattgtggccgaggaaacaaagcccaaagacaccgagctttcgcaggaaagcgattttaaagagaatggtattactgaggaaaaaagcaagagcgaggagagcaaaaggatggaaccgattgctataattatcacagacaccgagatttcagagtttgacgtgactaagtccaagaacgtgcctaagcaatttctgattagcgcagagaacgaacaggttggcgtgttcgccaatgacaacggctttgaggatagaacatctgagcagtacgaaaccctactgattgagaccgctagttccctggtaaaaaacgccattcagctgtctattgaacagcttgttaatgagatggcttcagacgataacaaaatcaataacttgctgcagtag

SEQ ID NO: 150298 - DNA, 1284 bp, Artificial Sequence
  derived and/or modified sequence
atggagaccaccatcagcgagatccacgtggagaacaaggatgagaagaggtctgctgagggcagccctggagctgagcggcagaaggagaaggcctccatgctgtgcttcaagaggaggaagaaggccgccaaggccctgaagcccaaggccggcagcgaggccgcagatgtggccaggaaatgtccccaggaggccggggccagtgaccagcctgagcccaccaggggggcctgggccagcctgaagaggctggtgaccaggaggaagaggtctgagagcagcaagcagcagaagcccctggagggggagatgcagcctgccatcaatgcagaagatgctgacctgagcaagaagaaggccaagagccggctgaagatcccctgcatcaagttcccccggggccccaagaggagcaaccacagcaagatcatcgaggacagcgactgcagcatcaaggtgcaggaggaggccgagatcctggacatccagacccagacccccctgaatgaccaggccaccaaggccaagagcacccaggacctgtctgagggcatcagcaggaaggatggagatgaggtgtgtgagagcaatgtgagcaacagcaccaccagcggggagaaggtgatctctgtggagctgggcctggacaatggccacagcgccatccagacaggcaccctcatcctggaggagattgagaccatcaaggagaagcaggatgtgcagccccagcaggccagccccctggagaccagcgagacagaccaccagcagcctgtgctgagtgatgtgccccccctgcctgccatcccagaccagcagatcgtggaggaggccagcaacagcaccctggagagcgcccccaacgggaaggactatgagagcacagaaattgtggccgaggagaccaagcccaaggacacagagctgagccaggagagtgacttcaaggaaaatggcatcacagaggagaagagcaagtctgaggagagcaagaggatggagcccatcgccatcatcatcacagacacagagatcagcgagtttgatgtgaccaagagcaagaatgtgcccaagcagttcctgatctctgcagaaaatgagcaggtgggcgtgtttgccaatgacaatggatttgaggacaggaccagcgagcagtatgagaccctgctgattgaaacagccagcagcctggtgaagaatgccatccagctgagcattgagcagctggtgaatgagatggccagtgatgacaacaagatcaacaacctgctgcagtag

SEQ ID NO: 150299 - DNA, 1284 bp, Artificial Sequence
  derived and/or modified sequence
atggagaccaccatcagcgagatccacgtggagaacaaggacgagaagcggagcgctgagggcagtccaggcgccgaacgtcaaaaagaaaaggcctctatgctctgctttaaacgcagaaaaaaagctgccaaggcgttgaaaccaaaagctggctccgaggccgcagatgttgctagaaagtgcccacaagaggctggggcaagcgatcagccagagccaacaagaggtgcttgggccagtctgaagaggcttgtgactcgtaggaagaggtctgaatctagcaagcagcagaaaccactggagggagagatgcagcccgccatcaacgcggaggacgctgatctcagtaagaaaaaggcaaagtcccgcctcaagataccctgcatcaagttcccccgaggcccgaagcgttcaaaccactcgaaaatcatcgaggattctgactgctccatcaaggtgcaggaagaggccgagattcttgatatccaaacacagaccccactgaacgatcaggccactaaagccaaatctacacaggacctgtccgagggcattagcaggaaagacggcgacgaggtttgtgagagtaacgtgagtaattccacgaccagtggtgaaaaggtcatctccgtggagttagggttagacaatggtcacagtgccattcagacaggcacattaattctggaggagattgagaccataaaagaaaagcaggatgttcaaccccaacaagcatcacccctggaaacgagcgagacagaccaccagcaacccgtcctcagtgatgtgcctcctctgcctgctattccagaccagcagattgtggaggaagcttccaatagtacactcgaaagcgcccctaatggaaaggactacgagagcaccgagatagtggctgaggagactaaacccaaagacactgagctgtcccaggaatctgacttcaaggagaacggtataaccgaggagaaatctaagtctgaagagtctaaaagaatggagcctatcgccatcataattacagacaccgaaatatccgaattcgatgtgactaaatcgaagaacgtgcccaaacagtttctgatttctgccgagaatgaacaggtgggggttttcgccaacgacaatggattcgaggatcgtacgtccgaacagtacgaaactttgctaatagaaaccgcatcaagtcttgtcaagaatgctatccagctctccatcgaacagttggtgaacgaaatggcgtcagatgataacaaaattaacaatctcctgcagtag

SEQ ID NO: 150300 - DNA, 1284 bp, Artificial Sequence
  derived and/or modified sequence
atggagaccaccatcagcgagatccacgtggagaacaaggacgagaagaggtccgccgaggggtcacccggagccgagcgccagaaagagaaagcttccatgctgtgttttaaaagacgcaagaaggccgctaaagctctaaaaccaaaagcaggatctgaggctgctgacgtcgcccggaagtgtccacaggaggccggggcatctgaccagcctgagccaacccgcggcgcgtgggccagcttgaaacgactagtgacccggcgaaaaagaagtgagagctcaaaacaacaaaagcccctggagggagaaatgcaacctgccatcaatgccgaagacgctgatctttcaaaaaaaaaggcgaagagcagactgaaaatcccctgcatcaaatttcccagggggccaaagcggtctaaccacagtaaaatcattgaagattccgactgtagtatcaaagtccaggaagaggccgaaatcttagatatacagacccagacccctctgaacgatcaggcgaccaaggccaagtctacccaggatttgtccgaaggtatctctcgcaaagatggggatgaagtttgtgagagcaacgtttcaaacagcacgaccagcggggagaaggttatttctgtagagttgggcctcgataatggacactctgccattcaaaccggcacattaatcctggaggaaattgaaacaatcaaagagaaacaagacgtccaaccccaacaagcctcacctctggagactagtgagactgaccatcagcaacccgtcctgagcgacgtgcccccactcccagcaatccctgaccagcagattgtcgaagaggccagtaattccacattagagagcgccccaaacggcaaggactacgagagtacggagatcgtcgcagaggaaactaagcctaaggacactgagctgtcacaggagtccgattttaaggagaatggtatcaccgaggaaaagtccaaatcggaagagagcaagcgcatggaaccaattgccattatcatcaccgataccgaaatatctgagttcgacgtgaccaagagcaaaaacgtacctaaacagttcctcattagcgctgaaaatgaacaggtcggagtattcgccaacgacaatggctttgaggatcgaacctccgaacagtacgaaacacttctgatcgagacagcgtctagcttggttaagaacgccatacagcttagcatcgagcagttggtaaatgagatggcgtcggacgacaacaaaataaacaatttgctgcagtag

SEQ ID NO: 150301 - DNA, 1284 bp, Artificial Sequence
  derived and/or modified sequence
atggaaacgaccattagtgagattcacgtggaaaataaggatgaaaagcgtagcgctgaggggtctccaggagcagagcggcagaaggagaaggcgtccatgctctgcttcaagagaaggaaaaaagctgccaaggctttaaagccaaaggccggtagcgaggccgctgatgttgcacggaaatgtccccaggaagccggagcttctgatcaaccagaacccactcggggagcctgggcctctctcaagcgattggtgacaagacggaagagatctgagagctcgaagcagcaaaagccacttgagggggagatgcagccagctatcaacgccgaggatgctgacctctccaagaaaaaggctaagtcccgattaaagatcccgtgtattaagtttcctaggggtcccaagcgaagcaaccactccaagattatcgaagatagcgattgtagcattaaagtccaggaagaggctgagatcctggacattcaaacgcagacacctttaaacgatcaggccaccaaagctaagtccactcaggatttgagtgagggaattagcaggaaagatggcgacgaagtatgtgagtccaacgtgagtaactccactacatccggtgagaaggttatcagtgtcgagttaggcctggataatggccacagcgccattcagacgggtaccctgattctggaagaaatcgagaccattaaggagaagcaagacgtccagccacagcaggccagccccctggaaacctctgagaccgatcaccaacaacctgtgctttcagatgtacctccgctgcccgcaatccctgaccagcaaattgttgaggaagcatccaactctacccttgaaagcgccccaaacggaaaagattacgagtcaacagagatcgtcgccgaggaaaccaaaccaaaagatactgaactgtcccaggagagtgatttcaaagagaatgggatcaccgaagagaaatctaagtccgaggagagcaagcgaatggaaccgattgccataattatcaccgacaccgaaattagtgagttcgatgtgacaaaaagcaagaatgtgcccaagcagttcctcatttctgccgagaatgaacaggtcggggtgtttgctaatgataatggctttgaggacaggacatctgagcaatacgagactctattgattgaaaccgcctctagtcttgtaaaaaatgcgatccaactgagcatcgaacagttggtaaatgaaatggcttccgacgacaataaaattaataacctgttgcagtag

SEQ ID NO: 150302 - DNA, 1284 bp, Artificial Sequence
  derived and/or modified sequence
atggaaaccaccatcagcgagattcacgtagagaacaaggatgagaagcggtctgcagagggtagcccaggcgctgaacgacagaaggaaaaggcctcaatgctgtgtttcaaacgcagaaaaaaggcagccaaggcactgaagcccaaagccggttctgaagccgcagacgttgcacggaagtgcccacaagaagccggagcctcggatcagcctgaaccaactaggggagcctgggcctccctgaaacgcctggtcactcgtaggaaacggagtgaatcttccaaacagcaaaagccattggagggtgagatgcagcctgctattaatgccgaggacgctgatctttctaaaaagaaggctaaaagccggcttaagattccttgtatcaagtttccaagagggcctaaaagaagcaaccactccaaaattattgaggattctgactgcagcatcaaagtgcaagaggaggcagaaattcttgatatccagacccagactcctctgaatgatcaggcgacaaaggctaaatctacacaggatctttctgaaggcatctctagaaaagatggtgatgaggtttgcgagtcaaatgtaagtaactccaccactagcggtgagaaggttattagcgttgagctaggactcgataacggacattctgctatccagacgggcacattaatactggaagagatagaaaccataaaagagaagcaggacgtgcagcctcaacaggcaagccccctagagacaagtgaaaccgaccatcagcagcccgtgctcagtgacgtgccacctctccccgctataccggaccagcagatcgtggaggaggcatccaatagcacacttgaatcggcccctaacggcaaagactacgaaagtactgagatagtcgctgaggagaccaagcccaaagataccgagcttagccaggaaagcgatttcaaagagaacggtatcacggaagagaagtcgaagtccgaagagagcaagcggatggaacccattgcaattatcatcacagacactgagataagtgagtttgacgtgacgaaatctaaaaacgttccgaagcagtttcttatctccgccgagaacgaacaggtgggtgtattcgccaacgacaatggcttcgaggaccgcaccagtgaacagtacgagacattactgattgagactgcctcgtcactcgtgaagaacgccatccagctctccatcgagcaactggtgaatgaaatggcaagcgatgataataaaatcaataatctgcttcagtag

SEQ ID NO: 150303 - protein, 1675 aa, Artificial Sequence
  derived and/or modified sequence
MAQILPIRFQEHLQLQNLGINPANIGFSTLTMESDKFICIREKVGEQAQVVIIDMNDPSNPIRRPISADSAIMNPASKVIALKAGKTLQIFNIEMKSKMKAHTMTDDVTFWKWISLNTVALVTDNAVYHWSMEGESQPVKMFDRHSSLAGCQIINYRTDAKQKWLLLTGISAQQNRVVGAMQLYSVDRKVSQPIEGHAASFAQFKMEGNAEESTLFCFAVRGQAGGKLHIIEVGTPPTGNQPFPKKAVDVFFPPEAQNDFPVAMQISEKHDVVFLITKYGYIHLYDLETGTCIYMNRISGETIFVTAPHEATAGIIGVNRKGQVLSVCVEEENIIPYITNVLQNPDLALRMAVRNNLAGAEELFARKFNALFAQGNYSEAAKVAANAPKGILRTPDTIRRFQSVPAQPGQTSPLLQYFGILLDQGQLNKYESLELCRPVLQQGRKQLLEKWLKEDKLECSEELGDLVKSVDPTLALSVYLRANVPNKVIQCFAETGQVQKIVLYAKKVGYTPDWIFLLRNVMRISPDQGQQFAQMLVQDEEPLADITQIVDVFMEYNLIQQCTAFLLDALKNNRPSEGPLQTRLLEMNLMHAPQVADAILGNQMFTHYDRAHIAQLCEKAGLLQRALEHFTDLYDIKRAVVHTHLLNPEWLVNYFGSLSVEDSLECLRAMLSANIRQNLQICVQVASKYHEQLSTQSLIELFESFKSFEGLFYFLGSIVNFSQDPDVHFKYIQAACKTGQIKEVERICRESNCYDPERVKNFLKEAKLTDQLPLIIVCDRFDFVHDLVLYLYRNNLQKYIEIYVQKVNPSRLPVVIGGLLDVDCSEDVIKNLILVVRGQFSTDELVAEVEKRNRLKLLLPWLEARIHEGCEEPATHNALAKIYIDSNNNPERFLRENPYYDSRVVGKYCEKRDPHLACVAYERGQCDLELINVCNENSLFKSLSRYLVRRKDPELWGSVLLESNPYRRPLIDQVVQTALSETQDPEEVSVTVKAFMTADLPNELIELLEKIVLDNSVFSEHRNLQNLLILTAIKADRTRVMEYINRLDNYDAPDIANIAISNELFEEAFAIFRKFDVNTSAVQVLIEHIGNLDRAYEFAERCNEPAVWSQLAKAQLQKGMVKEAIDSYIKADDPSSYMEVVQAANTSGNWEELVKYLQMARKKARESYVETELIFALAKTNRLAELEEFINGPNNAHIQQVGDRCYDEKMYDAAKLLYNNVSNFGRLASTLVHLGEYQAAVDGARKANSTRTWKEVCFACVDGKEFRLAQMCGLHIVVHADELEELINYYQDRGYFEELITMLEAALGLERAHMGMFTELAILYSKFKPQKMREHLELFWSRVNIPKVLRAAEQAHLWAELVFLYDKYEEYDNAIITMMNHPTDAWKEGQFKDIITKVANVELYYRAIQFYLEFKPLLLNDLLMVLSPRLDHTRAVNYFSKVKQLPLVKPYLRSVQNHNNKSVNESLNNLFITEEDYQALRTSIDAYDNFDNISLAQRLEKHELIEFRRIAAYLFKGNNRWKQSVELCKKDSLYKDAMQYASESKDTELAEELLQWFLQEEKRECFGACLFTCYDLLRPDVVLETAWRHNIMDFAMPYFIQVMKEYLTKVDKLDASESLRKEEEQATETQPIVYGQPQLMLTAGPSVAVPPQAPFGYGYTAPPYGQPQPGFGYSM

SEQ ID NO: 150304 - DNA, 5028 bp, Artificial Sequence
  derived and/or modified sequence
atggcgcaaatactgccaatccgcttccaagagcacctgcagctacaaaatctgggtatcaaccccgctaacataggtttctctactctgacgatggagtccgacaaattcatttgtatcagggaaaaagtgggggagcaggcacaggtcgtgatcattgatatgaatgatccctctaatcctatccgccggccaatttctgcagatagtgccatcatgaacccagcctccaaggttattgccctgaaggcgggaaagaccctccaaatctttaacatcgagatgaagtccaagatgaaggcccatacaatgacggacgatgtcaccttttggaagtggatcagcctgaatactgttgcactggtgacggacaacgctgtctaccattggagtatggagggcgaatcccagcccgttaagatgtttgacagacatagtagcttggcaggctgccagatcataaattataggactgacgcaaaacaaaagtggttgctgctaacaggaatctcagctcagcagaaccgtgttgtgggtgcaatgcagctctatagcgtagatcgaaaggtttctcagccaatcgagggccacgcagccagcttcgcccagtttaaaatggagggcaacgccgaggaaagcactcttttctgcttcgctgtccggggccaggcaggaggcaagcttcacattatcgaagtaggcactccccccaccggcaatcagccctttccaaaaaaagcagtcgatgtattctttcccccagaggcccagaacgatttccccgtcgcaatgcaaatttcagaaaagcatgacgtggtatttctaattactaagtatggctacatccatctctatgatttggaaactggtacctgcatttacatgaatcgaattagcggcgaaacaattttcgtaaccgccccacacgaggcaactgctgggataataggagtgaacaggaagggacaggtgttaagtgtttgcgtggaagaagagaacattattccatatattacaaatgtgctgcagaacccagatttggccttgcgcatggctgttcgaaataatttagctggcgccgaggaactcttcgcccggaagttcaacgccctgttcgctcaaggcaattactctgaggccgccaaagtggctgctaatgcccccaagggtattctgcggaccccagacaccattagacgcttccagtctgtacctgctcaacctggccagactagccccctcctgcagtacttcggtatcttgttggatcagggtcagctcaataagtatgagtcactggagctgtgtagacccgttctccagcagggtcgcaaacagctgcttgagaagtggctgaaagaagataagctggagtgtagcgaagaactgggcgacttagtcaagtctgtggatccaactcttgctctgtcagtgtacctgagagcaaacgtgcctaacaaggttatccagtgtttcgctgagaccggacaggtgcaaaaaatcgtactgtatgccaagaaagtggggtatacccccgactggatctttctcctccgcaatgttatgaggatttcacccgatcaaggccagcagtttgctcagatgcttgttcaggatgaagagcccctggcagatatcacccaaattgttgacgtcttcatggagtacaatctgattcagcagtgtactgcatttcttctcgacgcactgaagaacaaccggcctagtgagggaccgctccagacccggctgctggaaatgaacctcatgcatgctcctcaggtagctgatgctatcctcgggaatcagatgtttacccattatgaccgcgctcatattgcacaactctgtgagaaggccgggttactccagcgcgcgctggaacacttcacggatctttatgacatcaaacgggcagtagtccacacacatttactgaatccagagtggctggtgaattattttgggtccttaagtgtagaagatagcctcgagtgtctgagagccatgctgtcagcaaatatccggcaaaatctgcaaatttgtgtccaggtcgcttcaaaataccacgagcagctctccacacagagcttaatcgagctctttgaatcctttaaatcattcgagggtctgttttacttcctgggcagtattgtgaatttctcccaggaccccgacgtacattttaagtacattcaggcggcatgcaagacagggcaaattaaagaagtcgaaaggatttgtcgagagtctaactgttacgaccccgaacgagtgaaaaatttcctgaaggaggcaaaactgacagaccagctgccactgatcattgtgtgcgatcgtttcgatttcgtccatgaccttgtactgtacctgtatcgcaataatttacaaaagtatatcgagatctatgtccagaaggtgaaccccagcagactcccagttgtgattggagggttgctagacgttgactgctccgaggatgtgattaagaatctcatcctcgtggtacgtggccaattcagcacagatgagttggtggccgaagttgaaaagcggaatagactgaagctgctactcccttggctggaggctaggatacacgaaggttgtgaagagcccgccacgcacaatgcccttgccaagatctatattgacagcaataataaccctgagagatttttgcgggagaatccgtattacgacagtcgtgtcgttggaaagtactgcgagaaaagagatcctcatcttgcatgcgtggcctatgagaggggacagtgtgatttggaactgatcaacgtgtgtaatgagaactcactgttcaaatccctgtcgagatatcttgtgcggaggaaggacccagagctatggggcagtgtactgctggagtctaacccctaccgaaggcctttgattgaccaagtggttcaaaccgctctttccgagacacaggatcctgaggaagtatctgtgaccgttaaggcttttatgaccgcagacctacccaatgagttaattgagctcctcgagaaaattgttctggacaattctgtcttttcagagcatcgtaaccttcaaaacctcttgatcctgacagccattaaggccgatcgaacacgggtaatggaatacatcaatagactggataattacgacgccccggacattgccaatatagctatctcaaatgaactctttgaggaagccttcgccatttttcggaagttcgatgtcaacacatcagcagtacaagttttgatcgaacatatcggcaatctcgacagggcttacgaatttgctgagcggtgcaatgaacccgctgtgtggagtcagctggccaaggcccagctgcagaagggcatggttaaagaagcaattgattcctatatcaaagctgacgatccttctagttatatggaagtggtacaggctgctaacacctcaggaaactgggaggagttggtcaaatatctccagatggctaggaaaaaagcccgagaaagctacgtggaaaccgagctgattttcgcgctggcaaagaccaatagactggccgagctcgaagagtttatcaacggccctaacaacgctcacatccaacaggttggtgatagatgttatgacgagaaaatgtatgacgccgcaaagctgctatataataatgtttccaacttcggccgtcttgcaagtacactggtccatctcggggaataccaggcagcagtggatggagctcgcaaggccaacagcacccgaacatggaaggaggtgtgcttcgcctgcgtggatggcaaggagtttcgtctcgcccagatgtgcggtctccacatcgttgtccacgcggacgagctcgaggagcttattaactactaccaagaccggggctatttcgaggagttgataactatgctcgaggccgcattgggccttgaacgcgcccacatgggaatgtttactgaacttgcaatcctgtactcaaagttcaaaccccaaaagatgcgcgaacacttggagcttttctggagcagagtgaacatccctaaggtgctgagagctgccgaacaggcccatttgtgggccgaacttgtattcctgtacgacaagtacgaagaatatgacaatgcaattatcaccatgatgaaccaccctacagatgcatggaaagaaggccaatttaaggatattattacgaaggttgcaaacgtagagttgtactaccgagctattcaattctacctagagtttaagcctctccttcttaacgacctgctaatggtgttatcacctaggctggatcacactagagcagtaaactactttagtaaagttaaacagttgccacttgtcaaaccttatttgaggtctgtgcagaatcacaataataaatctgtgaacgagagcctgaacaatctgttcattaccgaagaagattatcaggcccttcgcacatcaatcgatgcatatgacaacttcgacaacatctcattggcccagcgtcttgaaaagcatgagctcatcgagttccggcgcatcgcagcatacctgtttaagggcaacaatcggtggaaacaaagcgtagagctctgtaaaaaggactctctatataaggacgcaatgcagtacgcaagcgagagcaaagatactgaacttgcagaggaactcctgcaatggtttctgcaagaagagaagcgcgaatgtttcggcgcctgccttttcacttgttacgatctgctcagaccagacgtcgtcttagagaccgcatggaggcacaatataatggattttgccatgccctactttatacaagtcatgaaggagtacctaaccaaagtggataagcttgacgccagtgagagtctgcggaaggaggaggagcaggcgacagagacccagcccattgtgtacggccaaccccagctgatgttaactgctggaccaagcgtggccgtcccgccccaagctccttttgggtacggctatacagcccctccctatgggcagccgcagcccggatttgggtattcaatgtag

SEQ ID NO: 150305 - DNA, 5028 bp, Artificial Sequence
  derived and/or modified sequence
atggcccagatcctgcccatccgcttccaggagcacctgcagctgcagaacctgggcatcaacccagccaacatcggcttcagcaccctgaccatggagagtgacaagttcatctgcatccgggagaaggtgggggagcaggcccaggtggtgatcatcgacatgaatgaccccagcaaccccatcagaagacccatctctgctgacagcgccatcatgaacccagccagcaaggtgattgccctgaaggccggcaagaccctgcagatcttcaacatcgagatgaagagcaagatgaaggcccacaccatgacagatgatgtgaccttctggaagtggatcagcctgaacacagtggccctggtgacagacaatgctgtgtaccactggagcatggagggggagagccagcctgtgaagatgtttgacagacacagcagcctggccggctgccagatcatcaactacagaacagatgccaagcagaagtggctgctgctgaccggcatcagcgcccagcagaacagagtggtgggcgccatgcagctgtacagcgtggacaggaaggtgtcccagcccatcgagggccacgccgccagctttgcccagttcaagatggagggcaatgctgaggagagcaccctcttctgctttgctgtgcggggccaggccggcggcaagctgcacatcatcgaggtgggcaccccacccaccggcaaccagcccttccccaagaaggctgtggatgtgttcttccccccagaggcccagaatgacttccctgtggccatgcagatcagcgagaagcatgatgtggtgttcctgatcaccaagtatggctacatccacctgtatgacctggagaccggcacctgcatctacatgaaccgcatctctggagagaccatctttgtgacagcccctcatgaggccacagctggcatcatcggcgtgaacaggaagggccaggtgctgtctgtgtgtgtggaggaggagaacatcatcccctacatcaccaacgtgctgcagaacccagacctggccctgaggatggctgtgaggaacaacctggccggggctgaggagctgtttgccaggaagttcaatgccctgtttgcccagggcaactacagcgaggccgccaaggtggccgccaatgcccccaagggcatcctgcggaccccagacaccatccgccgcttccagagcgtgcctgcccagcccggccagaccagccccctgctgcagtacttcggcatcctgctggaccagggccagctgaacaagtatgagagcctggagctgtgcaggcctgtgctgcagcagggcaggaagcagctgctggagaagtggctgaaggaggacaagctggagtgcagcgaggagctgggggacctggtgaagtctgtggaccccaccctggccctgtctgtgtacctgcgggccaacgtgcccaacaaggtgatccagtgctttgctgagaccggccaggtgcagaagatcgtgctgtatgccaagaaggtgggctacaccccagactggatcttcctgctgagaaatgtgatgaggatcagcccagaccagggccagcagtttgcccagatgctggtgcaggatgaggagcccctggccgacatcacccagatcgtggatgtgttcatggagtacaacctgatccagcagtgcacagccttcctgctggatgccctgaagaacaaccggcccagcgagggccccctgcagacccggctgctggagatgaacctgatgcacgccccccaggtggctgatgccatcctgggcaaccagatgttcacccactatgaccgggcccacatcgcccagctgtgtgagaaggccggcctgctgcagagggccctggagcacttcacagacctgtatgacatcaagagagctgtggtgcacacccacctgctgaaccctgagtggctggtgaactacttcggcagcctgtctgtggaggacagcctggagtgcctgcgggccatgctgagcgccaacatccggcagaacctgcagatctgtgtgcaggtggccagcaagtaccacgagcagctgagcacccagagcctgattgagctgtttgagagcttcaagagctttgagggcctcttctacttcctgggcagcatcgtgaacttcagccaggaccctgatgtgcacttcaagtacatccaggccgcctgcaagacaggccagatcaaggaggtggagcgcatctgccgggagagcaactgctatgaccctgagcgggtgaagaacttcctgaaggaggccaagctgacagaccagctgcccctcatcatcgtgtgtgacagatttgattttgtgcatgacctggtgctgtacctgtacagaaacaacctgcagaagtacatcgagatctacgtgcagaaggtgaaccccagccggctgcctgtggtgattggaggcctgctggatgtggactgcagtgaagatgtgatcaagaacctgatcctggtggtgcggggccagttcagcacagatgagctggtggccgaggtggagaagaggaaccggctgaagctgctgctgccctggctggaggcccgcatccacgagggctgtgaggagcccgccacccacaatgccctggccaagatctacatcgacagcaacaacaaccctgagcgcttcctgcgggagaacccctactatgacagccgggtggtgggcaagtactgtgagaagagggacccccacctggcctgtgtggcctatgagcggggccagtgtgacctggagctgatcaacgtgtgcaatgaaaacagcctcttcaagagcctgagccgctacctggtgcggaggaaggaccctgagctgtggggctctgtgctgctggagagcaacccctacagaagacccctgattgaccaggtggtgcagacagccctgtctgagacccaggaccctgaggaggtgtctgtgacagtgaaggccttcatgacagctgacctgcccaatgagctgattgagctgctggagaagatcgtgctggacaacagcgtcttcagcgagcacaggaacctgcagaacctgctgatcctgacagccatcaaggctgacaggaccagggtgatggagtacatcaaccggctggacaactatgatgccccagacatcgccaacatcgccatcagcaatgagctgtttgaggaggcctttgccatcttcaggaagtttgatgtgaacaccagcgctgtgcaggtgctgattgagcacatcggcaacctggaccgggcctatgaatttgctgagcgctgcaatgaacctgctgtgtggagccagctggccaaggcccagctgcagaagggcatggtgaaggaggccatcgacagctacatcaaggcagatgaccccagcagctacatggaggtggtgcaggccgccaacaccagcggcaactgggaggagctggtgaagtacctgcagatggccaggaagaaggcccgggagagctatgtggagacagagctgatctttgccctggccaagaccaaccggctggccgagctggaggagttcatcaatggccccaacaatgcccacatccagcaggtgggggaccgctgctatgatgagaagatgtatgatgctgccaagctgctgtacaacaacgtgagcaactttggccgcctggccagcaccctggtgcacctgggggagtaccaggccgctgtggatggagccaggaaggccaacagcaccaggacctggaaggaggtgtgctttgcctgtgtggatggcaaggagttccggctggcccagatgtgtggcctgcacatcgtggtgcatgctgatgagctggaggagctgatcaactactaccaggaccggggctactttgaggagctgatcaccatgctggaggccgccctgggcctggagcgggcccacatgggcatgttcacagagctggccatcctgtacagcaagttcaagccccagaagatgagggagcacctggagctgttctggagccgggtgaacatccccaaggtgctgcgggctgctgagcaggcccacctgtgggccgagctggtgttcctgtatgacaagtatgaggagtatgacaatgccatcatcaccatgatgaaccaccccacagatgcctggaaggagggccagttcaaggacatcatcaccaaggtggccaacgtggagctgtactaccgggccatccagttctacctggagttcaagcccctgctgctgaatgacctgctgatggtgctgagcccccggctggaccacaccagggctgtgaactacttcagcaaggtgaagcagctgcccctggtgaagccctacctgcggtctgtgcagaaccacaacaacaagtctgtgaatgaaagcctgaacaacctcttcatcacagaggaggactaccaggccctgcggaccagcattgatgcctatgacaactttgacaacatcagcctggcccagaggctggagaagcatgagctgattgagttcagaagaattgctgcctacctgttcaagggcaacaaccgctggaagcagagcgtggagctgtgcaagaaggacagcctgtacaaggatgccatgcagtatgccagcgagagcaaggacacagagctggccgaggagctgctgcagtggttcctgcaggaggagaagcgggagtgcttcggggcctgcctcttcacctgctatgacctgctgcggccagatgtggtgctggagacagcctggaggcacaacatcatggactttgccatgccctacttcatccaggtgatgaaggagtacctgaccaaggtggacaagctggatgccagcgagagcctgaggaaggaggaggagcaggccacagagacccagcccatcgtgtatggccagccccagctgatgctgacagctggccccagcgtggccgtgcccccccaggcccccttcggctacggctacacagccccaccctacggccagccccagcccggcttcggctacagcatgtag

SEQ ID NO: 150306 - DNA, 5028 bp, Artificial Sequence
  derived and/or modified sequence
atggcccagatcctgcccatccggttccaggagcacctgcagctgcagaatttgggcattaatcctgcaaacattggcttctctacactcactatggaatctgacaagttcatctgcattcgggagaaggtcggcgaacaggcccaagtcgtgattatcgacatgaacgaccccagtaatcccattcgcagaccaatatcagctgacagtgctatcatgaatccagcctccaaagtgatcgccttgaaagccgggaagaccctgcaaatttttaacattgagatgaaatcaaagatgaaagcacacactatgactgacgacgtgaccttttggaagtggatctcattaaacacagtcgcactcgtgacagataatgccgtctatcactggtctatggagggcgaaagtcagcctgtgaagatgttcgacaggcatagctcactcgcagggtgtcagattatcaattatagaactgacgccaaacagaagtggttgctgctgacaggcatctcagcgcagcagaatcgtgtggtgggagccatgcaactttatagtgtggatcgcaaagtttctcagccaatcgaaggccacgccgctagtttcgcacagttcaagatggaaggcaatgctgaagagtccactctattctgcttcgccgttagggggcaggcgggcggcaagctccacatcatcgaagtggggaccccacctacagggaatcaacccttccccaaaaaggccgtggatgtgttcttccctccagaagcacaaaatgacttccctgtggctatgcagatttccgaaaagcacgatgtagtgttcttgataaccaagtatgggtacattcatctctacgacctggaaaccggtacgtgtatctatatgaatagaatctcaggggaaaccatctttgtgactgctccacacgaagccaccgccggaatcattggggtcaacagaaaggggcaggtactgtccgtttgcgtggaggaagaaaacattattccatatattacaaatgtgttgcagaatcccgatcttgccctgcgaatggccgtgaggaataatctagccggggcagaggagttattcgccagaaagttcaatgccctcttcgcccaaggcaattacagcgaagctgccaaagttgccgccaatgcacccaagggtatcttgaggacccccgataccatcaggcgcttccaatcggtccccgcacagcccggtcaaacatctcccctcctgcagtattttggaatactgctagaccaaggacagctgaacaagtacgaatctctcgaattgtgtcgaccagtcctgcaacaaggaaggaagcaactccttgaaaagtggctgaaggaagacaagttggagtgctccgaagaactcggggatctcgtcaaaagcgtcgatccaacgttggccctttctgtgtatctaagagcgaatgtccctaataaagtgatccagtgttttgccgaaaccggccaggtccagaagatagtgctctatgcaaaaaaggtgggatacactcctgattggatattcctgctccgcaacgtaatgcgcatcagtccagaccagggtcagcaattcgcgcaaatgttggtgcaggatgaggaaccactcgccgatattacacagatcgtggacgtcttcatggagtacaacttaatccagcagtgcaccgcttttctcctggacgcccttaagaataataggccaagtgagggtcctttacagacacgtcttttagagatgaatctcatgcacgcaccccaggtggctgatgccatccttggtaaccaaatgttcactcattacgatcgagcccacattgcccagctttgtgaaaaggccggcctgctgcagcgcgccctcgagcattttaccgatctgtatgacataaagcgcgctgttgtacacacacacctgctcaatcctgagtggctggtgaactacttcgggtcactttctgtggaagatagtcttgaatgcttgcgcgcgatgctcagcgctaatattaggcaaaacctccaaatttgcgttcaagtggctagtaaatatcacgaacagctgtctacccagtcactgatcgaactgtttgagtcgtttaagtcattcgaagggctgttctactttctgggatctattgtaaattttagccaggacccagacgttcacttcaaatatatccaggccgcgtgtaagactggccagatcaaagaggttgagcgaatttgtcgcgaaagcaattgctatgatccagaaagggttaagaatttcctgaaagaggcaaagctcacagatcaattgcccctcattatcgtgtgtgataggtttgattttgttcatgacctggtgctgtacttgtacagaaataacctgcagaaatatatcgaaatttacgtgcagaaagtcaaccctagccggctgcccgtggtcatcgggggcctgttggatgtagattgcagcgaagatgttataaaaaacctgattctagtcgtgaggggacagtttagtacggacgagttggtggccgaagtagagaaacggaacagattgaaactcttactgccttggctcgaagcccggattcacgaagggtgcgaagaacctgctacccataacgcccttgcaaaaatatacattgacagcaacaataacccagagcgattcttaagagaaaatccttattatgatagcagagtggtgggcaagtactgcgaaaagcgagacccacatctggcctgtgttgcctacgaaagggggcaatgcgatctggagctgatcaatgtgtgcaatgagaacagcttattcaaatccctgtccagatatttggtgcgaagaaaggacccagaactttgggggagcgtactgctcgagagcaatccttacagaaggcctttaattgatcaagtcgttcaaactgcgctgagcgagacacaggaccctgaggaagtgagtgtcactgtgaaggccttcatgactgcggacctccctaacgagttgatagagcttctggagaagatcgtcctagataacagcgtcttcagtgaacaccggaatctgcaaaacttgctgattttgacagccattaaagccgaccgaacaagggtgatggagtacatcaataggcttgataattatgatgccccagatatcgccaacatagccatctcaaatgaattgttcgaggaagcatttgccatctttcggaagtttgacgtcaacacaagtgccgtacaggtccttattgagcacatcgggaatttggaccgtgcttacgaattcgcagaacggtgcaacgaacctgccgtatggtcccagctcgccaaagcccagttgcagaagggcatggttaaggaagcgattgactcttacataaaagcagacgacccctcgagttatatggaagttgtgcaggccgccaacacttccggaaactgggaggagctcgtcaagtatttgcaaatggccagaaagaaggccagggagagctacgtggagacagagctcatctttgctcttgcaaaaaccaataggctcgcagaattggaggagtttataaatggccccaataatgcccacatacagcaggtgggggacaggtgttatgatgagaagatgtacgatgcagccaagttactgtacaacaacgtctcaaatttcgggaggttagctagcacattggttcatttgggagagtaccaggccgccgttgatggggctcgtaaggccaattctacacgaacgtggaaagaggtgtgttttgcgtgtgtggatggcaaagagtttagattagctcagatgtgcggcttgcatatagttgtacacgctgacgagttggaggagttaattaattactaccaggaccgaggatacttcgaagagctgataacaatgctggaggctgcgctgggactcgagcgtgcacacatgggcatgttcaccgaactggctatcctctattcaaagttcaagccacagaagatgcgagaacacctggagctgttctggtcgcgcgtgaatatccccaaggtgttgagggcggccgaacaggctcatctgtgggctgaattggtattcttatatgacaagtacgaggaatacgataatgcaataataaccatgatgaaccatcccaccgatgcttggaaagaggggcagttcaaggatattattacaaaggtggcgaacgtggaactatattaccgcgcaattcagttctatctcgagtttaaacctctgttgctcaacgacctgctgatggttttgtcacccaggctagaccatactcgcgccgtgaattacttcagcaaagtgaaacagttgcctctagtgaagccctacctccgatccgtgcagaatcacaacaacaagagcgtgaacgagagtttgaacaatctttttatcacagaggaggattaccaggcgctgaggacctcaatcgacgcatatgacaatttcgataatatcagcttggcccagagactcgaaaaacatgagctgattgagtttcgacgcattgctgcctacctgtttaaagggaacaacagatggaagcagagcgtggagctatgcaaaaaagactctctctacaaagacgcgatgcagtatgcctccgaatccaaggataccgaactagccgaagaactgctgcagtggttcttgcaggaagagaagcgggaatgcttcggcgcttgtctatttacatgctacgacctgctgagacctgacgtcgtgctggaaacagcatggcgccacaatatcatggactttgccatgccatacttcatccaggttatgaaagagtacttaactaaagtcgataaactagatgcctcggagtccttacggaaggaagaagaacaggcgacggagactcagcccatcgtatatggccagccccagctgatgctcaccgcaggaccctctgttgctgtgccaccccaagctccctttggatatggatataccgcacctccttatggtcagccacagcccggatttggatactcaatgtag

SEQ ID NO: 150307 - DNA, 5027 bp, Artificial Sequence
  derived and/or modified sequence
atggcccaaatcctgcccatccgatttcaggaacacctgcagttgcagaacctgggtatcaatcctgcgaacatagggttctccacccttacaatggaaagtgacaagttcatatgtattagggagaaggttggggaacaggcacaggttgtgattattgacatgaacgaccctagtaaccccatcagacgcccaattagtgctgatagtgccatcatgaatcctgcaagtaaagtgatcgctctaaaagctggaaaaacactgcagatcttcaatatagaaatgaaaagcaagatgaaggcccatacaatgactgatgatgtcactttctggaagtggatcagtttgaataccgttgccctggtgacagataacgcagtgtaccattggtctatggagggagagtcccagcccgtcaagatgttcgacagacatagttccctggcgggttgccagattattaattacagaaccgacgctaagcaaaagtggctcttgctcacaggtattagcgcacagcaaaaccgggttgtgggagccatgcagttgtattcagttgacagaaaagtctcacagcccatcgaggggcatgctgcctctttcgcccagttcaagatggaaggaaacgctgaggagagcaccctcttctgttttgccgttcggggacaggccggaggtaagttacacatcatcgaagtcggcactccccctactgggaaccagccatttccaaagaaggctgtggacgtgttctttccacctgaagcccagaatgatttcccggtggctatgcagatctcagaaaagcatgatgtggtgttcctcataaccaaatacggttatatacatctgtatgatttggaaactgggacctgtatctacatgaaccgcatttccggagaaacgatctttgtgaccgcccctcacgaggccactgccggtatcattggagtgaaccggaaaggccaggtgctttccgtgtgcgtagaagaggagaacattataccctacatcaccaatgttttgcagaaccctgacctggctcttaggatggccgtgagaaacaatctggctggggcagaggaactgtttgctcgaaagtttaacgctctcttcgcccaaggcaactactctgaggcggctaaggtcgcagctaacgcaccgaaaggcattctgaggacaccagataccattcgcagattccagagcgtgccagctcagccaggacaaacctctcccttgttgcagtatttcgggattctccttgaccaaggccagctgaacaagtacgagtcattggaactttgccggcctgttttgcagcaggggcgaaagcaactgctcgaaaagtggctgaaggaggacaagttggagtgctccgaagagctgggcgatctggttaagtccgttgaccccactctggccttgtccgtctatctccgagcaaacgtgccaaacaaagtgatccagtgctttgctgagaccggtcaggtgcagaagatcgtactgtatgcaaagaaggttggatacacgcccgactggatctttttacttcgaaacgtaatgcgtatttctcccgatcagggacagcagttcgcccagatgctagtgcaggacgaggaacctctcgctgatatcacacaaatcgtggatgtgtttatggaatacaacctcattcagcagtgcacagctttcctgctcgatgcgctaaaaaataaccggcctagcgaagggccactgcagacccgtcttcttgagatgaacttgatgcatgcaccccaggtagctgatgcgatattgggcaatcagatgttcactcattatgatcgggctcacatcgcgcaactctgcgagaaagccggattgctccaaagagctctcgagcattttacggacctctacgacatcaagcgagctgtagtccatacgcatctgttgaatcctgaatggttggtgaattatttcggtagtctcagtgtagaagatagcctcgaatgcctgcgtgctatgctgagcgcgaatatacgtcaaaacctgcagatatgcgtgcaggtagctagcaagtatcatgagcagctttccactcagtcactgattgagctgtttgagtccttcaagagctttgagggcttgttctattttctgggatccattgtcaattttagccaggaccctgatgtccacttcaaatatatccaggcagcctgtaagaccggacagatcaaggaagttgaaaggatttgccgcgagtcaaattgttacgacccggagagggttaaaaattttctgaaagaggccaagctgaccgatcagctcccattaattatcgtctgtgacagattcgattttgtccatgacttggtgctttacctttaccgcaacaatttacaaaagtatatcgaaatctatgtgcagaaggttaatccctccaggcttccagtggtgatcgggggactgctggacgtggactgctccgaagatgtcataaagaatctgatattggtggtcagaggccagttctctacagatgaactggtcgcagaggtggagaagcgaaaccgcctgaaactgttactcccatggttggaggcaaggattcacgaaggctgtgaggagccagcgacacacaacgctctggccaagatatacatagactcgaacaacaatccagaacgctttttaagggaaaacccatattatgactcacgcgttgtaggcaagtactgcgagaagagggatcctcacctcgcctgcgtcgcatatgaaaggggccagtgcgacttggaacttatcaatgtctgtaacgagaatagcctgtttaagagcctcagcaggtacctggtgcggagaaaggaccccgagctgtgggggtctgtgctgttggagtctaatccgtatcgaagacccttaatcgatcaggtggttcagacagccctcagcgagacacaagacccagaagaggtaagtgtgacagtgaaggcctttatgacagcagacttacctaacgagctgatagaacttttggaaaaaatcgtgctggacaattcggtattctcagagcaccgaaatcttcaaaacttgctgatcctcactgcaattaaagccgaccggacccgcgttatggaatatattaatcggcttgataattacgatgcccctgatatcgccaacattgcaatcagtaacgagctttttgaagaggcattcgctatattccggaaatttgacgtcaacaccagcgccgtgcaggtcttgatcgagcacattgggaacctcgatcgggcatatgaattcgccgagagatgtaacgagcccgctgtgtggtcccagctagccaaagcccaactgcagaagggcatggtaaaagaggccatcgactcatatattaaagcggacgacccctcttcttacatggaggtggttcaggcagccaacaccagcggcaattgggaggagcttgtcaagtaccttcagatggcacgcaagaaagctagagagagttacgtggagactgaactcatctttgcactggccaagacaaatcgtttggcagagctcgaggagtttattaatggacctaacaatgcacatattcagcaggtaggggatagatgttacgacgaaaagatgtatgatgccgcaaaacttttgtataataacgtcagcaactttggacgcctggcttcaacactggtccacctcggggagtaccaggcagcggttgacggtgccaggaaggcgaacagtacaagaacctggaaagaggtgtgcttcgcctgcgtggatggaaaggagtttcgactcgcacaaatgtgtggtctccacattgtcgttcatgctgatgagctcgaagaactaataaactactaccaggatagaggatattttgaagaattgataaccatgcttgaagcggcactcggcttggagcgcgctcacatgggcatgttcactgaactggcgatcctttattctaagttcaagccccagaagatgcgagaacatctcgagcttttttggtcccgagtgaacattcccaaagtgttgcgagcagctgaacaggctcatctgtgggccgaactagtgttcctgtacgataaatacgaagaatacgacaatgccatcattacaatgatgaatcacccgacagacgcttggaaggagggccaattcaaagatatcattaccaaggtcgccaatgtcgaactgtactaccgcgcaattcagttttacctggagtttaaacctctccttctgaacgacttgctgatggttctctccccaaggttagatcataccagggcagtgaattacttctctaaagtgaaacaactccccctcgtgaaaccctacctccggtccgtgcagaatcacaataacaagagcgtcaacgaatcccttaacaaccttttcattacggaggaagactatcaggctcttagaactagcatcgatgcgtacgataattttgacaacatctccttagcacaacggctggaaaagcacgagttaatagagtttagacgcattgccgcttatctcttcaaggggaataacagatggaagcagagtgtagaactttgtaaaaaggacagtttatacaaggacgctatgcagtacgccagcgaatccaaagatacagagctggctgaagaactgcttcagtggttccttcaggaagaaaagagagagtgctttggcgcatgtctcttcacttgctatgatctcctgcggcctgacgtggtgcttgaaacggcctggagacacaacataatggacttcgccatgccttatttcatacaagtcatgaaagagtacttaacgaaagtagataagctcgacgcctctgagtccctgagaaaggaagaagagcaggctaccgagacccagccaatagtttacgggcagccccagctgatgctcaccgctggtccctcagtcgctgtgcctccacaggccccattcggttatggctacactgcacccccatatggacaacctcagccaggcttcggatactctatgta

SEQ ID NO: 150308 - DNA, 7760 bp, Artificial Sequence
  derived and/or modified sequence
ggcggagttctgtcgccgggatccttccgctgggctcagccgtttccggagtctgcgctgcgcccggttccgccattgcggctctcctggcccctggagcctccgcccccgacccgagctctttcgtctgcctgccagtttcctgcgtccccggagaggatcctgctgagcccagcctcccccctccccttctcctcctctcccttggagagcccgggcagccactgccccgcagccccagtgacaggaggagaccataacccccgacagcgccatggcccagattctgccaattcgttttcaggagcatctccagctccagaacctgggtatcaacccagcaaacattggcttcagtaccctgactatggagtctgacaaattcatctgcattagagaaaaagtaggagagcaggcccaggtggtaatcattgatatgaatgacccaagtaatccaattcgaagaccaatttcagcagacagcgccatcatgaatccagctagcaaagtaattgcactgaaagctgggaaaactcttcagatttttaacattgaaatgaaaagtaaaatgaaggctcataccatgactgatgatgtcaccttttggaaatggatctctttgaatacggttgctcttgttacggataatgcagtttatcactggagtatggaaggagagtctcagccagtgaaaatgtttgatcgccattctagccttgcagggtgccagattatcaattaccgtacagatgcaaaacaaaagtggttacttctgactggtatatctgcacagcaaaatcgtgtggtgggagctatgcagctatattctgtagataggaaagtgtctcagcccattgaaggacatgcagctagctttgcacagtttaagatggaaggaaatgcagaagaatcaacgttattttgttttgcagttcggggccaagctggagggaagttacatattattgaagttggcacaccacctacagggaaccagccctttccaaagaaggcagtggatgtcttctttcctccagaagcacaaaatgattttcctgttgcaatgcagatcagtgaaaagcatgatgtggtgttcttgataaccaagtatggttatatccacctctatgatcttgagactggtacctgcatctacatgaatagaatcagtggagaaacaatttttgttactgcacctcatgaagccacagctggaataattggagtaaacagaaagggacaagttctgtcagtgtgtgtggaagaagaaaacataattccttacatcaccaatgttctacaaaatcctgatttggctctgagaatggctgtacgtaataacttagccggtgctgaagaactctttgcccggaaatttaatgctctttttgcccagggaaattactcggaggcagcaaaggtggctgctaatgcaccaaagggaattcttcgtactccagacactatccgtcggttccagagtgtcccagcccagccaggtcaaacttctcctctacttcagtactttggtatccttttggaccagggacagctcaacaaatacgaatccttagagctttgtaggcctgtacttcagcaagggcgaaaacagcttttggagaaatggttaaaagaagataagctggaatgttctgaagaactgggtgatcttgtgaaatctgtggaccctacattggcacttagtgtgtacctaagggctaacgtcccaaataaagtcattcagtgctttgcagaaacaggtcaagtccaaaagattgttttatatgctaaaaaagttggatacactccagattggatatttctgctgagaaatgtaatgcgaatcagtccagatcagggacagcagtttgcccaaatgttagttcaagatgaagagcctcttgctgacatcacacagattgtagatgtctttatggaatacaatctaattcagcagtgtactgcattcttgcttgatgctctgaagaataatcgcccatctgaaggtcctttacagacgcggttacttgagatgaaccttatgcatgcgcctcaagttgcagatgctattctaggcaatcagatgttcacacattatgaccgggctcatattgctcaactgtgtgaaaaggctggcctactgcagcgtgcattagaacatttcactgatttatatgatataaaacgtgcagtggttcacacccatcttcttaaccctgagtggttagtcaactactttggttccttatcagtagaagactccctagaatgtctcagagccatgctgtctgccaacatccgtcagaatctgcagatttgtgttcaggtggcttctaaatatcatgaacaactgtcaactcagtctctgattgaactttttgaatctttcaagagttttgaaggtctcttttattttctgggatccattgttaactttagccaggacccagatgtgcactttaaatatattcaggcagcttgcaagactgggcaaatcaaagaagtagaaagaatctgtagagaaagcaactgctacgatcctgagcgagtcaagaattttcttaaggaagcaaaactaacagatcagctaccacttatcattgtgtgtgatcgatttgactttgtccatgatttggtgctctatttatatagaaataatcttcaaaagtatatagagatatatgtacagaaggtgaatccaagtcgacttcctgtagttattggaggattacttgatgttgactgttctgaagatgtcataaaaaacttgattcttgttgtaagaggtcaattctctactgatgagcttgttgctgaggttgaaaaaagaaacagattgaaactgcttctgccttggctagaggccagaattcatgagggctgtgaggagcctgctactcacaatgccttagccaaaatctacatagacagtaataacaacccggagagatttcttcgtgaaaatccctactatgacagtcgcgttgttggaaagtattgtgagaagagagatccacatctggcctgtgttgcttatgaacgtggccaatgtgatctggaacttattaatgtttgcaatgagaattccctcttcaaaagtctttctcgctacctggtacgtcgaaaggatccagaattgtggggcagcgtgctgctggaaagcaatccttacaggagacccctaattgaccaggttgtacaaacagctttgtctgagactcaggaccctgaagaagtgtcagtaactgtaaaggctttcatgactgcagaccttcctaatgaactcattgaactgctggagaaaattgtccttgataactctgtattcagtgaacacaggaatctgcaaaacctccttatcctcactgcaattaaggctgaccgtacacgtgttatggagtatattaaccgcctggataattatgatgccccagatattgccaatatcgccatcagcaatgagctgtttgaagaagcatttgccattttccggaaatttgatgtcaatacttcagcagttcaggtcttaattgagcatattggaaacttggatcgggcatatgagtttgctgaacgttgcaatgaacctgcggtctggagtcaacttgcaaaagcccagttgcagaaaggaatggtgaaagaagccattgattcttatatcaaagcagatgatccttcctcctacatggaagttgttcaggctgccaatactagtggaaactgggaagaactggtgaagtacttgcagatggcccgtaagaaggctcgagagtcctatgtggagacagaactgatattcgcactggctaaaacaaaccgccttgcagagttagaagaatttatcaatggaccaaataatgctcatatccaacaagttggtgaccgttgttatgatgaaaaaatgtatgatgctgctaagttgttgtacaataatgtttccaattttggacgtttggcatctaccctggttcacctgggtgaatatcaggcagctgttgatggggctaggaaagctaacagtactcgaacatggaaagaggtctgcttcgcctgtgtagatgggaaagaattccgtcttgctcagatgtgtggacttcatattgttgtacatgcagatgaattagaagaacttatcaactactatcaggatcgtggctattttgaagagctgatcaccatgttggaagcagcactgggacttgagcgagctcacatgggaatgtttactgaattagctattctatactctaaatttaagcctcagaaaatgagggagcacctggagctgttctggtctagagtgaatattcccaaggtgctaagagctgcagaacaagctcatctttgggcagaactggtgtttttgtatgacaagtatgaagaatatgataatgccataattaccatgatgaatcatccaactgatgcctggaaagaagggcaattcaaagatatcattaccaaggttgccaatgtggaactatactacagagcaatacagttctacttagaattcaagcctctgttgttaaatgatttgctgatggtgctgtctccacggttggatcacactcgtgcagtcaattatttcagcaaggttaaacagctaccactggtgaaaccgtatttgcgttcagttcagaaccataacaacaaatctgtgaatgaatcattgaacaatctttttattacagaagaagattatcaggctctgcgaacatcaatagatgcttatgacaactttgacaatatctcgcttgctcagcgtttggaaaaacatgaactcattgagttcaggagaattgctgcttatctcttcaaaggcaacaatcgctggaaacagagtgtagagctgtgcaagaaagacagcctttacaaggatgcaatgcagtatgcttctgaatctaaagatactgaattggctgaagaactcctgcagtggtttttgcaggaagaaaaaagagagtgctttggagcttgtctgtttacctgttacgatcttttaaggccagatgtcgtcctagaaactgcatggaggcacaatatcatggattttgccatgccctatttcatccaggtcatgaaggagtacttgacaaaggtggataaattagatgcttcagaatcactgagaaaagaagaagaacaagctacagagacacaacccattgtttatggtcagccccagttgatgctgacagcaggacccagtgttgccgtccctccccaggcaccttttggttatggttataccgcaccaccgtatggacagccacagcctggctttgggtacagcatgtgagatgaagcgctgatcctgtagtcacctattttcgtactgaaacatcgtctttacccacttctcagtttataatgggggaaaacaggcaacgtgttcttgtaacctttatttcatgaaggacttctttttgtttctaactataaacttggatcacctatgttaaaaccttatttcacattccacatcattttagaatttattttcgaaggggaatagtttcaatgttttattcacttgggctttttttcttccccctctttctttaaagaactgctcaatattcaatctgttgtgaagaacctgatttgcactctgtagtgtttaaagaaacaaagaaactctaatattgaatctcttaaatttagtgtatgtaaacagcttacaaatacgtattgtctaaatgcatttaaatctgttttattcaaagaaaagctaaagcaaaaacactggcatatgaccatgcaagactgtcagtgccaacaaagacaacactaatcagcacatcgtacactggattgcagtgcttcccagattattgaaaaatgttacagacaacttgcctgatttttaaatgagcgtaaaaggccctctaacctatgcaggtttccccattatgcatatagaaaatgctagtatgttttgctcacttcatatgtaacaggtgcccttatgttgtgctgtatcctgtgctttttctgtgggaccattccattcaggagcaaagagcaccatgattccaatcttgtgtgtgtttactaacccttccctgaggtttgtgtatgttggatattgtggtgttttagatcactgagtgtacagaagagagaaattcaaacaaaatattgctgttcttcagttttgtttgtggaatttgaaattactcaaatttaaaataaattactggactgtggaaataacatagaattgaagttttaattaaataccactcaaacgaaaagaacagtagtttttgtagttttatattggatactgaggcattagggaggcatgaaaggaagaggaatgaggattgagacatgtgaagacattgtgcattatatcaatgtgcattcctgtagttcattaacaaggtacatgcaatagtctaaagaaccagagtcactactatagtggcttaacatttaatctgtctccaatattttaaccaagtgacaccgaggtttttatcgaagcatttcacttaaatgaacaaatcatggctgttatattaacttgaaataaaatatatttaaacatgtagttaacatgctctttctcatcatgaattataaaggtgcccaaattatgggtatcttgatttttttcaaaaattggttgtgtgaatccagctcttgcttatggctgagaatgttcctaaagttcatttcactatcccttaatcctcaatagctacacatacccccttgcctagttagtcttgcactgctttacaactctcttaggcaaattacctaacataagctccacagaagagttttttaaaacttaaaatccctgtcccaccaggtgtggtggctcatgcctgtaatcccagcactttgggaggctgaggcaggcggattgcttgaggccaggagttcgagacaagcctgaccaacatggtgactccatctctactaaaaataaaaaatcagccaggtgtgatggtggatgcctataagatcctagctgctactcaggaggcaggaggctgaggcatgagaatcacttgaacctgtgaggcaaaggttgtagtgagccaagatcacgtcactgcactccatcctgggtgacagaatgagactcttgtctcaaaaaacaaaaaaacctatttagtttcatccaggacattaagtgaaagtgtttaatgtgagtgcaggtcagtgaagaatacaatggtgcccctgctttgatttgtgggaggtgccatcagttttccccaccactgcttttgcaccctcagtgcaaatatcaacacagagaaaaaaaaaataataatagtattatgaaaacattgactctgtggagaccctgtgggttctgcagagtatactttgaaaactataagattatgagttctataaaataccaagtacagatgaactagaaaacaagcatatatccacaattaccagaattttcatagtattccttttagtagatatgccatgacagttacttagccaccccatgccatcctgttgggaatgccactacctttgaatttggagccatcagtctatctgaggcaaacctcagaaattacctgagccagaatcatgcacttagcactgagttcaactcagtcttaacgttgcattttgttgcatcacttttgcagccagtaaacattctgtttagaaatagttgctattgtggcatcattcacagttgcaatttttctcctgtgctgtcatatgcctgtgcgaagtgtattaaatgaatcaaatattagaaa

SEQ ID NO: 150309 - DNA, 5028 bp, Artificial Sequence
  derived and/or modified sequence
atggcccagatcctgcccatcagattccaggagcacctgcagctgcagaacctgggcatcaaccccgccaacatcggcttcagcaccctgaccatggagagcgacaagttcatctgcatcagagagaaggtgggcgagcaggcccaggtggtgatcatcgacatgaacgaccccagcaaccccatcagaagacccatcagcgccgacagcgccatcatgaaccccgccagcaaggtgatcgccctgaaggccggcaagaccctgcagatcttcaacatcgagatgaagagcaagatgaaggcccacaccatgaccgacgacgtgaccttctggaagtggatcagcctgaacaccgtggccctggtgaccgacaacgccgtgtaccactggagcatggagggcgagagccagcccgtgaagatgttcgacagacacagcagcctggccggctgccagatcatcaactacagaaccgacgccaagcagaagtggctgctgctgaccggcatcagcgcccagcagaacagagtggtgggcgccatgcagctgtacagcgtggacagaaaggtgagccagcccatcgagggccacgccgccagcttcgcccagttcaagatggagggcaacgccgaggagagcaccctgttctgcttcgccgtgagaggccaggccggcggcaagctgcacatcatcgaggtgggcaccccccccaccggcaaccagcccttccccaagaaggccgtggacgtgttcttcccccccgaggcccagaacgacttccccgtggccatgcagatcagcgagaagcacgacgtggtgttcctgatcaccaagtacggctacatccacctgtacgacctggagaccggcacctgcatctacatgaacagaatcagcggcgagaccatcttcgtgaccgccccccacgaggccaccgccggcatcatcggcgtgaacagaaagggccaggtgctgagcgtgtgcgtggaggaggagaacatcatcccctacatcaccaacgtgctgcagaaccccgacctggccctgagaatggccgtgagaaacaacctggccggcgccgaggagctgttcgccagaaagttcaacgccctgttcgcccagggcaactacagcgaggccgccaaggtggccgccaacgcccccaagggcatcctgagaacccccgacaccatcagaagattccagagcgtgcccgcccagcccggccagaccagccccctgctgcagtacttcggcatcctgctggaccagggccagctgaacaagtacgagagcctggagctgtgcagacccgtgctgcagcagggcagaaagcagctgctggagaagtggctgaaggaggacaagctggagtgcagcgaggagctgggcgacctggtgaagagcgtggaccccaccctggccctgagcgtgtacctgagagccaacgtgcccaacaaggtgatccagtgcttcgccgagaccggccaggtgcagaagatcgtgctgtacgccaagaaggtgggctacacccccgactggatcttcctgctgagaaacgtgatgagaatcagccccgaccagggccagcagttcgcccagatgctggtgcaggacgaggagcccctggccgacatcacccagatcgtggacgtgttcatggagtacaacctgatccagcagtgcaccgccttcctgctggacgccctgaagaacaacagacccagcgagggccccctgcagaccagactgctggagatgaacctgatgcacgccccccaggtggccgacgccatcctgggcaaccagatgttcacccactacgacagagcccacatcgcccagctgtgcgagaaggccggcctgctgcagagagccctggagcacttcaccgacctgtacgacatcaagagagccgtggtgcacacccacctgctgaaccccgagtggctggtgaactacttcggcagcctgagcgtggaggacagcctggagtgcctgagagccatgctgagcgccaacatcagacagaacctgcagatctgcgtgcaggtggccagcaagtaccacgagcagctgagcacccagagcctgatcgagctgttcgagagcttcaagagcttcgagggcctgttctacttcctgggcagcatcgtgaacttcagccaggaccccgacgtgcacttcaagtacatccaggccgcctgcaagaccggccagatcaaggaggtggagagaatctgcagagagagcaactgctacgaccccgagagagtgaagaacttcctgaaggaggccaagctgaccgaccagctgcccctgatcatcgtgtgcgacagattcgacttcgtgcacgacctggtgctgtacctgtacagaaacaacctgcagaagtacatcgagatctacgtgcagaaggtgaaccccagcagactgcccgtggtgatcggcggcctgctggacgtggactgcagcgaggacgtgatcaagaacctgatcctggtggtgagaggccagttcagcaccgacgagctggtggccgaggtggagaagagaaacagactgaagctgctgctgccctggctggaggccagaatccacgagggctgcgaggagcccgccacccacaacgccctggccaagatctacatcgacagcaacaacaaccccgagagattcctgagagagaacccctactacgacagcagagtggtgggcaagtactgcgagaagagagacccccacctggcctgcgtggcctacgagagaggccagtgcgacctggagctgatcaacgtgtgcaacgagaacagcctgttcaagagcctgagcagatacctggtgagaagaaaggaccccgagctgtggggcagcgtgctgctggagagcaacccctacagaagacccctgatcgaccaggtggtgcagaccgccctgagcgagacccaggaccccgaggaggtgagcgtgaccgtgaaggccttcatgaccgccgacctgcccaacgagctgatcgagctgctggagaagatcgtgctggacaacagcgtgttcagcgagcacagaaacctgcagaacctgctgatcctgaccgccatcaaggccgacagaaccagagtgatggagtacatcaacagactggacaactacgacgcccccgacatcgccaacatcgccatcagcaacgagctgttcgaggaggccttcgccatcttcagaaagttcgacgtgaacaccagcgccgtgcaggtgctgatcgagcacatcggcaacctggacagagcctacgagttcgccgagagatgcaacgagcccgccgtgtggagccagctggccaaggcccagctgcagaagggcatggtgaaggaggccatcgacagctacatcaaggccgacgaccccagcagctacatggaggtggtgcaggccgccaacaccagcggcaactgggaggagctggtgaagtacctgcagatggccagaaagaaggccagagagagctacgtggagaccgagctgatcttcgccctggccaagaccaacagactggccgagctggaggagttcatcaacggccccaacaacgcccacatccagcaggtgggcgacagatgctacgacgagaagatgtacgacgccgccaagctgctgtacaacaacgtgagcaacttcggcagactggccagcaccctggtgcacctgggcgagtaccaggccgccgtggacggcgccagaaaggccaacagcaccagaacctggaaggaggtgtgcttcgcctgcgtggacggcaaggagttcagactggcccagatgtgcggcctgcacatcgtggtgcacgccgacgagctggaggagctgatcaactactaccaggacagaggctacttcgaggagctgatcaccatgctggaggccgccctgggcctggagagagcccacatgggcatgttcaccgagctggccatcctgtacagcaagttcaagccccagaagatgagagagcacctggagctgttctggagcagagtgaacatccccaaggtgctgagagccgccgagcaggcccacctgtgggccgagctggtgttcctgtacgacaagtacgaggagtacgacaacgccatcatcaccatgatgaaccaccccaccgacgcctggaaggagggccagttcaaggacatcatcaccaaggtggccaacgtggagctgtactacagagccatccagttctacctggagttcaagcccctgctgctgaacgacctgctgatggtgctgagccccagactggaccacaccagagccgtgaactacttcagcaaggtgaagcagctgcccctggtgaagccctacctgagaagcgtgcagaaccacaacaacaagagcgtgaacgagagcctgaacaacctgttcatcaccgaggaggactaccaggccctgagaaccagcatcgacgcctacgacaacttcgacaacatcagcctggcccagagactggagaagcacgagctgatcgagttcagaagaatcgccgcctacctgttcaagggcaacaacagatggaagcagagcgtggagctgtgcaagaaggacagcctgtacaaggacgccatgcagtacgccagcgagagcaaggacaccgagctggccgaggagctgctgcagtggttcctgcaggaggagaagagagagtgcttcggcgcctgcctgttcacctgctacgacctgctgagacccgacgtggtgctggagaccgcctggagacacaacatcatggacttcgccatgccctacttcatccaggtgatgaaggagtacctgaccaaggtggacaagctggacgccagcgagagcctgagaaaggaggaggagcaggccaccgagacccagcccatcgtgtacggccagccccagctgatgctgaccgccggccccagcgtggccgtgcccccccaggcccccttcggctacggctacaccgcccccccctacggccagccccagcccggcttcggctacagcatgtag

SEQ ID NO: 150310 - protein, 673 aa, Artificial Sequence
  derived and/or modified sequence
MGGLASGGDVEPGLPVEVRGSNGAFYKGFVKDVHEDSVTIFFENNWQSERQIPFGDVRLPPPADYNKEITEGDEVEVYSRANEQEPCGWWLARVRMMKGDFYVIEYAACDATYNEIVTLERLRPVNPNPLATKGSFFKVTMAVPEDLREACSNENVHKEFKKALGANCIFLNITNSELFILSTTEAPVKRASLLGDMHFRSLRTKLLLMSRNEEATKHLETSKQLAAAFQEEFTVREDLMGLAIGTHGANIQQARKVPGVTAIELGEETCTFRIYGETPEACRQARSYLEFSEDSVQVPRNLVGKVIGKNGKVIQEIVDKSGVVRVRVEGDNDKKNPREEGMVPFIFVGTRENISNAQALLEYHLSYLQEVEQLRLERLQIDEQLRQIGLGFRPPGSGRGSGGSDKAGYSTDESSSSSLHATRTYGGSYGGRGRGRRTGGPAYGPSSDVSTASETESEKREEPNRAGPGDRDPPTRGEESRRRPTGGRGRGPPPAPRPTSRYNSSSISSVLKDPDSNPYSLLDTSEPEPPVDSEPGEPPPASARRRRSRRRRTDEDRTVMDGGLESDGPNMTENGLEDESRPQRRNRSRRRRNRGNRTDGSISGDRQPVTVADYISRAESQSRQRPPLERTKPSEDSLSGQKGDSVSKLPKGPSENGELSAPLELGSMVNGVS

SEQ ID NO: 150311 - DNA, 2987 bp, Artificial Sequence
  derived and/or modified sequence
gcagtaggcggcggtggcagggggaggtggaggctgtggagcggcagcggcagcagcgggtcccgggactgaggcagcagcgggggcggcggcgggcggaagctgaggtgacgaaggcagcggcggcggcggccgtttccctcacggtggcggagaccaaggcggcggcggcggacggggagcggcccggccccggccccctgctcgttggctgtggcagggccgccgtggggccggcccggctcccgccccccgcggctccccctccggctcctcctccggggagacgccgggggcctggcccggcccgcactcagactgctgctgcagccgccgccgggggagtcggaggcggtggcggcgccatgggcggcctggcctctgggggggatgtggagccgggactgcccgtcgaggtgcgcggctccaacggggccttctacaagggctttgtgaaggatgtccatgaagactctgtcaccatcttctttgaaaacaactggcagagtgagagacaaattccttttggggatgtccggctaccacctccagctgactataataaggagatcacagaaggggatgaagtggaggtttattctcgagccaatgaacaggaaccttgtggctggtggctggcccgggtgcggatgatgaagggagatttctatgtcattgaatatgctgcctgtgatgccacctacaatgaaattgttaccctggagcgacttcggccagttaatcccaatccccttgcaaccaaaggcagcttcttcaaggttaccatggctgtgcccgaggatctgagagaagcctgctccaatgaaaacgtccataaagagttcaagaaagccctgggagccaactgcatctttctcaacatcacaaacagtgagctcttcattctgtcaaccacagaagcccctgtgaagcgagcatctctgctgggtgatatgcatttccgaagcctgcgcaccaaactgctacttatgtcccgcaatgaagaagctaccaagcacctagagacaagcaagcagttggcagcagccttccaagaggagttcacagtgcgagaggacctgatgggactggcaattgggactcacggtgccaacatccagcaggcccgaaaagtacctggggtgaccgccattgagttgggtgaagagacctgcactttccgcatctatggggagactcccgaggcttgccgacaggcccgaagctaccttgagttttctgaggactcagtgcaagtgcccaggaacctggttggcaaagtgattggaaagaacgggaaagtgatccaggagattgtggataaatctggtgtggtgagggttcgagtggaaggtgataatgacaagaagaaccccagggaggagggaatggttcccttcatttttgttggcacccgagagaacatcagcaatgcccaggctttgctggagtatcacctctcctacctgcaggaggtagagcagcttcgcttggagaggctacaaattgatgagcagcttcggcagattgggctgggctttcgccctcctgggagtgggcggggcagcggtggcagcgacaaggctggatatagcactgatgagagctcctcctcctccctccatgcgactcgaacctatgggggcagctatgggggccgtggccgtggccggaggacaggcggtcctgcctatggccccagctcagatgtgtctacagcttcagagactgagtcagagaagagagaggagcccaaccgagctgggcctggcgacagggatcccccaacccgaggggaagaaagccggaggcggccgactgggggccggggtaggggacccccacctgccccccggcccacttcgagatacaattcttcatctattagctcagtgctgaaggatccagacagtaatccctacagcctattggacacgtctgaaccagagcccccggttgattcagaacctggggaaccccccccagcaagtgccaggcgccgccgctcccgccgccgccgcactgatgaagacaggaccgtcatggatggaggcctggaatcagatgggcccaacatgacagagaatggcctggaagatgaatcaagacctcaacgtcgtaatcgcagccgccgccgccgtaaccgtggtaatcggactgatggctctatcagtggagaccgccagccagtgactgtggctgactatatctcacgagcagagtctcagagccgccagaggccacccctggaacgcactaaaccctcagaagactctctttcaggacagaagggtgactctgtcagcaagcttcctaagggcccctcggagaatggggagctctccgcccccttggagttgggtagtatggtgaatggggtttcataaaacctccaacctgcacccctcccttctccatctcgcttgctgcccaacaccatggccctcacaggcccaactgacctgcgctggagctgctcttatctaggggggaggggggtggcacagcagcttgggtaccccccaacctccaggagctagtggaggggtgtgtaacagggtcataccccctccctcttgtccaccctacccccagggtaaggggagcctctctccttccccatcagactggatgtgcctttatcctctaatgccccaatctctctctgaacacccccattctccacctgttggtggggggtgctcctcgacccacccagatttgaccgttcagggggcctcccctgctatccctcctcccatcctgtaccccccatttctggggcctcatcactgtggaagacggggatagtaagagataagtgggtgggaggcacggggaaggttttggagtagaaccaggggtgtgtatgaaggggggtgacaaggtccccctggggaggggaccaaccttgtctggtggatgagaaggcgtatttatttttcactgtacagtatttaaaaagagaataaaaaaatccaaatggc

SEQ ID NO: 150312 - DNA, 2022 bp, Artificial Sequence
  derived and/or modified sequence
atggggggcttggcctccggaggcgacgtagagcctggccttcccgtggaggtgaggggcagcaacggagccttttacaagggttttgtgaaggatgtccacgaggacagcgtcactatttttttcgagaataattggcagagcgagcggcaaataccttttggagacgtgaggctgccaccccccgctgactacaacaaggaaatcaccgagggtgacgaggtcgaggtctactctcgggccaatgaacaagaaccctgtggatggtggctcgcacgggtgcggatgatgaagggcgacttctacgtgatcgagtatgcagcttgcgacgccacctataacgagattgtgacactcgaacggctgcgccctgtgaatcctaacccattagccaccaagggatctttcttcaaggtgacaatggctgtcccagaagacttgagagaggcttgcagcaatgaaaatgtgcacaaagagtttaaaaaagcgttgggcgccaattgcatttttctcaacatcaccaattccgagctctttattttaagcaccaccgaggcaccagtcaagagggcctccctgctgggtgacatgcactttcgcagtctgaggaccaagctgctcctaatgagtaggaacgaagaggcaaccaagcacctggagacttcgaagcaactggcagctgcatttcaagaagaatttacggttcgcgaggacttaatgggcctggctattggaacccatggagccaatattcagcaggccaggaaggtgccaggagtgacggctatcgagctcggcgaggaaacatgcacatttaggatttacggggagacacccgaagcatgtcgccaggccagaagttatctggagttctctgaagactctgtccaggtgccaagaaacctggtaggcaaagtgattggcaaaaacgggaaagttattcaagagatcgtggataagtctggcgtcgtcagagtgagggtggagggagataacgacaagaagaatccccgagaagaaggcatggtgcccttcattttcgtcggtaccagagaaaacatcagcaacgcacaagccttactcgaataccatctaagctacttacaggaagtggagcagttacgcttagagcggctgcaaattgacgagcagctcaggcagatcgggctcggctttcggccacccggatccgggcgcggcagtggtggctccgacaaagccgggtattccaccgatgagagtagcagctctagcctgcacgccactcgcacctacgggggctcttatggtggccgggggcggggacgccgtacgggcggccccgcttacggtccatccagtgacgtgtctaccgcatctgagactgaaagtgaaaagagggaagagcctaatcgggcaggtcctggcgatagagaccccccaaccaggggtgaggagagtcggcgccgccccacgggaggcaggggacgcgggcctccccccgcccctaggccaacctcccggtataattcaagctctatttcaagtgtgctaaaggacccagattccaatccatatagcttattagatacctcagagcccgagcctccagttgatagcgagcccggagaaccaccacccgcctcagcacggcgccggcggtctagaaggagacgtaccgacgaagatcggactgttatggatggcgggttggaatccgacggccccaatatgactgagaatgggctcgaggacgaatcccggccccagcggcgcaaccgatctagacgcaggcgcaatcgaggaaacaggacagatgggtcaattagtggagatcgacagccagttacagtggctgattacattagtcgcgcagagagccagtcccgacagcggcccccactggagcggacaaagccttctgaggattcactttccggccagaagggcgacagcgtttctaagcttcctaaaggacctagcgagaacggagaactgtccgctccgcttgaacttggaagtatggtgaacggagtctcttag

SEQ ID NO: 150313 - DNA, 2022 bp, Artificial Sequence
  derived and/or modified sequence
atgggcggcctggccagcggaggagatgtggagcccggcctgcctgtggaggtgcggggcagcaatggagccttctacaagggctttgtgaaggatgtgcatgaagattctgtgaccatcttctttgagaacaactggcagagcgagcggcagatcccctttggagatgtgcggctgcccccacctgctgactacaacaaggagatcacagaaggagatgaggtggaggtgtacagccgggccaatgagcaggagccctgtggctggtggctggcccgggtgaggatgatgaagggggacttctacgtgattgaatatgctgcctgtgatgccacctacaatgagatcgtgaccctggagcggctgcggcctgtgaaccccaaccccctggccaccaagggcagcttcttcaaggtgaccatggctgtgcctgaggacctgcgggaggcctgcagcaatgaaaatgtgcacaaggagttcaagaaggccctgggcgccaactgcatcttcctgaacatcaccaacagcgagctgttcatcctgagcaccacagaggcccctgtgaagagggccagcctgctgggggacatgcacttccgcagcctgcggaccaagctgctgctgatgagcagaaatgaggaggccaccaagcacctggagaccagcaagcagctggccgccgccttccaggaggagttcaccgtgcgggaggacctgatgggcctggccatcggcacccatggagccaacatccagcaggccaggaaggtgcctggggtgacagccatcgagctgggggaggagacctgcaccttccgcatctatggagagaccccagaggcctgccggcaggcccggagctacctggagttctctgaagattctgtgcaggtgcccaggaacctggtgggcaaggtgattggcaagaatggcaaggtgatccaggagatcgtggacaagtctggagtggtgcgggtgcgggtggagggggacaatgacaagaagaacccccgggaggagggcatggtgcccttcatctttgtgggcacccgggagaacatcagcaatgcccaggccctgctggagtaccacctgagctacctgcaggaggtggagcagctgcggctggagcggctgcagattgatgagcagctgcggcagatcggcctgggcttccggcccccaggcagcggccggggcagcggcggcagtgacaaggccggctacagcacagatgagagcagcagcagcagcctgcacgccaccaggacctatggaggcagctatggaggccggggccggggccgcaggactggaggccctgcctacggccccagcagtgatgtgtccacagccagcgagacagaaagtgagaagcgggaggagcccaacagagctggccctggggaccgggacccccccaccagaggagaggagagcagaagaagacccactggaggccggggccggggccccccaccagccccccggcccaccagccgctacaacagcagcagcatcagctctgtgctgaaggaccctgacagcaacccctacagcctgctggacaccagcgagcctgagccccctgtggacagcgagcctggagagcccccaccagccagcgccaggagaagaagaagcagaagaagaagaacagatgaggacagaacagtgatggatggcggcctggagagtgatggccccaacatgacagaaaatggcctggaggatgagagccggccccagaggaggaacagaagcagaagaagaagaaacagaggcaacagaacagatggcagcatcagcggggaccggcagcctgtgacagtggccgactacatcagcagagctgagagccagagccggcagaggcctcccctggagaggaccaagcccagcgaggacagcctgagcggccagaagggggacagcgtgtccaagctgcccaagggccccagtgaaaatggagagctgagcgcccccctggagctgggctccatggtgaatggagtgtcctag

SEQ ID NO: 150314 - DNA, 2022 bp, Artificial Sequence
  derived and/or modified sequence
atgggcggcctggccagcggcggcgacgtggagcccggcctgcccgtggaagtaaggggcagtaacggcgctttctataaaggctttgtgaaagatgtccatgaggactctgtgaccatattctttgaaaacaactggcagtctgaacgccagattccctttggagatgtgagactgccaccccccgctgactataacaaagaaataaccgaaggggacgaagtggaggtgtacagccgagccaacgagcaggaaccatgcggctggtggctggcgcgagtacgcatgatgaaaggcgacttttacgtcattgagtacgccgcttgcgatgccacttataatgagatcgtgacgctcgaaaggctgagacctgtgaatcccaatcccctcgccacaaagggtagcttctttaaggtcactatggccgtcccagaagacctgcgtgaggcttgctcaaatgaaaacgtacataaggagttcaagaaagccctcggcgctaattgcatctttctgaatataaccaacagcgagcttttcatcttatctacaacggaagcgcctgtgaaaagagcctctctgctgggagacatgcacttccgcagcctgaggaccaagcttttactcatgtcaaggaacgaggaggccactaagcatcttgagaccagcaaacagctggccgccgcattccaggaagaattcacggtgagggaggatttgatgggcctggcgatcgggacccatggagctaacatacaacaagcccgcaaggtgcccggcgtcaccgctatagagctgggagaagaaacctgcacatttcggatctatggcgagacgccagaagcatgtaggcaggccaggtcctaccttgaattctccgaggattccgtccaggttccacgtaatctggtgggcaaggtgataggcaagaatggtaaggttatccaagaaatagtggataaaagcggggttgttagggtacgagtggagggggataacgacaagaaaaaccctagggaggaggggatggtgccttttatcttcgtggggacaagagagaacataagcaacgcacaggctcttctcgaatatcatttaagttacctgcaggaagtggagcaactacgactagaacggctccagattgacgagcagctgcgacaaataggactggggtttaggccccccggatccggacgaggctcaggcggaagcgataaagcaggatactcaaccgatgagtcatctagttcttctctgcatgccacacggacgtatggcggtagctatgggggacggggccgagggaggagaaccggcggtcccgcctacgggccctcatcggacgtttccacagctagtgaaaccgaaagcgaaaaaagagaagaaccaaaccgcgctggcccaggggatagggacccaccaacacgaggagaggagtcgcgccggcggccgactggcgggcgggggcgcggtcccccgccagcacccagacctacatccagatacaactcctcaagcataagtagtgtcttaaaggatccagattccaatccgtacagcctgctggacacctctgaaccggagccgccggtggactccgagcccggggagcctccaccagcgtccgcccggcgtcggcggagcaggaggaggcggaccgacgaggaccgcacggtaatggacggcggactggaatctgacggcccaaatatgacagagaatggattggaagacgagagtaggccccagaggagaaataggtctcggcggaggaggaatagaggcaaccgaacagacggatcaataagcggcgaccggcagcccgtaaccgtcgcagattatatatctcgggccgaaagccagtcgcgccaaagacctcccttggagagaacaaaaccgtctgaagatagcttgtccgggcagaagggggatagcgttagtaaactgcctaaaggaccctcagagaatggtgagttgtccgcccctttggagctgggctctatggttaacggtgtttcctag

SEQ ID NO: 150315 - DNA, 2022 bp, Artificial Sequence
  derived and/or modified sequence
atgggcggactcgcttctggtggcgacgtcgaacctggtctccccgttgaagtcagaggctcgaacggtgctttttataagggtttcgtgaaagatgtgcatgaggatagcgtcacgatcttctttgagaataattggcagagcgagcgtcagatcccgtttggagacgtgagattaccacccccagcggactacaacaaggaaattaccgagggcgacgaagtggaggtgtatagtcgcgctaatgagcaggagccctgcgggtggtggctggctagggtacggatgatgaaaggagatttttacgtgatcgagtacgccgcttgtgatgccacctataacgagatcgtcacactagagaggttaaggccggtgaatcctaatcccctcgccactaaaggatcgttttttaaagtgacaatggccgtgcccgaagatctgcgtgaagcatgcagcaacgaaaacgtgcataaggagtttaaaaaggcactgggggctaactgtatcttcctgaacataactaatagcgagctctttattctgtcaactaccgaggcccctgtgaagagggcttccttactcggagatatgcatttccgcagtcttagaacaaagttgctgttgatgtcgagaaacgaagaggctacgaaacatttggagactagtaaacagctggcagccgcatttcaggaagaatttaccgtcagagaggatctgatggggttggccataggaactcatggtgctaacattcaacaggctaggaaggtacccggtgttactgccattgagctcggggaagaaacatgtacgttccggatttatggcgaaaccccggaggcatgcagacaggcgagatcatacctggaatttagcgaagattctgtgcaggttcctcggaaccttgtgggaaaggtaatcggcaaaaacggaaaagtcatccaggaaatcgtcgataaaagcggtgttgtccgggttcgggtggagggggataacgacaaaaagaaccctagagaagagggtatggtgccattcatatttgtgggcactcgcgagaacatttctaacgcccaagctttgctggagtaccacctgtcctatcttcaggaggtagaacaactcaggctggagaggctacagatcgatgaacaattgcggcagatcggtcttgggttcagaccacccggaagcggacggggtagtggtgggtcagacaaagccggatactcaactgacgagagctcgagctctagcttgcacgcaacgaggacctatgggggatcatatgggggtcgtggtagggggagaaggaccggaggtcccgcttacgggcctagttccgatgtgtcgaccgcgtccgagactgagtccgagaaacgcgaggagcccaaccgagcagggccaggtgatagggatcctcccacaagaggcgaagagtctaggcgaaggcccaccggcggaaggggaagagggccaccaccggctccaagacccacctcacggtataattcaagctcgatttcctccgtattaaaagatcccgactccaacccatattctctcctggataccagcgaaccagagccaccagtggatagcgaaccaggggaaccacctcctgcgagtgccaggcggcgacggagccggaggcgtaggaccgacgaggatcgaactgtgatggatggcggtctcgagtccgacggcccaaatatgactgagaatggacttgaggatgagagcagaccacagaggaggaacaggtcacgacgcaggcgcaaccggggtaacaggacggatggcagtatcagcggggaccgtcagcccgtgactgtggcggattacatcagccgggctgagtcgcaatccagacaaagaccaccactggagcgcacaaagccatctgaggatagtctgagcggtcaaaaaggcgatagcgtgtcaaagctgcctaagggtccctccgagaatggcgaattgtcagctccactggagttgggcagtatggtgaatggcgtgtcatag

SEQ ID NO: 150316 - DNA, 2022 bp, Artificial Sequence
  derived and/or modified sequence
atgggcggcctggccagcggcggcgacgtggagcccggcctgcccgtggaggtgagaggcagcaacggcgccttctacaagggcttcgtgaaggacgtgcacgaggacagcgtgaccatcttcttcgagaacaactggcagagcgagagacagatccccttcggcgacgtgagactgcccccccccgccgactacaacaaggagatcaccgagggcgacgaggtggaggtgtacagcagagccaacgagcaggagccctgcggctggtggctggccagagtgagaatgatgaagggcgacttctacgtgatcgagtacgccgcctgcgacgccacctacaacgagatcgtgaccctggagagactgagacccgtgaaccccaaccccctggccaccaagggcagcttcttcaaggtgaccatggccgtgcccgaggacctgagagaggcctgcagcaacgagaacgtgcacaaggagttcaagaaggccctgggcgccaactgcatcttcctgaacatcaccaacagcgagctgttcatcctgagcaccaccgaggcccccgtgaagagagccagcctgctgggcgacatgcacttcagaagcctgagaaccaagctgctgctgatgagcagaaacgaggaggccaccaagcacctggagaccagcaagcagctggccgccgccttccaggaggagttcaccgtgagagaggacctgatgggcctggccatcggcacccacggcgccaacatccagcaggccagaaaggtgcccggcgtgaccgccatcgagctgggcgaggagacctgcaccttcagaatctacggcgagacccccgaggcctgcagacaggccagaagctacctggagttcagcgaggacagcgtgcaggtgcccagaaacctggtgggcaaggtgatcggcaagaacggcaaggtgatccaggagatcgtggacaagagcggcgtggtgagagtgagagtggagggcgacaacgacaagaagaaccccagagaggagggcatggtgcccttcatcttcgtgggcaccagagagaacatcagcaacgcccaggccctgctggagtaccacctgagctacctgcaggaggtggagcagctgagactggagagactgcagatcgacgagcagctgagacagatcggcctgggcttcagaccccccggcagcggcagaggcagcggcggcagcgacaaggccggctacagcaccgacgagagcagcagcagcagcctgcacgccaccagaacctacggcggcagctacggcggcagaggcagaggcagaagaaccggcggccccgcctacggccccagcagcgacgtgagcaccgccagcgagaccgagagcgagaagagagaggagcccaacagagccggccccggcgacagagacccccccaccagaggcgaggagagcagaagaagacccaccggcggcagaggcagaggccccccccccgcccccagacccaccagcagatacaacagcagcagcatcagcagcgtgctgaaggaccccgacagcaacccctacagcctgctggacaccagcgagcccgagccccccgtggacagcgagcccggcgagcccccccccgccagcgccagaagaagaagaagcagaagaagaagaaccgacgaggacagaaccgtgatggacggcggcctggagagcgacggccccaacatgaccgagaacggcctggaggacgagagcagaccccagagaagaaacagaagcagaagaagaagaaacagaggcaacagaaccgacggcagcatcagcggcgacagacagcccgtgaccgtggccgactacatcagcagagccgagagccagagcagacagagaccccccctggagagaaccaagcccagcgaggacagcctgagcggccagaagggcgacagcgtgagcaagctgcccaagggccccagcgagaacggcgagctgagcgcccccctggagctgggcagcatggtgaacggcgtgagctag

SEQ ID NO: 150317 - protein, 562 aa, Artificial Sequence
  derived and/or modified sequence
MRPEPGGCCCRRTVRANGCVANGEVRNGYVRSSAAAAAAAAAGQIHHVTQNGGLYKRPFNEAFEETPMLVAVLTYVGYGVLTLFGYLRDFLRYWRIEKCHHATEREEQKDFVSLYQDFENFYTRNLYMRIRDNWNRPICSVPGARVDIMERQSHDYNWSFKYTGNIIKGVINMGSYNYLGFARNTGSCQEAAAKVLEEYGAGVCSTRQEIGNLDKHEELEELVARFLGVEAAMAYGMGFATNSMNIPALVGKGCLILSDELNHASLVLGARLSGATIRIFKHNNMQSLEKLLKDAIVYGQPRTRRPWKKILILVEGIYSMEGSIVRLPEVIALKKKYKAYLYLDEAHSIGALGPTGRGVVEYFGLDPEDVDVMMGTFTKSFGASGGYIGGKKELIDYLRTHSHSAVYATSLSPPVVEQIITSMKCIMGQDGTSLGKECVQQLAENTRYFRRRLKEMGFIIYGNEDSPVVPLMLYMPAKIGAFGREMLKRNIGVVVVGFPATPIIESRARFCLSAAHTKEILDTALKEIDEVGDLLQLKYSRHRLVPLLDRPFDETTYEETED

SEQ ID NO: 150318 - DNA, 1689 bp, Artificial Sequence
  derived and/or modified sequence
atgagacccgagccgggggggtgctgctgcaggagaacggtacgcgctaatggctgtgtggctaacggcgaggttagaaatgggtacgtgcgctcttctgcagccgcggccgctgctgctgctgctggtcaaatccatcacgtaactcagaacgggggcttatacaagcgtcctttcaacgaagcttttgaggagacaccaatgctagttgccgttctcacatacgtcggatacggtgtcctgaccctgttcgggtacttgagggacttcctgcgctactggcggatcgagaagtgccatcacgcaactgagcgggaagaacagaaggactttgtgtccctctaccaggatttcgagaacttttatacaaggaacctttacatgagaattagggacaattggaataggccaatttgtagcgttcctggcgcccgcgtcgatatcatggagagacagtctcacgattacaattggtccttcaagtacacaggcaacatcatcaaaggtgtgattaacatggggtcttataactacctgggctttgcccgaaacaccgggtcttgccaagaggctgctgccaaggtgcttgaagagtacggggccggagtgtgctcaacccgccaggaaataggaaaccttgacaaacatgaggagctcgaggagctggtggcaaggttcctgggcgtggaagccgctatggcctatggcatggggttcgccaccaactccatgaacatcccggctctggtaggcaaggggtgcctgatattatcggatgaactgaatcatgcctctttagtacttggagcccgtctgtcgggggccacaattcgcatattcaaacataacaacatgcagtcattggagaagctgctcaaggacgccatcgtctatggccagccaagaacacgccgaccctggaagaagattcttatactcgtggaaggtatatatagcatggaagggtccatcgtcagacttcccgaggtgattgcgctcaagaaaaagtacaaagcctatctgtacctggatgaggctcatagcattggggcactgggacccaccgggagaggcgttgtggagtatttcggcctggaccctgaagacgtggacgtcatgatggggacctttaccaaatcatttggagcgtctggcggctacatcggtggtaagaaagagcttattgattacttgagaacccactctcactctgcagtctacgccacatccctgtcgcctccagtggtggagcaaataattacttctatgaagtgtataatggggcaggacggcactagtctgggtaaagaatgtgttcaacagctggccgagaacactcggtacttccgccggcgcttgaaggaaatgggatttataatctatggtaacgaggattctccagtggtccccctgatgttgtatatgcctgcaaagatcggggcttttggcagagagatgctaaaaagaaacatcggtgttgtggttgtaggattcccagcaacacccatcatcgagtcccgcgcgagattctgtctgtctgcagcccacaccaaggaaatcctggacaccgctctgaaggaaatcgatgaagttggcgaccttctacaactaaagtactcacgacaccggttagtcccgttgttggatagacctttcgacgaaaccacgtatgaggaaactgaggactag

SEQ ID NO: 150319 - DNA, 1689 bp, Artificial Sequence
  derived and/or modified sequence
atgaggcctgagcccggcggctgctgctgcagaagaacagtgcgggccaacggctgtgtggccaacggggaggtgagaaatggctacgtgcgcagcagcgctgctgctgctgctgctgctgctgctggccagatccaccacgtgacccagaatggaggcctgtacaagaggcccttcaatgaggcctttgaggagacccccatgctggtggccgtgctgacctacgtgggctacggcgtgctgaccctgtttggctacctgcgggacttcctgcgctactggagaattgagaagtgccaccacgccacagagcgggaggagcagaaggactttgtgtccctgtaccaggactttgagaacttctacaccaggaacctgtacatgaggatccgggacaactggaaccggcccatctgcagcgtgcctggggcccgggtggacatcatggagcggcagagccatgactacaactggagcttcaagtacacaggcaacatcatcaagggcgtcatcaacatgggcagctacaactacctgggctttgccaggaacacaggcagctgccaggaggccgccgccaaggtgctggaggagtatggagctggggtgtgcagcacccggcaggagatcggcaacctggacaagcatgaggagctggaggagctggtggcccgcttcctgggcgtggaggccgccatggcctacggcatgggctttgccaccaacagcatgaacatcccagccctggtgggcaagggctgcctgatcctgagtgatgagctgaaccacgccagcctggtgctgggcgcccggctgagcggggccaccatccgcatcttcaagcacaacaacatgcagagcctggagaagctgctgaaggatgccatcgtgtatggccagcccaggacccggcggccctggaagaagatcctgatcctggtggagggcatctacagcatggagggcagcatcgtgcggctgcctgaggtgattgccctgaagaagaagtacaaggcctacctgtacctggatgaggcccacagcattggagccctgggccccaccggccggggcgtggtggagtacttcggcctggaccctgaagatgtggatgtgatgatgggcaccttcaccaagagctttggagccagcggcggctacatcggcggcaagaaggagctgattgactacctgcggacccacagccacagcgctgtgtatgccaccagcctgagcccccctgtggtggagcagatcatcacctccatgaagtgcatcatgggccaggacggcaccagcctgggcaaggaatgtgtgcagcagctggccgagaacacccgctacttcagaagaaggctgaaggagatgggcttcatcatctatggaaatgaagacagccctgtggtgcccctgatgctgtacatgcctgccaagattggagccttcggccgggagatgctgaagagaaatattggagtggtggtggtgggcttccctgccacccccatcatcgagagccgggcccgcttctgcctgtctgctgcccacaccaaggagatcctggacacagccctgaaggagattgatgaggtgggggacctgctgcagctgaagtacagccgccaccggctggtgcccctgctggaccggccctttgatgagaccacctatgaggagacagaagattag

SEQ ID NO: 150320 - DNA, 1689 bp, Artificial Sequence
  derived and/or modified sequence
atgcggcccgagcccggcggctgctgctgccggcggaccgtgcgggcaaatggatgtgtcgcgaacggggaagtgaggaatggttacgttcgttcctccgccgccgccgcagctgccgccgctgcagggcagattcatcacgttacacaaaacggagggttatacaagcggcccttcaacgaagcctttgaagagacgccaatgttggttgctgtactgacatacgtaggatacggggttcttaccctgtttggatacttacgtgacttcctaaggtattggcgcattgaaaaatgccaccatgccactgagcgtgaggagcaaaaagatttcgtctcgctctaccaggactttgaaaatttctatacacgtaatctctacatgaggatccgcgataattggaacaggccaatttgcagtgtgccaggtgctagggtggatatcatggagaggcagagtcacgactataattggtcatttaaatataccggaaacattattaaaggtgtgataaatatgggctcttataattacttaggcttcgcacggaataccggctcttgtcaggaagctgccgcaaaggtactggaggagtacggtgccggcgtatgctccaccagacaggagatcgggaatttagacaagcacgaagagctcgaggagcttgtggccagattccttggggtggaagccgctatggcctacggtatgggcttcgcaaccaattcaatgaacattccggccttggtgggaaaaggatgtctcattctgagcgatgaactgaaccacgcctcattggttctcggcgctcgcctgagcggggcaaccatacggatctttaagcacaacaacatgcaaagcctagaaaagctgctgaaagatgctattgtgtacggccagcccagaacacggagaccatggaagaaaatcctgatattagtagaggggatctacagcatggaaggatccattgtgcgacttcccgaggtgatagctctcaagaagaaatacaaagcctatctatacctggacgaagcccatagcatcggtgccttaggtccaacaggtaggggggtggtagagtactttggattagaccccgaggacgtagatgtgatgatggggacattcacaaaaagttttggagcatccggaggatacattggaggtaagaaggaacttatagactatctgaggacccattcccatagtgcagtgtacgcaacatctttgagtccccctgtggtggaacaaattatcacttctatgaagtgcatcatgggccaggacgggacttctctcgggaaagagtgtgtgcagcagttggcagagaacacaagatactttagacggagactcaaagagatgggcttcattatctacgggaatgaggactcacctgtcgttcccctgatgctgtacatgcccgcaaagataggggccttcggacgggaaatgctgaagcgaaacattggggtggtcgtggttgggttcccagcgacacctattattgagtccagagcccgcttctgtctgagcgcagcccacactaaagaaattctggacactgcactcaaggaaattgatgaggtaggtgacctcctgcagctcaaatacagtaggcacaggctggttccgctcctcgaccggccttttgatgaaacaacttacgaagagaccgaggactag

SEQ ID NO: 150321 - DNA, 1689 bp, Artificial Sequence
  derived and/or modified sequence
atgcggcctgagccaggaggctgctgctgccgcagaacagtgcgggctaatggatgcgtggctaacggagaggtgaggaacggctatgtccgatcttcagccgcagccgctgccgcagcagccgcaggtcagatccaccacgtaacccagaatggtgggctgtacaagcgtccattcaacgaggcctttgaagaaactcccatgctagttgctgtactgacctacgtgggctacggagtcctgaccttattcggttatctgcgggattttctgcgctattggaggatcgaaaaatgtcaccacgcaactgaacgggaagaacaaaaggacttcgtgagcctgtaccaggacttcgaaaacttctatactcgcaacttgtacatgcgcatacgcgacaactggaacaggccgatatgctcggtaccaggggctcgtgtggatattatggagagacagagccacgactacaattggtccttcaagtacaccgggaacatcattaagggagtaatcaacatgggtagctacaattatctcggttttgcacgcaacactggaagttgtcaggaggccgctgctaaggtgcttgaagagtatggcgcaggcgtttgctccaccagacaagagatcgggaatctggacaagcacgaagaactggaggaactggtggctcggttcctgggagtcgaggcagcgatggcctatgggatgggattcgcaactaatagcatgaatatcccggcactggtggggaaaggttgtttgattttgtccgatgaactgaaccatgcgtctcttgttctgggcgcacgcttgtccggtgcaacaatacgcatattcaaacataacaacatgcaatccctagagaaactgctgaaagatgcaatcgtatatggacagccaaggacccggaggccttggaagaaaattctgatactggtggagggcatttacagcatggaaggttccattgtgcgactgccagaagtgatcgctctgaaaaaaaagtacaaagcctacctgtatctagatgaggcccacagtattggcgcactcggacctacaggcaggggcgtggtcgaatattttgggctcgacccggaggacgtggatgtgatgatggggacgtttacaaaaagcttcggagcatctggtggctatatcggagggaagaaggagctcattgactacctgcggactcactcccactctgcggtatatgctactagtcttagcccacctgtagtcgagcaaattattacaagcatgaagtgcattatggggcaggatgggactagcctcggaaaggagtgcgttcagcagctggctgagaacacccgctactttcgcagacggttaaaagaaatggggttcataatttacggcaacgaagatagccctgttgttccgttgatgctgtacatgcccgctaaaatcggggctttcgggcgtgagatgctgaaacgcaatatcggagtcgtggtcgtagggttccccgctactccaattatcgagtccagagcccgtttctgcctttccgccgcacacacgaaagaaatactcgacaccgctttaaaggaaatcgacgaggtcggcgaccttttgcagctaaaatattctaggcacaggctggtgccccttctggataggccttttgacgaaactacatacgaagagactgaggattag

SEQ ID NO: 150322 - DNA, 1689 bp, Artificial Sequence
  derived and/or modified sequence
atgagacccgagcccggcggctgctgctgcagaagaaccgtgagagccaacggctgcgtggccaacggcgaggtgagaaacggctacgtgagaagcagcgccgccgccgccgccgccgccgccgccggccagatccaccacgtgacccagaacggcggcctgtacaagagacccttcaacgaggccttcgaggagacccccatgctggtggccgtgctgacctacgtgggctacggcgtgctgaccctgttcggctacctgagagacttcctgagatactggagaatcgagaagtgccaccacgccaccgagagagaggagcagaaggacttcgtgagcctgtaccaggacttcgagaacttctacaccagaaacctgtacatgagaatcagagacaactggaacagacccatctgcagcgtgcccggcgccagagtggacatcatggagagacagagccacgactacaactggagcttcaagtacaccggcaacatcatcaagggcgtgatcaacatgggcagctacaactacctgggcttcgccagaaacaccggcagctgccaggaggccgccgccaaggtgctggaggagtacggcgccggcgtgtgcagcaccagacaggagatcggcaacctggacaagcacgaggagctggaggagctggtggccagattcctgggcgtggaggccgccatggcctacggcatgggcttcgccaccaacagcatgaacatccccgccctggtgggcaagggctgcctgatcctgagcgacgagctgaaccacgccagcctggtgctgggcgccagactgagcggcgccaccatcagaatcttcaagcacaacaacatgcagagcctggagaagctgctgaaggacgccatcgtgtacggccagcccagaaccagaagaccctggaagaagatcctgatcctggtggagggcatctacagcatggagggcagcatcgtgagactgcccgaggtgatcgccctgaagaagaagtacaaggcctacctgtacctggacgaggcccacagcatcggcgccctgggccccaccggcagaggcgtggtggagtacttcggcctggaccccgaggacgtggacgtgatgatgggcaccttcaccaagagcttcggcgccagcggcggctacatcggcggcaagaaggagctgatcgactacctgagaacccacagccacagcgccgtgtacgccaccagcctgagcccccccgtggtggagcagatcatcaccagcatgaagtgcatcatgggccaggacggcaccagcctgggcaaggagtgcgtgcagcagctggccgagaacaccagatacttcagaagaagactgaaggagatgggcttcatcatctacggcaacgaggacagccccgtggtgcccctgatgctgtacatgcccgccaagatcggcgccttcggcagagagatgctgaagagaaacatcggcgtggtggtggtgggcttccccgccacccccatcatcgagagcagagccagattctgcctgagcgccgcccacaccaaggagatcctggacaccgccctgaaggagatcgacgaggtgggcgacctgctgcagctgaagtacagcagacacagactggtgcccctgctggacagacccttcgacgagaccacctacgaggagaccgaggactag

SEQ ID NO: 150323 - DNA, 8170 bp, Artificial Sequence
  derived and/or modified sequence
gcgtggccttggccgagaccggtcctctgcggagagggccccgccctctgtgaaggcccgcccgggaattggcggcggcgctgcagccatttccggtttcggggaggtgggtggggtgcggagcgggacttggagcagccgccgccgctgccaccgcctacagagcctgccttgcgcctggtgctgccaggaagatgcggccggagcccggaggctgctgctgccgccgcacggtgcgggcgaatggctgcgtggcgaacggggaagtacggaacgggtacgtgaggagcagcgctgcagccgcagccgcagccgccgccggccagatccatcatgttacacaaaatggaggactatataaaagaccgtttaatgaagcttttgaagaaacaccaatgctggttgctgtgctcacgtatgtggggtatggcgtactcaccctctttggatatcttcgagatttcttgaggtattggagaattgaaaagtgtcaccatgcaacagaaagagaagaacaaaaggactttgtgtcattgtatcaagattttgaaaacttttatacaaggaatctgtacatgaggataagagacaactggaatcggccaatctgtagtgtgcctggagccagggtggacatcatggagagacagtctcatgattataactggtccttcaagtatacagggaatataataaagggtgttataaacatgggttcctacaactatcttggatttgcacggaatactggatcatgtcaagaagcagccgccaaagtccttgaggagtatggagctggagtgtgcagtactcggcaggaaattggaaacctggacaagcatgaagaactagaggagcttgtagcaaggttcttaggagtagaagctgctatggcgtatggcatgggatttgcaacgaattcaatgaacattcctgctcttgttggcaaaggttgcctgattctgagtgatgaactgaatcatgcatcactggttctgggagccagactgtcaggagcaaccattagaatcttcaaacacaacaatatgcaaagcctagagaagctattgaaagatgccattgtttatggtcagcctcggacacgaaggccctggaagaaaattctcatccttgtggaaggaatatatagcatggagggatctattgttcgtcttcctgaagtgattgccctcaagaagaaatacaaggcatacttgtatctggatgaggctcacagcattggcgccctgggccccacaggccggggtgtggtggagtactttggcctggatcccgaggatgtggatgttatgatgggaacgttcacaaagagttttggtgcttctggaggatatattggaggcaagaaggagctgatagactacctgcgaacacattctcatagtgcagtgtatgccacgtcattgtcacctcctgtagtggagcagatcatcacctccatgaagtgcatcatggggcaggatggcaccagccttggtaaagagtgtgtacaacagttagctgaaaacaccaggtatttcaggagacgcctgaaagagatgggcttcatcatctatggaaatgaagactctccagtagtgcctttgatgctctacatgcctgccaaaattggcgcctttggacgggagatgctgaagcggaacatcggtgtcgttgtggttggatttcctgccaccccaattattgagtccagagccaggttttgcctgtcagcagctcataccaaagaaatacttgatactgctttaaaggagatagatgaagttggggacctattgcagctgaagtattcccgtcatcggttggtacctctactggacaggccctttgacgagacgacgtatgaagaaacagaagactgagcctttttggtgctccctcagaggaactctccctcacccaggacagcctgtggcctttgtgagccagttccaggaaccacacttctgtggccatctcacgtgaaagacattgcctcagctactgaaggtggccacctccactctaaatgacattttgtaaatagtaaaaaactgcttctaatccttcctttgctaaatctcacctttaaaaacgaaggtgactcactttgctttttcagtccattaaaaaaacattttattttgcaaccattctacttgtgaaatcacgctgaccctagcctgtctctggctaaccacacaggccattcccctctcccagcaccttgcagacttgggcccatcaagagctactgctggccctggctccgcagcctggatacttacctggccctcctccctagggagcaagtgccttccacttacttcccatccaggtctcagaggtctcaaggccaaccttggaatccttatttaaccattcaagtaatcaacggaagttttcaccctttaatcttaagtttagccttttaagaaaaacagtaagcgatgactgctgaaaggctcattgtgtaatctcccaagggtttggtcttattccattttcttctggtcaccagatgatttcttcctttaccatcaaatacttcttcataatggtcacagtctgaggatgtgcgcaaattctggttcttcccaagctctaaccgtaacacgtcccaccccctttttaaagcacttactgttttcagagcacccatatcccaccctggtgagaaggccactctcacatctgagtgttgggtacaaagctgctccgtagagtgatgtgcactcctggtgggtgaggggcaggggcagtggcagtgtgcaaagaattgattactccttgcagagcctgtggcttgcatttcctactgctttctacgtttgaaaattatgacagtctctggctaggtctgggtccagattaggatttaaactgataaaggaaactgttggtaaatcctctgctcagaaagcatttatcatgttcctatttaaggattaggtttattaatttaggcctcttagaagctaacccacttaaatattactcttctgaatgctagttctcttttattcttgatgtcctaagtcaattgaatctggcatctggggctagggtctgcctgtctacatattttttatttttttctgagaaattctgaacacatagatctctttcctaaactgacattttctattttgactgttttcatactataaccaggtaaagggacttctttcagagagctttatactgcctgaccaaagaacaaatctgaaaatcaccattttaaagttattttttcagttgaaccaaagtttaagtgaagaggacttttggcatattatacccaggatcagtttgtctttttgtatccatcaagtattacaggagaaggattgggaacagaatggaaaaacagtgtatgaaagtcatgttacaggccgagtgcggtggctcacacctgtaatcctagcactttgggaggctgaggcaggtggctcacttgaggtcaggaattcaagaccagcctggccaacatggtgaaaccccgtctctactaaaaagacaaaaaattagctgggcgtggtggcgggcacctataatcccacctacttggtaggctgaggcaggagaatcgcttgaacccaggaggcggaggttgcagtgagacgagattgtgccactgcactctagcctgggtgacagagcaaaactgtgtctcaaaaaaaaaagtcatgttacacatttaagtttttgaaattgctccttttatcggtaaagattctcaatccaaattctcctgggtgtgttgtcatcagctgtgatatgtttgtgcacattacgtatagcagaggatgtaagcaatattattgtttgtgaagttttgtttttaatgtcttgagtatgagttatgtttagtcactgtcagcatctgagaactttaataagcccttgagatattccaaagttttattttacttttttaaagaacagaaaaagatgaatgaaagaaccaaggagagatgcagagactatatttagcatgtataggttaaagtaagaaggaggttgtggtaactaaataggagtcctataaaatcaaatacattgtcaaccttttctgcacatctagtttcctaccatagaatcccactggaataccacatagcttttgcactgcagttactatttactaatgtaaacgtagggtttgtaaaagtcacaaacttataagcaatgaacttacctgctagtctttttattttggcttgcatgaagtcactgcaaattcaaatgtcagtaccggcatttaaaatatatctatatcactttgttggtacaaagttatttcaagataagtgtaattttgttacaagtttattttgaagagacaaatctcctgtgatctatgcaggacctctgtactttctaaagaacaaaatgttatgtagacattatacatggttggttgtctcttcttgaaactgtaatgtaaatctagggtccagtcatatcctaggtatcatcatttatccaagtacttggaggaatacaagtatatataaatacagtcattgagaataagtcgatttgaggcatacaagagtagtttcttacacagtttaacacggcctgattcaagactctgataggattcaaacagataccggttaaccatgactaccaaaactgatcatctgagtcgattgatagaggtgtgactagtccttagcactttttctcattcctctttttattcagcattgctgttacctatttcaggtttataagacctctttcagcagatcacatcagaagccaggaaatgcatagctaggagatgtcaaaagcccatatgaggagtggaccaagcagcagtggcggtttctcctcgcatctttttttttttaagctttaacttagcaggggcatggactttatagcactttttcaactttttgctttgctttggataagaaatccttacctttaaaaaaagcttctagtctccataacccccaaagtactgcttatttgtttgaagaatccagccatcgtagtgctttagtcactatcgtaaacattcatgatagggcaaggattttaaaacaggattcttgcttctgtagtcatcaaggtgaacagaagcatcctacacaaccactaagggctctatgtttgtgtcatgcctcttcaaacaccaaggagttgaacatgcttccagtgatttgtctccgtaatgccttcttcctttatttggcctttctttctttctgtaccttcaagttcttgatttttaaaattccaactctagagaaaaccaatatatggtggtgctgggctttgaagatagcatatcagacgccttggttctgtttgtacacttagccttacatttcaggaggaggcttttcattaggggcttaagctagctcctttggcttttaaaaaaaattttttttcaaatttcttcattacctaagggagcctgcatctaaatttctcaactagttcagcctagctgaattttctagtgtgttatacactttgcttccttcttattggtgaaaaccagggggatgagtggcttccatggagagatttcctgatttctcagggaggaaaaaagtgatgacatttaccactacttttatgtttttcccctttttccaaattgataaggatttctggttcctagtgatccgggattgggcaacagtgcagaactgccagtcatgccgtaggccgtgaagaaagaatgtgagtaactgttgttttgcaaggatttgtagggttatgggcagttgttgtttgaagcattgctatgacctaattcccaaggtatctttcctctcttggtgttctaggtaagccaatgagctttaatctctacttgctataaccgtgtgcttagaaaaagaggtgagagtagtggttttccttcaaactgtccacattcatgaagattatgaattgttaggacagccagggcaagatagaccctgtctctacaaaaatttttttctaaattaaccgggcatggtggtgcctgcctgtagtcccacctgtgtgggagaatcacttgagcctgggaggtcaaggctgcagtgagccatgattgcacccctgcactccagcctgggtgacagagtgagaccctggctcaataagagggggaaaaaaaattgttaggagctgggtgcggatgcagcctgcaatcccagctacttgagaggctgaggccggaggattgcttaaacccaagaatttgagcgtagcctgggcaacacagcaagaccccatctaagaaaaaaatgttttttaaatcagcttagcccaaaggggttgtgaatggggaggtataaaaagcaaagattattttttggctactaagccaagaacttacagggattttttttttcagtcccagaacctacagataccctgctacttgcttcacgtggatgctcagtgcccagcagccatcttaatacattaaaccagtttaaaaaataccttccatgtggagaaaaacatgtctttttctcgcctcaactttatccacatgaaatatgtgcccatggctgggcgcagtggctcacctgtaatcccaacactttgggaggctgaagcaggcagattgcttgaggccaggagttcgagaacagtctggccaacatggcgaaacctcatctctactaaaattacaaaaattagccgggcatggtggcacatgcctgtaatcccagctacgtcaggaggctgaggcacaggaattgcttgaacccaagaggcagaggatgcaatgagccaagatcacaccactgcactccagccttggcgacagagggagactctgtctcaaaaaaaaaaaaaaaaggtgtgcccaggcccctagccattgccatgtgcccagccagagagccaaattagagggctggcttccctatcacacagaataaatgctagtgctagccaatgatccctttgcttttaatgtatagaaaatactgttgttccttttgtcatttccagtgacatctgttttctaagcagctcttttctagggaggaaaccaaaggggctaggttaagaccctaatagaaatgttttttctaatctctggtgagtctggaagtgtcacattcacagtccacccttgggagtggcttggtggagctggggacaaggttttgtttactacatagtgcacatgataaatggccttaaactgtgattctttctggtaggataagttataataaactgaccctaaagaatgcaatggcttttaaactgcagttactgtgttcttaatgaagcaatacccaaagctctgttcttttggagcacttgaggggagcttgaatgaaaggtgcagataagagcagtaccttgatcttatgctttctgagtgtcctgccttgttgccatctgcatggatgagtgaatgcttctatgcacgaggagactcaagccaactcagagtctgctttttccaacgctcttcccaggtttcttttgcaaagcttggtcatttggcccaggtcttcctggaaagtggagtacatgtcactgactagggtggcgtggtgtctttacccttaacattaagtcttgttacctcagtgatgtgaagccaatggttggaattataaaaagcatccttgctggttcttcacaggacactggaacccaccctgtcaattcagctagcatgtccacacagtcttgatgatccctctctgtaacaggcagctaacattaagagaagggggaaagagaagaagagagcaatagcttatgggagagctgagatcttacttcgttgacccatatttttcccctgaccaagttacctgtaaactggaatttgcaaggggatgctgtgatgataacccctttctattgctgtaatgttcatataacctgggaaactgagagaaggggatgtgtaaataaaagcttaaacattttagtaatgtgttaaaatgtcactctctcttaccctgtttcccttttttgccagatgatgatttttttatttttattttgtactttactggatgactgtgaagcgatgagtattgggttggggtaggtgtgttgattttgagagtgcatgttaagaactgaaggggaactacttgagatgacttaagaagcatcccatgcaaatatcttgttttgccctaataaaatattcagaaagata

SEQ ID NO: 150324 - protein, 308 aa, Artificial Sequence
  derived and/or modified sequence
MPGQELRTVNGSQMLLVLLVLSWLPHGGALSLAEASRASFPGPSELHSEDSRFRELRKRYEDLLTRLRANQSWEDSNTDLVPAPAVRILTPEVRLGSGGHLHLRISRAALPEGLPEASRLHRALFRLSPTASRSWDVTRPLRRQLSLARPQAPALHLRLSPPPSQSDQLLAESSSARPQLELHLRPQAARGRRRARARNGDHCPLGPGRCCRLHTVRASLEDLGWADWVLSPREVQVTMCIGACPSQFRAANMHAQIKTSLHRLKPDTVPAPCCVPASYNPMVLIQKTDTGVSLQTYDDLLAKDCHCI

SEQ ID NO: 150325 - DNA, 927 bp, Artificial Sequence
  derived and/or modified sequence
atgccagggcaggagctccgtaccgtcaacggatcccagatgctccttgtgctgctggtgcttagctggctgcctcacggtggggccctctcgttggcagaagccagcagggcctccttcccaggcccatccgagctacacagcgaggatagcaggtttcgcgaactgaggaagcgctacgaggatctgctgacgcggctgcgcgcgaatcagtcctgggaggactctaataccgatctggttcctgcccccgccgtgcggatcctgacacctgaagtccggctggggtctggaggccacctgcatctgagaattagcagggccgcccttcctgagggcctgccggaggctagccgactgcacagggctttgtttcggctgagcccaactgccagccggtcgtgggatgtaactaggccactgaggcgacagctttcgctcgctcgcccccaggctcctgcattgcacctgcgcttgtctccccccccatcccagtctgaccagttgctagcggaatcatcatcagcccggccgcagctggagctgcacctgaggccccaggccgcgcgtggccgcagacgggcacgcgcccgaaacggggaccactgtcctctgggacccggaagatgttgccgacttcacaccgtgagagccagtctggaggatctgggctgggcagactgggtgctctcacccagggaggtacaagtcacgatgtgtattggtgcgtgtccatctcagttccgggccgcgaacatgcacgctcagattaaaacttcactccataggctgaaaccagacactgttcccgctccatgctgtgtgccagcctcatacaaccctatggtgctgattcaaaagactgacacgggtgtcagcctgcagacgtacgacgaccttctcgcaaaagactgccattgcatttag

SEQ ID NO: 150326 - DNA, 927 bp, Artificial Sequence
  derived and/or modified sequence
atgcccggccaggaactccgcaccgtcaatggaagccagatgctgcttgtgctgctcgttctgagttggttgcctcacggaggcgccttgtctttagccgaagcctcccgtgcttctttcccaggaccctcagaactacacagtgaagattctaggtttcgggaattgaggaaacgctacgaggacctgctgactcgtctcagggcaaaccagtcttgggaagactccaacactgacctggtccctgccccagccgtaagaatcctgactcctgaagtccgcttgggtagcggagggcacctccacctccgaatctctcgagcggctttacccgagggcctacctgaggcttcccggctgcacagggcattgttcagactgagccctaccgcttctcggtcctgggatgtgacccgacccctgcgtcggcagctaagcctggcgagaccgcaggccccagctctccacctgcgcttaagccccccaccatcgcagtccgaccaattgctcgctgagtcttccagcgcaaggccccaattagagctacacctacgccctcaggccgctaggggcagacggagagccagagctcgcaatggggaccactgccccttgggtccgggaaggtgttgccgcctccataccgtgcgcgcctctctcgaggacctgggctgggccgattgggttctgagtcccagggaagtccaggtgacaatgtgcatcggcgcgtgtccctcccaattccgggctgcaaacatgcatgcacagataaagacaagcctgcaccgactgaaacctgatacagtacccgcgccttgttgcgttcctgctagttacaatcctatggtcctcatccagaaaactgacaccggcgtttccttgcaaacgtacgatgatctgcttgccaaggactgccactgcatctag

SEQ ID NO: 150327 - DNA, 1200 bp, Artificial Sequence
  derived and/or modified sequence
agtcccagctcagagccgcaacctgcacagccatgcccgggcaagaactcaggacggtgaatggctctcagatgctcctggtgttgctggtgctctcgtggctgccgcatgggggcgccctgtctctggccgaggcgagccgcgcaagtttcccgggaccctcagagttgcactccgaagactccagattccgagagttgcggaaacgctacgaggacctgctaaccaggctgcgggccaaccagagctgggaagattcgaacaccgacctcgtcccggcccctgcagtccggatactcacgccagaagtgcggctgggatccggcggccacctgcacctgcgtatctctcgggccgcccttcccgaggggctccccgaggcctcccgccttcaccgggctctgttccggctgtccccgacggcgtcaaggtcgtgggacgtgacacgaccgctgcggcgtcagctcagccttgcaagaccccaggcgcccgcgctgcacctgcgactgtcgccgccgccgtcgcagtcggaccaactgctggcagaatcttcgtccgcacggccccagctggagttgcacttgcggccgcaagccgccagggggcgccgcagagcgcgtgcgcgcaacggggaccactgtccgctcgggcccgggcgttgctgccgtctgcacacggtccgcgcgtcgctggaagacctgggctgggccgattgggtgctgtcgccacgggaggtgcaagtgaccatgtgcatcggcgcgtgcccgagccagttccgggcggcaaacatgcacgcgcagatcaagacgagcctgcaccgcctgaagcccgacacggtgccagcgccctgctgcgtgcccgccagctacaatcccatggtgctcattcaaaagaccgacaccggggtgtcgctccagacctatgatgacttgttagccaaagactgccactgcatatgagcagtcctggtccttccactgtgcacctgcgcggaggacgcgacctcagttgtcctgccctgtggaatgggctcaaggttcctgagacacccgattcctgcccaaacagctgtatttatataagtctgttatttattattaatttattggggtgaccttcttggggactcgggggctggtctgatggaactgtgtatttatttaaaactctggtgataaaaataaagctgtctgaactgtt

SEQ ID NO: 150328 - DNA, 1720 bp, Artificial Sequence
  derived and/or modified sequence
agaaagcaactagcacagccatgcccaggccaggacccgtgacacagcgatgctctcagatgctgctgatgttacagatgttgttgggggcaccctgagggggcaccctgactctgcaggtgagaaccttctggggttcctaggaccctcggacaagcactctgatccggatgactccaggtcccaggagttgcagaaacgccaccaggaccttcagagcaccagttagacaaggagagccaggaggagctgggccccaacctcatccaaaagcacagactcccaggctggaatggtgtcctcatatcgaggaagaggatactgaggcccagaaatgtgccctagctttactaggagcgcccccacctaaagatcctccccctaaatacacccccagaccccgcccagctgtggtcattggagtgtttactctgcaggcagggggaggagggcgggactgagcaggcggagacggacaaagtccggggactataaaggccggtccggcagcatctggtcagtcccagctcagagccgcaacctgcacagccatgcccgggcaagaactcaggacggtgaatggctctcagatgctcctggtgttgctggtgctctcgtggctgccgcatgggggcgccctgtctctggccgaggcgagccgcgcaagtttcccgggaccctcagagttgcactccgaagactccagattccgagagttgcggaaacgctacgaggacctgctaaccaggctgcgggccaaccagagctgggaagattcgaacaccgacctcgtcccggcccctgcagtccggatactcacgccagaagtgcggctgggatccggcggccacctgcacctgcgtatctctcgggccgcccttcccgaggggctccccgaggcctcccgccttcaccgggctctgttccggctgtccccgacggcgtcaaggtcgtgggacgtgacacgaccgctgcggcgtcagctcagccttgcaagaccccaggcgcccgcgctgcacctgcgactgtcgccgccgccgtcgcagtcggaccaactgctggcagaatcttcgtccgcacggccccagctggagttgcacttgcggccgcaagccgccagggggcgccgcagagcgcgtgcgcgcaacggggaccactgtccgctcgggcccgggcgttgctgccgtctgcacacggtccgcgcgtcgctggaagacctgggctgggccgattgggtgctgtcgccacgggaggtgcaagtgaccatgtgcatcggcgcgtgcccgagccagttccgggcggcaaacatgcacgcgcagatcaagacgagcctgcaccgcctgaagcccgacacggtgccagcgccctgctgcgtgcccgccagctacaatcccatggtgctcattcaaaagaccgacaccggggtgtcgctccagacctatgatgacttgttagccaaagactgccactgcatatgagcagtcctggtccttccactgtgcacctgcgcggaggacgcgacctcagttgtcctgccctgtggaatgggctcaaggttcctgagacacccgattcctgcccaaacagctgtatttatataagtctgttatttattattaatttattggggtgaccttcttggggactcgggggctggtctgatggaactgtgtatttatttaaaactctggtgataaaaataaagctgtctgaactgttc

SEQ ID NO: 150329 - DNA, 927 bp, Artificial Sequence
  derived and/or modified sequence
atgcctggccaggagctgaggacagtgaatggcagccagatgctgctggtgctgctggtgctgtcctggctgccccacggcggggccctgagcctggccgaggccagccgggccagcttccctggccccagcgagctgcacagcgaggacagccgcttccgggagctgaggaagagatatgaggacctgctgacccggctgcgggccaaccagagctgggaggacagcaacacagacctggtgcctgccccagctgtgcgcatcctgaccccagaggtgcggctgggcagcggcggccacctgcacctgcgcatcagccgggccgccctgcctgagggcctgcctgaggccagccggctgcaccgggccctcttccggctgagccccacagccagccgctcctgggatgtgacccggcccctgcggcggcagctgagcctggcccggccccaggccccagccctgcacctgcggctgagccccccacccagccagagcgaccagctgctggccgagagcagcagcgcccggccccagctggagctgcacctgcggccccaggccgcccggggcagaagaagagcccgggccagaaatggagaccactgccccctgggccctggccgctgctgccgcctgcacacagtgcgggccagcctggaggacctgggctgggccgactgggtgctgagcccccgggaggtgcaggtgaccatgtgcattggagcctgccccagccagttccgggccgccaacatgcacgcccagatcaagaccagcctgcaccggctgaagccagacacagtgcctgccccctgctgcgtgcctgccagctacaaccccatggtgctgatccagaagacagacaccggggtgtccctgcagacctatgatgacctgctggccaaggactgccactgcatctag

SEQ ID NO: 150330 - DNA, 927 bp, Artificial Sequence
  derived and/or modified sequence
atgcccggccaggagctgcggaccgtgaacggcagccagatgctgctggtcctactcgtgctgtcctggctgcctcacggaggagctctgtctcttgccgaagctagtcgcgcatcttttccagggccaagtgaactacactccgaagactctaggtttcgcgaattgaggaaacggtatgaggaccttctcactaggctgagagccaaccagtcctgggaggattccaataccgacctggtgcctgcccccgctgtcaggatcctgacccctgaggtcagactgggcagcggggggcacctgcacctgaggatttcgcgggccgcactgccggaaggtctgccagaggccagcaggctccaccgagcactgttcagactgtctcccaccgcttcaaggagctgggatgttacaaggccacttcgccggcagctgagcctggcgcgtcctcaagctccagctctccatttgagactatccccgcctcctagccaaagtgaccaactgcttgccgagagttccagcgccaggcctcagttggagcttcatttgcggccccaagctgcaaggggcaggcggagggccagagccaggaatggagatcattgtcctctgggccctggacgctgctgccggttacacaccgtgcgtgctagcctcgaggatctcggatgggcagattgggtgttaagcccaagagaggtgcaggtgaccatgtgtattggcgcttgtccgtcccaattcagagcagcaaatatgcatgcccaaataaaaacttctttgcaccgcctgaagcctgatactgttcccgcaccctgctgtgtgccggcgtcgtataaccccatggtgttaatccagaaaaccgacaccggcgtatcgcttcagacatatgacgatctcctagcaaaggattgccactgtatctag

SEQ ID NO: 150331 - DNA, 927 bp, Artificial Sequence
  derived and/or modified sequence
atgcccggccaggagctgcggaccgtgaacggcagccagatgctgctagtgctacttgtgttaagttggctgcctcacggcggagccctttctctggctgaggcatcacgggcaagcttccccgggccaagtgagctacactctgaagactctaggtttagggagctgcgcaagcgatatgaggacctattgaccaggctgcgggcgaatcaatcatgggaggactcaaacacagaccttgtaccagctcctgccgttcgcatactcactcccgaggtgcgtctcgggagcggggggcacctgcatcttcggatctcacgcgccgcacttccagagggcctccctgaggccagcagacttcatcgggctctgttccgtctgagccctaccgctagtcgcagttgggacgtcactcgccccctgcgaagacagctctcgttggccagaccacaggccccagcgctacacctgcgcttaagccccccccccagccagtccgatcaacttctcgctgaaagctccagcgctaggcctcagctagagttgcacctgcgtccccaggccgcacgcggccgccgtcgcgctcgtgctagaaacggtgaccattgtcctctggggccaggtcgctgctgcagactgcatacagtgagggcctcgctggaggatttaggctgggcggattgggtgctgtcccctcgcgaggtacaagtgaccatgtgtattggcgcatgtccgagtcaattccgcgcggccaatatgcatgctcaaatcaaaacctcgctacacagacttaagccagacacggtccccgctccatgttgcgtgccagcgtcttacaaccctatggtgttgatccaaaagaccgataccggagtgagtctgcagacgtacgacgatcttcttgctaaggattgccattgcatctag

SEQ ID NO: 150332 - DNA, 927 bp, Artificial Sequence
  derived and/or modified sequence
atgcctgggcaggaattgcggaccgttaacggatcccagatgctactagttttattagtcctctcgtggctgccacatggcggagcactgtctttagccgaggccagtagggcttcttttcccggacctagcgaactgcattctgaagatagcaggtttagggagctgcgaaaaaggtatgaggacctcctgacccggctgagagctaatcagagttgggaagattctaatactgatctagtgccagccccagcggtgcgcattctcactcctgaggttcggctcggctccggcggacatctccatctcaggatcagccgcgcagcgctaccagagggtctaccagaagctagcaggcttcaccgcgcattgttcagactctcccctacagcctctcggagctgggacgtgacgcgacccttgcggaggcaattgtcactggccaggccccaagcgcctgctcttcacttgaggttatcccctccaccctctcagtctgatcagcttctagctgagtctagtagcgccagaccccagttagagctgcacctgcgtccccaagccgcaagagggagacggagagccagggcgcgaaatggagaccattgcccactgggtcccggtcgatgctgtcgcctgcacacagtgagagcctcactggaggatcttgggtgggctgattgggtcttgtccccccgtgaggttcaagtgacgatgtgcattggtgcctgcccctcccagttcagggctgcaaacatgcatgcacagatcaaaaccagtctacataggctcaaacccgataccgtcccagcgccatgctgcgttcctgcatcctacaacccgatggtgttaatccagaagactgacacaggggtgagcctgcagacctatgacgatcttttggctaaggactgccactgtatctag

SEQ ID NO: 150333 - DNA, 927 bp, Artificial Sequence
  derived and/or modified sequence
atgccaggccaggagcttagaacagtgaatggctctcagatgctgctggtgctcctggtcctgagctggttgccccatggaggggcactctctcttgccgaggcaagccgggcttctttcccagggccttcagaactacacagcgaggactcacggtttagggagttaagaaagcggtatgaggatcttttgacccggcttcgggctaaccagagctgggaagatagcaataccgacctggtgcctgccccagctgtaaggatccttacccctgaggtaagactgggaagcggcggacacctgcatctgcgcatttcccgagccgcattgcccgagggtcttccagaggcctcgagactgcatagagcactgttccgactaagtcccacggctagccggtcgtgggacgtcacccggccactccgccgacagctaagcttggccagaccccaggctcctgcacttcatctcaggttgagccctcctccctcccagtccgaccagcttctcgctgagagtagctccgcgaggccacagctagagctccacttgaggccgcaagccgctagagggaggcgaagggccagagcccgaaatggagatcattgtcccctgggcccaggcaggtgctgccggctgcacacagtcagggcctctctggaagatctgggctgggccgactgggtactcagtccgagggaagtccaggttaccatgtgcatcggagcttgccctagccaattcagagccgctaacatgcatgctcaaatcaaaacttccctccaccgcctcaagccggatacggtgcccgctccctgctgcgtgccggcttcatataatcccatggtcctgattcagaagacagacactggcgttagcctccaaacatatgatgatctgctggccaaggactgccactgcatttag

SEQ ID NO: 150334 - DNA, 927 bp, Artificial Sequence
  derived and/or modified sequence
atgcccggccaggagctgagaaccgtgaacggcagccagatgctgctggtgctgctggtgctgagctggctgccccacggcggcgccctgagcctggccgaggccagcagagccagcttccccggccccagcgagctgcacagcgaggacagcagattcagagagctgagaaagagatacgaggacctgctgaccagactgagagccaaccagagctgggaggacagcaacaccgacctggtgcccgcccccgccgtgagaatcctgacccccgaggtgagactgggcagcggcggccacctgcacctgagaatcagcagagccgccctgcccgagggcctgcccgaggccagcagactgcacagagccctgttcagactgagccccaccgccagcagaagctgggacgtgaccagacccctgagaagacagctgagcctggccagaccccaggcccccgccctgcacctgagactgagccccccccccagccagagcgaccagctgctggccgagagcagcagcgccagaccccagctggagctgcacctgagaccccaggccgccagaggcagaagaagagccagagccagaaacggcgaccactgccccctgggccccggcagatgctgcagactgcacaccgtgagagccagcctggaggacctgggctgggccgactgggtgctgagccccagagaggtgcaggtgaccatgtgcatcggcgcctgccccagccagttcagagccgccaacatgcacgcccagatcaagaccagcctgcacagactgaagcccgacaccgtgcccgccccctgctgcgtgcccgccagctacaaccccatggtgctgatccagaagaccgacaccggcgtgagcctgcagacctacgacgacctgctggccaaggactgccactgcatctag

SEQ ID NO: 150335 - protein, 186 aa, Artificial Sequence
  derived and/or modified sequence
MDADSDVALDILITNVVCVFRTRCHLNLRKIALEGANVIYKRDVGKVLMKLRKPRITATIWSSGKIICTGATSEEEAKFGARRLARSLQKLGFQVIFTDFKVVNVLAVCNMPFEIRLPEFTKNNRPHASYEPELHPAVCYRIKSLRATLQIFSTGSITVTGPNVKAVATAVEQIYPFVFESRKEIL

SEQ ID NO: 150336 - protein, 91 aa, Artificial Sequence
  derived and/or modified sequence
MDADSDVALDILITNVVCVFRTRCHLNLRKIALEGANVIYKRDVGKVLMKLRKPRITATIWSSGKIICTGATSEEEAKFGARRLARSLQKL

SEQ ID NO: 150337 - protein, 163 aa, Artificial Sequence
  derived and/or modified sequence
MDADSDVALDILITNVVCVFRTRCHLNLRKIALEGANVIYKRDVGKVLMKLRKPRITATIWSSGKIICTGATSEEEAKFGARRLARSLQKLGFQVIFTDFKVVNVLAVCNMPFEIRLPEFTKNNRPHASYEPELHPAVCYRIKSLRATLQIFSTGSITVTGIL

SEQ ID NO: 150338 - protein, 128 aa, Artificial Sequence
  derived and/or modified sequence
MDADSDVALDILITNVVCVFRTRCHLNLRKIALEGANVIYKRDVGKVLMKLRKPRITATIWSSGKIICTGATSEEEAKFGARRLARSLQKLGFQVIFTDFKVVNVLAVCNMPFEIRLPEFTKNNRPHA

SEQ ID NO: 150339 - protein, 45 aa, Artificial Sequence
  derived and/or modified sequence
MDADSDVALDILITNVVCVFRTRCHLNLRKIALEGANVIYKRDVG

SEQ ID NO: 150340 - DNA, 1340 bp, Artificial Sequence
  derived and/or modified sequence
gcactgtctctatgctccccagcgtctagtctatttattgtcgcggggaagctgcggccgcctcgcacccggaacaacaaagcaaggaagacggagtccgagcctcgggggctcctagcaacgggccggggcgggagttccatggagactggggagcgcgcccgtctcatcctcatccttgtcctccagcttctccttcgcatccgacgcaaccggcagcagcgctgccgccgcgtcctcagccaccgctccctcttcccacggatgtgatcttcgtggtggaaagctaaattttaaaaccaccccaatggatgcagacagtgatgttgcattggacattctaattacaaatgtagtctgtgtttttagaacaagatgtcatttaaacttaaggaagattgctttggaaggagcaaatgtaatttataaacgtgatgttggaaaagtattaatgaagcttagaaaacctagaattacagctacaatttggtcctcaggaaaaattatttgcactggagcaacaagtgaagaagaagctaaatttggtgccagacgcttagcccgtagtctgcagaaactaggttttcaggtaatatttacagattttaaggttgtaaacgttctggcagtgtgtaacatgccatttgaaatccgtttgccagaattcacaaagaacaatagacctcatgccagttacgaacctgaacttcatcctgctgtgtgctatcggataaaatctctaagagctacattacagattttttcaacaggaagtatcacagtaacagggcccaatgtaaaggctgttgctactgctgtggaacagatttacccatttgtgtttgaaagcaggaaagaaattttataattcaccacttaattggttagaatctctaactgagcaccttttaaacctgctgcacattggactcaaaaggaaaactggaccaacaataattgaggaaatagactcttttattcattcacggctacagtgtaagctccagtccctttggattttattccaaaccttgctgtaatataaaaggaagtttacaagacatgatattgctgcttttacaaaaggacattctatttattttcgcagtaattctcatgtccccataagcagagctgtcacagtgtgcactaccttagattgttttattgtcgtcattgttatttttttccattttgagctaatgtgttttatttgtgaatagtcttttacatttttgtatgctgaatatgggcaccaaagaacctgtaaaagttatctttttcaattgaatgtgcacaaataaaagtttggaaaagataaaaaaaaaaaaaaaaaaaaa

SEQ ID NO: 150341 - DNA, 276 bp, Artificial Sequence
  derived and/or modified sequence
atggacgccgacagcgacgtggccctggacatcctgatcaccaacgtggtgtgcgtgttcagaaccagatgccacctgaacctgagaaagatcgccctggagggcgccaacgtgatctacaagagagacgtgggcaaggtgctgatgaagctgagaaagcccagaatcaccgccaccatctggagcagcggcaagatcatctgcaccggcgccaccagcgaggaggaggccaagttcggcgccagaagactggccagaagcctgcagaagctgtag

SEQ ID NO: 150342 - DNA, 492 bp, Artificial Sequence
  derived and/or modified sequence
atggacgccgacagcgacgtggccctggacatcctgatcaccaacgtggtgtgcgtgttcagaaccagatgccacctgaacctgagaaagatcgccctggagggcgccaacgtgatctacaagagagacgtgggcaaggtgctgatgaagctgagaaagcccagaatcaccgccaccatctggagcagcggcaagatcatctgcaccggcgccaccagcgaggaggaggccaagttcggcgccagaagactggccagaagcctgcagaagctgggcttccaggtgatcttcaccgacttcaaggtggtgaacgtgctggccgtgtgcaacatgcccttcgagatcagactgcccgagttcaccaagaacaacagaccccacgccagctacgagcccgagctgcaccccgccgtgtgctacagaatcaagagcctgagagccaccctgcagatcttcagcaccggcagcatcaccgtgaccggcatcctgtag

SEQ ID NO: 150343 - DNA, 387 bp, Artificial Sequence
  derived and/or modified sequence
atggacgccgacagcgacgtggccctggacatcctgatcaccaacgtggtgtgcgtgttcagaaccagatgccacctgaacctgagaaagatcgccctggagggcgccaacgtgatctacaagagagacgtgggcaaggtgctgatgaagctgagaaagcccagaatcaccgccaccatctggagcagcggcaagatcatctgcaccggcgccaccagcgaggaggaggccaagttcggcgccagaagactggccagaagcctgcagaagctgggcttccaggtgatcttcaccgacttcaaggtggtgaacgtgctggccgtgtgcaacatgcccttcgagatcagactgcccgagttcaccaagaacaacagaccccacgcctag

SEQ ID NO: 150344 - DNA, 138 bp, Artificial Sequence
  derived and/or modified sequence
atggacgccgacagcgacgtggccctggacatcctgatcaccaacgtggtgtgcgtgttcagaaccagatgccacctgaacctgagaaagatcgccctggagggcgccaacgtgatctacaagagagacgtgggctag

SEQ ID NO: 150345 - DNA, 561 bp, Artificial Sequence
  derived and/or modified sequence
atggacgctgactcagatgtggccttagacattctcattacaaatgtcgtgtgtgtgttccggactcgttgtcaccttaatttaaggaaaatcgcccttgagggtgccaacgtgatttataaacgcgacgttggcaaagttctaatgaagctgcgtaagcccaggatcacggccaccatttggtcttcaggaaagatcatatgcactggtgccactagcgaagaagaggcaaaatttggcgctaggaggctagctcgcagcttacaaaagctgggttttcaagtgatctttacagattttaaggtggtgaacgtgctcgccgtgtgcaacatgccgtttgagattcggttaccggagtttaccaagaacaatcggccccacgcatcttatgaaccagaactgcatccagccgtgtgctacaggatcaagtctctccgagccaccctccagatcttctcaactggctctataacagttactgggccaaatgtgaaggcagtcgctaccgctgttgaacagatatatccgttcgtctttgagagccggaaagagattctctag

SEQ ID NO: 150346 - DNA, 276 bp, Artificial Sequence
  derived and/or modified sequence
atggacgctgacagcgacgtcgcgctggacattctgattacgaatgttgtttgtgtcttccggacacgttgccatcttaacctccggaagatcgccttggagggggccaatgtgatctacaaaagggacgtgggaaaggtgctgatgaaactccgtaagcccagaattaccgccaccatctggagctccgggaaaattatatgtactggggctacctccgaagaggaggccaagttcggcgcacgtcgcttggcccgatccctgcagaaactgtag

SEQ ID NO: 150347 - DNA, 492 bp, Artificial Sequence
  derived and/or modified sequence
atggatgcggacagtgacgtagctttagacattctgattaccaacgtcgtgtgcgtgttccgtactcggtgtcacctgaatttaagaaaaattgccctggagggtgccaacgttatatacaaaagggacgttgggaaagtgcttatgaaattgagaaagccacggataactgcaaccatctggagtagtggcaagattatttgtacaggtgccaccagcgaggaggaggcaaagttcggtgcacggagactggctagatcacttcaaaaattgggattccaagtgatatttacggattttaaggtcgtgaacgttctcgcagtgtgcaacatgccttttgagatcaggctacccgagttcacaaagaataaccgccctcatgcgagctacgaaccagagttgcatcctgccgtttgttacagaatcaaaagtctgagagcaaccctccagatctttagtactgggagcatcactgtgactggcattctgtag

SEQ ID NO: 150348 - DNA, 623 bp, Artificial Sequence
  derived and/or modified sequence
ctcgcacccggaacaacaaagcaaggaagacggagtccgagcctcgggggctcctagcaacgggccggggcgggagttccatggagactggggagcgcgcccgtctcatcctcatccttgtcctccagcttctccttcgcatccgacgcaaccggcagcagcgctgccgccgcgtcctcagccaccgctccctcttcccacggagcgaggtttcaccaggctggtctccaactcctgacctcaaatgatccacccatcttggcctcccagagtgctgagattacaggcgtgaggcaccactcctggatgtgatcttcgtggtggaaagctaaattttaaaaccaccccaatggatgcagacagtgatgttgcattggacattctaattacaaatgtagtctgtgtttttagaacaagatgtcatttaaacttaaggaagattgctttggaaggagcaaatgtaatttataaacgtgatgttggaaaagtattaatgaagcttagaaaacctagaattacagctacaatttggtcctcaggaaaaattatttgcactggagcaacaagtgaagaagaagctaaatttggtgccagacgcttagcccgtagtctgcagaaactag

SEQ ID NO: 150349 - DNA, 808 bp, Artificial Sequence
  derived and/or modified sequence
atttattgtcgcggggaagctgcggccgcctcgcacccggaacaacaaagcaaggaagacggagtccgagcctcgggggctcctagcaacgggccggggcgggagttccatggagactggggagcgcgcccgtctcatcctcatccttgtcctccagcttctccttcgcatccgacgcaaccggcagcagcgctgccgccgcgtcctcagccaccgctccctcttcccacggatgtgatcttcgtggtggaaagctaaattttaaaaccaccccaatggatgcagacagtgatgttgcattggacattctaattacaaatgtagtctgtgtttttagaacaagatgtcatttaaacttaaggaagattgctttggaaggagcaaatgtaatttataaacgtgatgttggaaaagtattaatgaagcttagaaaacctagaattacagctacaatttggtcctcaggaaaaattatttgcactggagcaacaagtgaagaagaagctaaatttggtgccagacgcttagcccgtagtctgcagaaactaggttttcaggtaatatttacagattttaaggttgttaacgttctggcagtgtgtaacatgccatttgaaatccgtttgccagaattcacaaagaacaatagacctcatgccagttacgaacctgaacttcatcctgctgtgtgctatcggataaaatctctaagagctacattacagattttttcaacaggaagtatcacagtaacaggtattctatgatattgaaaccacacttatcaattatggattgaatgatacaa

SEQ ID NO: 150350 - DNA, 387 bp, Artificial Sequence
  derived and/or modified sequence
atggacgccgatagcgacgtggcactcgatattttgattacaaatgtagtgtgtgtcttccggaccagatgtcaccttaaccttcgaaagattgccttagaaggtgcaaatgtgatctacaagcgggatgtggggaaagtgctcatgaagctcagaaaaccacggataacggccacaatctggagctcaggcaaaatcatctgcacgggcgccaccagcgaagaggaagctaagttcggagccagacgactagctcggagtctccagaagctggggtttcaggtgatatttacagattttaaagtggtaaacgtgttggccgtctgcaacatgcctttcgaaatccgcctgcctgagtttactaagaacaacagaccccacgcttag

SEQ ID NO: 150351 - DNA, 138 bp, Artificial Sequence
  derived and/or modified sequence
atggatgctgattctgacgtggcactcgacatcctgatcacgaacgtggtgtgcgtgttccggaccaggtgccacctgaacttgagaaagatcgcactggagggagcgaacgtgatttacaagcgggatgtgggttag

SEQ ID NO: 150352 - DNA, 561 bp, Artificial Sequence
  derived and/or modified sequence
atggatgctgacagtgatgtggccctggacatcctgatcaccaacgtggtgtgtgtgttccgcacccgctgccacctgaacctgaggaagatcgccctggagggcgccaacgtcatctacaagagagatgtgggcaaggtgctgatgaagctgaggaagccccgcatcacagccaccatctggagcagcggcaagatcatctgcacaggagccaccagcgaggaggaggccaagtttggagcccggcggctggcccggagcctgcagaagctgggcttccaggtgatcttcacagacttcaaggtggtgaatgtgctggccgtgtgcaacatgccctttgagatccggctgcctgagttcaccaagaacaaccggccccacgccagctatgagcctgagctgcaccctgctgtgtgctaccgcatcaagagcctgcgggccaccctgcagatcttcagcacaggcagcatcaccgtgacaggccccaacgtgaaggctgtggccacagctgtggagcagatctacccctttgtgtttgagagcaggaaggagatcctgtag

SEQ ID NO: 150353 - DNA, 276 bp, Artificial Sequence
  derived and/or modified sequence
atggatgctgacagtgatgtggccctggacatcctgatcaccaacgtggtgtgtgtgttccgcacccgctgccacctgaacctgaggaagatcgccctggagggcgccaacgtcatctacaagagagatgtgggcaaggtgctgatgaagctgaggaagccccgcatcacagccaccatctggagcagcggcaagatcatctgcacaggagccaccagcgaggaggaggccaagtttggagcccggcggctggcccggagcctgcagaagctgtag

SEQ ID NO: 150354 - DNA, 492 bp, Artificial Sequence
  derived and/or modified sequence
atggatgctgacagtgatgtggccctggacatcctgatcaccaacgtggtgtgtgtgttccgcacccgctgccacctgaacctgaggaagatcgccctggagggcgccaacgtcatctacaagagagatgtgggcaaggtgctgatgaagctgaggaagccccgcatcacagccaccatctggagcagcggcaagatcatctgcacaggagccaccagcgaggaggaggccaagtttggagcccggcggctggcccggagcctgcagaagctgggcttccaggtgatcttcacagacttcaaggtggtgaatgtgctggccgtgtgcaacatgccctttgagatccggctgcctgagttcaccaagaacaaccggccccacgccagctatgagcctgagctgcaccctgctgtgtgctaccgcatcaagagcctgcgggccaccctgcagatcttcagcacaggcagcatcaccgtgacaggcatcctgtag

SEQ ID NO: 150355 - DNA, 387 bp, Artificial Sequence
  derived and/or modified sequence
atggatgctgacagtgatgtggccctggacatcctgatcaccaacgtggtgtgtgtgttccgcacccgctgccacctgaacctgaggaagatcgccctggagggcgccaacgtcatctacaagagagatgtgggcaaggtgctgatgaagctgaggaagccccgcatcacagccaccatctggagcagcggcaagatcatctgcacaggagccaccagcgaggaggaggccaagtttggagcccggcggctggcccggagcctgcagaagctgggcttccaggtgatcttcacagacttcaaggtggtgaatgtgctggccgtgtgcaacatgccctttgagatccggctgcctgagttcaccaagaacaaccggccccacgcctag

SEQ ID NO: 150356 - DNA, 138 bp, Artificial Sequence
  derived and/or modified sequence
atggatgctgacagtgatgtggccctggacatcctgatcaccaacgtggtgtgtgtgttccgcacccgctgccacctgaacctgaggaagatcgccctggagggcgccaacgtcatctacaagagagatgtgggctag

SEQ ID NO: 150357 - DNA, 561 bp, Artificial Sequence
  derived and/or modified sequence
atggacgccgacagcgacgtggccctggacatcctgatcaccaacgtcgtctgcgtgtttcgcactcggtgccacctgaacctgcgcaaaatcgcacttgagggagccaatgtgatctacaaacgggacgtcggtaaagtcctgatgaagcttagaaagcccaggatcaccgcaaccatctggtcctcaggcaaaattatttgtacaggagctacttcagaggaggaggccaaatttggggctagacgcctcgcgcggtcactgcaaaagctgggctttcaggttattttcaccgacttcaaagtcgtgaacgtgttagccgtttgtaacatgccttttgaaatacgtctcccagagttcactaagaacaatcgcccccacgcctcttatgagcctgagctccatccggcggtgtgttatcggatcaagtccctccgcgcgacactgcagatcttttccacaggttccatcactgttacaggacctaatgtgaaggccgtggctaccgctgtagaacaaatttacccctttgtgttcgaatcaagaaaagagatcctttag

SEQ ID NO: 150358 - DNA, 276 bp, Artificial Sequence
  derived and/or modified sequence
atggacgccgacagcgacgtggccctggacatcctgatcaccaacgtggtgtgcgtgttcaggacccgctgtcaccttaacctgcgaaaaatcgcactggagggggccaacgtcatctacaaaagagatgtcggcaaggtcctgatgaaactacggaaacccagaataacagctacaatttggtccagtggcaagatcatctgcactggggcaacatctgaagaggaagccaaatttggagcgcgtagactagccagaagcctgcagaagctctag

SEQ ID NO: 150359 - DNA, 492 bp, Artificial Sequence
  derived and/or modified sequence
atggacgccgacagcgacgtggccctggacatcctgatcaccaacgtcgtgtgtgtgttccgcacaaggtgccatcttaatctgcgcaagattgcactggaaggcgctaacgtgatttacaaacgggatgtgggcaaagtgctgatgaaactgcggaagccccgaattactgcaactatctggagctcaggtaaaattatctgcactggagccacttccgaggaagaagctaaatttggcgcgagacgcctggcacggtcattgcaaaagctaggtttccaagtcatttttacagatttcaaggttgtcaacgtgttagctgtatgcaatatgccattcgagattcgtctgccagagttcaccaagaacaaccgtccccacgcctcctatgagccggaactgcatccagcagtctgctaccggattaagtcactgagagccaccctgcaaatatttagtaccggctccataaccgttacagggattctgtag

SEQ ID NO: 150360 - DNA, 1295 bp, Artificial Sequence
  derived and/or modified sequence
atttattgtcgcggggaagctgcggccgcctcgcacccggaacaacaaagcaaggaagacggagtccgagcctcgggggctcctagcaacgggccggggcgggagttccatggagactggggagcgcgcccgtctcatcctcatccttgtcctccagcttctccttcgcatccgacgcaaccggcagcagcgctgccgccgcgtcctcagccaccgctccctcttcccacggatgtgatcttcgtggtggaaagctaaattttaaaaccaccccaatggatgcagacagtgatgttgcattggacattctaattacaaatgtagtctgtgtttttagaacaagatgtcatttaaacttaaggaagattgctttggaaggagcaaatgtaatttataaacgtgatgttggaaaagtattaatgaagcttagaaaacctagaattacagctacaatttggtcctcaggaaaaattatttgcactggagcaacaagtgaagaagaagctaaatttggtgccagacgcttagcccgtagtctgcagaaactaggttttcaggtaatatttacagattttaaggttgttaacgttctggcagtgtgtaacatgccatttgaaatccgtttgccagaattcacaaagaacaatagacctcatgccagttacgaacctgaacttcatcctgctgtgtgctatcggataaaatctctaagagctacattacagattttttcaacaggaagtatcacagtaacagggcccaatgtaaaggctgttgctactgctgtggaacagatttacccatttgtgtttgaaagcaggaaagaaattttataattcaccacttaattggttagaatctctaactgagcaccttttaaacctgctgcacattggactcaaaaggaaaactggaccaacaataattgaggaaatagactcttttattcattcacggctacagtgtaagctccagtccctttggattttattccaaaccttgctgtaatataaaaggaagtttacaagacatgatattgctgcttttacaaaaggacattctatttattttcgcagtaattctcatgtccccataagcagagctgtcacagtgtgcactaccttagattgttttattgtcgtcattgttatttttttccattttgagctaatgtgttttatttgtgaatagtcttttacatttttgtatgctgaatatgggcaccaaagaacctgtaaaagttatctttttcaattgaatgtgcacaaataaaagtttggaaaagatctctcttc

SEQ ID NO: 150361 - DNA, 387 bp, Artificial Sequence
  derived and/or modified sequence
atggacgccgacagcgacgtggccctggacatcctgatcaccaacgttgtgtgtgtattcaggacacggtgccacctcaacctgcggaagattgctctggaaggggctaacgttatctacaaaagggacgtcggcaaagttttgatgaaattgcggaaacctaggatcaccgctacaatttggtctagtggcaagattatctgcaccggcgcgacaagtgaagaggaggcgaagttcggcgcacgccgtctagcccgcagcctgcagaaactaggattccaagtgatcttcaccgattttaaagtggtgaacgtgttggctgtgtgtaatatgcctttcgaaattagattgcctgagttcaccaagaacaatcggcctcatgcttag

SEQ ID NO: 150362 - DNA, 138 bp, Artificial Sequence
  derived and/or modified sequence
atggacgccgacagcgacgtggccctggacatcctgatcaccaacgtagtctgtgtgtttagaacccggtgccaccttaacttaaggaagattgctctcgagggagccaatgtgatctacaagcgggacgttggatag

SEQ ID NO: 150363 - DNA, 561 bp, Artificial Sequence
  derived and/or modified sequence
atggacgcagattccgatgtcgccttagatatacttataactaacgtcgtttgtgtatttcgcactagatgccacctgaatctgaggaaaattgctctggagggcgcaaacgttatttataaacgtgatgtgggcaaagtgcttatgaaattgagaaagcctcgaattactgccactatatggtcttcaggcaagataatttgtaccggcgcaacctcagaggaggaggccaagttcggcgcaaggagactcgccagaagcctgcagaaacttggcttccaggttatctttacagatttcaaagtggtcaatgttcttgcggtgtgtaacatgcccttcgaaatacgtctgccagaattcaccaagaacaacaggcctcacgcgtcttacgagcccgagctgcaccctgccgtctgctataggataaagtctctccgggctacactgcaaatcttttccactgggtccataaccgtcactggcccaaatgttaaagctgtagccacggccgtcgagcagatctacccctttgtattcgagagtaggaaggagattctttag

SEQ ID NO: 150364 - DNA, 991 bp, Artificial Sequence
  derived and/or modified sequence
ggccgttacgcgattttcgctcccgcgggcagcgcctctcaggccactcccgagggaccccgaggacgcactcgggccccagggcgacggttcaaacgggccattgtgcgcccccggggtcccccggcccctgcagggctacttgggcgcagagccgcggagggtctccgttcctagaggtcctcctatcccgggctgcctgagtcctcgccagcatccgccctctcccactcccatccttcctggatccgcctctcggttcccgagggacagtcccgaccgcaaacccacgtagagtaaggaatgtgggacaggcgacagaagtggcatacggtcctgcgttatccctccgtctcgccacaccttgtgtctccatctctccccacttccttccctccgtctgtcatctgtcatccccggtcgctctaagaccaggattccaattcgcctagtgaggaatctcactaggggaatttatcgcgacatcataaattaacgggttcattttgactgaaaaagcgaaggacttttttcaggcagaaaacaagtctcgtctggacggatgtgatcttcgtggtggaaagctaaattttaaaaccaccccaatggatgcagacagtgatgttgcattggacattctaattacaaatgtagtctgtgtttttagaacaagatgtcatttaaacttaaggaagattgctttggaaggagcaaatgtaatttataaacgtgatgttggaaaagtattaatgaagcttagaaaacctagaattacagctacaatttggtcctcaggaaaaattatttgcactggagcaacaagtgaagaagaagctaaatttggtgccagacgcttagcccgtagtctgcagaaactaggttttcaggtaatatttacagattttaaggttgttaacgttctggcagtgtgtaacatgccatttgaaatccgtttgccagaattcacaaagaacaatagacctcatgccag

SEQ ID NO: 150365 - DNA, 276 bp, Artificial Sequence
  derived and/or modified sequence
atggatgccgacagtgatgtggcgttagatatactgattaccaatgtcgtttgtgtgttccgcactcgatgccacctcaaccttaggaagatcgccttggaaggcgctaacgtaatttacaagcgggatgttgggaaagtgctgatgaagttgcgcaaaccaagaatcaccgccactatatggtcttcaggcaagataatttgtaccggtgccacctctgaggaagaggctaaattcggagctaggaggctggcgaggtccctccaaaagctttag

SEQ ID NO: 150366 - DNA, 492 bp, Artificial Sequence
  derived and/or modified sequence
atggatgcagatagtgatgtagctctggacatcctgataacaaatgtggtgtgcgtatttaggacacggtgccatctgaatctgcgtaaaatagcgctcgagggcgcaaatgtgatttataaaagagacgtgggtaaggttctcatgaagcttcgcaaacctaggattacggcaactatttggagcagcggaaagattatttgtacaggggctaccagcgaggaggaggcaaaattcggggcacgcagattggctcggtctctgcagaaactcggattccaggtaatttttaccgattttaaagtggttaacgtactcgccgtgtgtaacatgccttttgaaatcaggctacctgagtttacgaaaaataataggccacacgcctcctacgagcccgaattgcatcccgcagtgtgctaccggatcaaaagcctgagagccacactgcagatcttttccaccggctctatcactgttacaggaattctctag

SEQ ID NO: 150367 - DNA, 387 bp, Artificial Sequence
  derived and/or modified sequence
atggacgctgacagtgacgttgccttagacatcctgattaccaacgtggtctgcgtgttccgaacaagatgtcacctaaatttgcgaaagatcgcgctcgaaggggcaaacgtgatctataagagggatgtcggtaaagtactgatgaagctgaggaaacccaggataacggccactatctggtcgtctggcaaaatcatctgtactggagctacgtctgaggaagaggctaaatttggagccagacgcctggccaggagcctacaaaagcttggctttcaggtgatctttactgacttcaaagtggtcaacgttctcgcagtgtgcaatatgccatttgagatccgacttccagagttcactaaaaataataggccgcacgcgtag

SEQ ID NO: 150368 - DNA, 138 bp, Artificial Sequence
  derived and/or modified sequence
atggatgccgactccgacgtggccctggacatcctgatcacgaacgtggtctgcgtcttcaggactcggtgtcatctaaacttgagaaagattgcactggagggcgcaaatgttatctacaaacgggatgtgggctag

SEQ ID NO: 150369 - DNA, 865 bp, Artificial Sequence
  derived and/or modified sequence
gggtcccccggcccctgcagggctacttgggcgcagagccgcggagggtctccgttcctagaggtcctcctatcccgggctgcctgagtcctcgccagcatccgccctctcccactcccatccttcctggatccgcctctcggttcccgagggacagtcccgaccgcaaacccacgtagagtaaggaatgtgggacaggcgacagaagtggcatacggtcctgcgttatccctccgtctcgccacaccttgtgtctccatctctccccacttccttccctccgtctgtcatctgtcatccccggtcgctctaagaccaggattccaattcgcctagtgaggaatctcactaggggaatttatcgcgacatcataaattaacgggttcattttgactgaaaaagcgaaggacttttttcaggcagaaaacaagtctcgtctggacgcgtctagtctatttattgtcgcggggaagctgcggccgcctcgcacccggaacaacaaagcaaggaagacggagtccgagcctcgggggctcctagcaacgggccggggcgggagttccatggagactggggagcgcgcccgtctcatcctcatccttgtcctccagcttctccttcgcatccgacgcaaccggcagcagcgctgccgccgcgtcctcagccaccgctccctcttcccacggatgtgatcttcgtggtggaaagctaaattttaaaaccaccccaatggatgcagacagtgatgttgcattggacattctaattacaaatgtagtctgtgtttttagaacaagatgtcatttaaacttaaggaagattgctttggaaggagcaaatgtaatttataaacgtgatgttgga

SEQ ID NO: 150370 - DNA, 561 bp, Artificial Sequence
  derived and/or modified sequence
atggacgccgacagcgacgtggccctggacatcctgatcaccaacgtggtgtgcgtgttcagaaccagatgccacctgaacctgagaaagatcgccctggagggcgccaacgtgatctacaagagagacgtgggcaaggtgctgatgaagctgagaaagcccagaatcaccgccaccatctggagcagcggcaagatcatctgcaccggcgccaccagcgaggaggaggccaagttcggcgccagaagactggccagaagcctgcagaagctgggcttccaggtgatcttcaccgacttcaaggtggtgaacgtgctggccgtgtgcaacatgcccttcgagatcagactgcccgagttcaccaagaacaacagaccccacgccagctacgagcccgagctgcaccccgccgtgtgctacagaatcaagagcctgagagccaccctgcagatcttcagcaccggcagcatcaccgtgaccggccccaacgtgaaggccgtggccaccgccgtggagcagatctaccccttcgtgttcgagagcagaaaggagatcctgtag

SEQ ID NO: 150371 - protein, 263 aa, Artificial Sequence
  derived and/or modified sequence
MVKIAFNTPTAVQKEEARQDVEALLSRTVRTQILTGKELRVATQEKEGSSGRCMLTLLGLSFILAGLIVGGACIYKYFMPKSTIYRGEMCFFDSEDPANSLRGGEPNFLPVTEEADIREDDNIAIIDVPVPSFSDSDPAAIIHDFEKGMTAYLDLLLGNCYLMPLNTSIVMPPKNLVELFGKLASGRYLPQTYVVREDLVAVEEIRDVSNLGIFIYQLCNNRKSFRLRRRDLLLGFNKRAIDKCWKIRHFPNEFIVETKICQE

SEQ ID NO: 150372 - DNA, 792 bp, Artificial Sequence
  derived and/or modified sequence
atggtaaagatagccttcaacacacccacagccgtccagaaggaggaagcacgacaggacgtggaggctctgctgtcgaggactgtgcgcactcagatcttaacgggtaaggagctcagagttgccacacaggaaaaggaaggcagtagtggccgctgcatgctgacgctcctaggcttgagttttatcctggctggtctcatcgtcggcggggcttgcatctacaaatatttcatgccaaaaagcaccatctaccggggggagatgtgtttcttcgactcagaggatccagcaaacagtctgcggggcggtgaaccaaatttcctgcccgtcaccgaagaggcagatattagagaggacgacaatattgcaattatcgatgtccccgtcccgagttttagcgattcagatcccgcagcaataatacacgacttcgagaagggcatgactgcgtacctggacctcctcctgggcaactgctatcttatgcctcttaacacctcaattgtgatgccccctaaaaaccttgttgagctgttcgggaagctggccagtggtagatatctgccacagacatatgttgtgcgggaagacctcgtggccgtggaggaaatccgtgatgtcagcaatctcgggatcttcatttaccagctctgtaataataggaagtcttttcgactgcggcggagagacctgctgctcgggtttaacaaaagggcaattgataagtgttggaagatacgacattttcctaatgaattcatcgtcgaaaccaagatttgtcaggagtag

SEQ ID NO: 150373 - DNA, 1641 bp, Artificial Sequence
  derived and/or modified sequence
ataagtatcccagacctcggcttgcagtagtgttagactgaagataaagtaagtgctgtttgggctaacaggatctcctcttgcagtctgcagcccaggacgctgattccagcagcgccttaccgcgcagcccgaagattcactatggtgaaaatcgccttcaatacccctaccgccgtgcaaaaggaggaggcgcggcaagacgtggaggccctcctgagccgcacggtcagaactcagatactgaccggcaaggagctccgagttgccacccaggaaaaagagggctcctctgggagatgtatgcttactctcttaggcctttcattcatcttggcaggacttattgttggtggagcctgcatttacaagtacttcatgcccaagagcaccatttaccgtggagagatgtgcttttttgattctgaggatcctgcaaattcccttcgtggaggagagcctaacttcctgcctgtgactgaggaggctgacattcgtgaggatgacaacattgcaatcattgatgtgcctgtccccagtttctctgatagtgaccctgcagcaattattcatgactttgaaaagggaatgactgcttacctggacttgttgctggggaactgctatctgatgcccctcaatacttctattgttatgcctccaaaaaatctggtagagctctttggcaaactggcgagtggcagatatctgcctcaaacttatgtggttcgagaagacctagttgctgtggaggaaattcgtgatgttagtaaccttggcatctttatttaccaactttgcaataacagaaagtccttccgccttcgtcgcagagacctcttgctgggtttcaacaaacgtgccattgataaatgctggaagattagacacttccccaacgaatttattgttgagaccaagatctgtcaagagtaagaggcaacagatagagtgtccttggtaataagaagtcagagatttacaatatgactttaacattaaggtttatgggatactcaagatatttactcatgcatttactctattgcttatgctttaaaaaaaggaaaaaaaaaaactactaaccactgcaagctcttgtcaaattttagtttaattggcattgcttgttttttgaaactgaaattacatgagtttcattttttctttgaatttatagggtttagatttctgaaagcagcatgaatatatcacctaacatcctgacaataaattccatccgttgttttttttgtttgtttgttttttcttttcctttaagtaagctctttattcatcttatggtggagcaattttaaaatttgaaatattttaaattgtttttgaactttttgtgtaaaatatatcagatctcaacattgttggtttcttttgtttttcattttgtacaactttcttgaatttagaaattacatctttgcagttctgttaggtgctctgtaattaacctgacttatatgtgaacaattttcatgagacagtcatttttaactaatgcagtgattctttctcactactatctgtattgtggaatgcacaaaattgtgtaggtgctgaatgctgtaaggagtttaggttgtatgaattctacaaccctataataaattttactctatacaa

SEQ ID NO: 150374 - DNA, 792 bp, Artificial Sequence
  derived and/or modified sequence
atggtgaagatcgccttcaacacccccacagctgtgcagaaggaggaggcccggcaggatgtggaggccctgctgagcaggacagtgaggacccagatcctgaccgggaaggagctgcgggtggccacccaggagaaggagggcagcagcggccgctgcatgctgaccctgctgggcctgtccttcatcctggccggcctcatcgtgggcggggcctgcatctacaagtacttcatgcccaagagcaccatctacagaggagagatgtgcttctttgacagtgaagatcctgccaacagcctgcggggcggggagcccaacttcctgcctgtgacagaggaggccgacatcagagaagatgacaacatcgccatcattgatgtgcctgtgcccagcttcagtgacagcgaccctgctgccatcatccatgactttgagaagggcatgacagcctacctggacctgctgctgggcaactgctacctgatgcccctgaacaccagcatcgtgatgccacccaagaacctggtggagctgtttgggaagctggccagcggccgctacctgccccagacctacgtggtgcgggaggacctggtggccgtggaggagatcagagatgtgagcaacctgggcatcttcatctaccagctgtgcaacaacaggaagagcttccggctgcggcggcgggacctgctgctgggcttcaacaagagggccatcgacaagtgctggaagatccgccacttccccaatgagttcatcgtggagaccaagatctgccaggagtag

SEQ ID NO: 150375 - DNA, 792 bp, Artificial Sequence
  derived and/or modified sequence
atggtgaagatcgccttcaacacccccaccgccgtgcagaaggaggaagccagacaggacgtggaggcacttctctctaggacggttaggacacaaattctaactggaaaggaattacgcgttgcaacacaagagaaggaggggagctcgggaaggtgcatgcttaccttgctgggtctatcgttcattctggcaggcctcattgttgggggcgcttgcatttataagtattttatgcctaagagtaccatataccgtggggaaatgtgctttttcgactcagaagatccagccaactctctccgcggcggagagcccaatttcctgcccgtcaccgaggaggccgacattcgagaggacgacaatatagcaatcattgatgtgccagtgcctagcttctcggactctgaccctgctgcgattattcacgattttgaaaaggggatgactgcatacttggatcttctgctgggcaactgctaccttatgcctttaaacacctctattgtcatgccacccaaaaacctggttgagctattcgggaaattggcttccggaaggtacctaccacaaacgtacgtcgttcgcgaggacttagtggctgtcgaagaaattagggatgtaagcaacctgggcatttttatctatcagctctgcaataacaggaagtctttcaggctaagacggcgtgacctgctgctcgggttcaataagcgcgctattgacaagtgctggaagatacggcactttcctaacgaattcatcgtggaaactaagatctgtcaggagtag

SEQ ID NO: 150376 - DNA, 792 bp, Artificial Sequence
  derived and/or modified sequence
atggtcaagatagcttttaacacccctacagctgtgcagaaggaagaagcgcgtcaggacgtggaggcgctgctctcccggaccgttagaacccagatactgactggcaaagagttgagggtggccacacaggagaaggagggatcttccggcaggtgtatgcttacgcttctcggcctgagctttatcctggctgggctcattgtcggcggagcttgtatttacaagtattttatgccaaagagcaccatttatcgcggagagatgtgcttcttcgatagcgaggacccagccaatagcttaaggggcggtgaacctaatttcctgccagtgaccgaagaagcagacatccgcgaagacgacaacattgccatcattgatgtgcccgtaccttccttttccgactctgatccagccgcaattattcacgactttgaaaagggaatgacagcctacctggatcttctactggggaattgctatctgatgccattaaacacgagcatagtaatgcctcccaaaaatttagtagaactgttcggcaagctggcgtccgggaggtatctgccacagacctatgtagtgagggaagatcttgtcgctgtggaggagattagagatgtgtcaaatttgggcatcttcatctatcagctgtgcaacaatcgtaagtcttttcggctgagaagacgggatctgttattgggcttcaacaaacgcgctattgataaatgttggaagatcaggcacttccccaacgagttcatcgtggagaccaagatatgtcaggagtag

SEQ ID NO: 150377 - DNA, 792 bp, Artificial Sequence
  derived and/or modified sequence
atggtgaagatcgccttcaacacccccaccgccgtgcagaaggaggaggccagacaggacgtggaggccctgctgagcagaaccgtgagaacccagatcctgaccggcaaggagctgagagtggccacccaggagaaggagggcagcagcggcagatgcatgctgaccctgctgggcctgagcttcatcctggccggcctgatcgtgggcggcgcctgcatctacaagtacttcatgcccaagagcaccatctacagaggcgagatgtgcttcttcgacagcgaggaccccgccaacagcctgagaggcggcgagcccaacttcctgcccgtgaccgaggaggccgacatcagagaggacgacaacatcgccatcatcgacgtgcccgtgcccagcttcagcgacagcgaccccgccgccatcatccacgacttcgagaagggcatgaccgcctacctggacctgctgctgggcaactgctacctgatgcccctgaacaccagcatcgtgatgccccccaagaacctggtggagctgttcggcaagctggccagcggcagatacctgccccagacctacgtggtgagagaggacctggtggccgtggaggagatcagagacgtgagcaacctgggcatcttcatctaccagctgtgcaacaacagaaagagcttcagactgagaagaagagacctgctgctgggcttcaacaagagagccatcgacaagtgctggaagatcagacacttccccaacgagttcatcgtggagaccaagatctgccaggagtag

SEQ ID NO: 150378 - protein, 444 aa, Artificial Sequence
  derived and/or modified sequence
MSSTSPNLQKAIDLASKAAQEDKAGNYEEALQLYQHAVQYFLHVVKYEAQGDKAKQSIRAKCTEYLDRAEKLKEYLKNKEKKAQKPVKEGQPSPADEKGNDSDGEGESDDPEKKKLQNQLQGAIVIERPNVKWSDVAGLEGAKEALKEAVILPIKFPHLFTGKRTPWRGILLFGPPGTGKSYLAKAVATEANNSTFFSISSSDLVSKWLGESEKLVKNLFQLARENKPSIIFIDEIDSLCGSRSENESEAARRIKTEFLVQMQGVGVDNDGILVLGATNIPWVLDSAIRRRFEKRIYIPLPEPHARAAMFKLHLGTTQNSLTEADFRELGRKTDGYSGADISIIVRDALMQPVRKVQSATHFKKVRGPSRADPNHLVDDLLTPCSPGDPGAIEMTWMDVPGDKLLEPVVSMSDMLRSLSNTKPTVNEHDLLKLKKFTEDFGQEG

SEQ ID NO: 150379 - DNA, 1335 bp, Artificial Sequence
  derived and/or modified sequence
atgagcagcaccagccccaacctgcagaaggccatcgacctggccagcaaggccgcccaggaggacaaggccggcaactacgaggaggccctgcagctgtaccagcacgccgtgcagtacttcctgcacgtggtgaagtacgaggcccagggcgacaaggccaagcagagcatcagagccaagtgcaccgagtacctggacagagccgagaagctgaaggagtacctgaagaacaaggagaagaaggcccagaagcccgtgaaggagggccagcccagccccgccgacgagaagggcaacgacagcgacggcgagggcgagagcgacgaccccgagaagaagaagctgcagaaccagctgcagggcgccatcgtgatcgagagacccaacgtgaagtggagcgacgtggccggcctggagggcgccaaggaggccctgaaggaggccgtgatcctgcccatcaagttcccccacctgttcaccggcaagagaaccccctggagaggcatcctgctgttcggcccccccggcaccggcaagagctacctggccaaggccgtggccaccgaggccaacaacagcaccttcttcagcatcagcagcagcgacctggtgagcaagtggctgggcgagagcgagaagctggtgaagaacctgttccagctggccagagagaacaagcccagcatcatcttcatcgacgagatcgacagcctgtgcggcagcagaagcgagaacgagagcgaggccgccagaagaatcaagaccgagttcctggtgcagatgcagggcgtgggcgtggacaacgacggcatcctggtgctgggcgccaccaacatcccctgggtgctggacagcgccatcagaagaagattcgagaagagaatctacatccccctgcccgagccccacgccagagccgccatgttcaagctgcacctgggcaccacccagaacagcctgaccgaggccgacttcagagagctgggcagaaagaccgacggctacagcggcgccgacatcagcatcatcgtgagagacgccctgatgcagcccgtgagaaaggtgcagagcgccacccacttcaagaaggtgagaggccccagcagagccgaccccaaccacctggtggacgacctgctgaccccctgcagccccggcgaccccggcgccatcgagatgacctggatggacgtgcccggcgacaagctgctggagcccgtggtgagcatgagcgacatgctgagaagcctgagcaacaccaagcccaccgtgaacgagcacgacctgctgaagctgaagaagttcaccgaggacttcggccaggagggctag

SEQ ID NO: 150380 - DNA, 1335 bp, Artificial Sequence
  derived and/or modified sequence
atgtcatcaactagccctaatctgcagaaggctatcgacctggccagcaaggccgcacaggaagacaaagcaggtaattacgaagaggctttacagttgtaccagcacgccgtgcagtatttccttcacgtcgtgaaatacgaggctcagggtgacaaggccaaacagtcaatccgggcgaaatgcactgagtaccttgacagagctgaaaaactcaaagagtaccttaaaaataaggaaaagaaggcacagaagcctgtgaaggagggccagccgtcccctgccgacgagaaaggcaatgatagcgatggcgagggggagtcggatgaccccgagaagaagaaactgcagaaccagcttcagggtgcaatcgtgatagagagacctaatgtcaagtggtccgatgtggccggactcgagggcgcaaaggaggcccttaaagaggccgtaatcctcccgattaagtttccacatctttttactgggaagcggactccttggcgcgggatacttctgttcggtccccctggtaccgggaagtcatacctggctaaggctgtggctacggaagccaataatagtaccttcttctccatctccagctccgatctcgtaagcaagtggctgggagaatcagaaaaactggtgaagaatctattccagttggcccgcgagaacaagcctagcatcatcttcatcgacgaaattgattctctgtgcggatctcggagcgaaaacgaaagcgaggctgctcggcgaatcaagaccgagtttttggtacaaatgcagggcgtcggagtggataatgatggtattttggtgctgggggcaacgaatatcccctgggtcctggactctgcaattagacgtagattcgaaaagcggatatacatccctcttcctgagcctcacgcacgcgccgccatgttcaagctgcacctgggcacgacacaaaattctttaactgaggcagacttccgcgaactggggcgtaaaacagatggctattcaggcgccgacatctcaataatcgtgcgcgatgccctgatgcagcctgtgcgtaaagtccagtctgcaacacattttaaaaaggtgcgtggcccatcgagggcagatcccaatcacctggtggacgatctgctaaccccctgctcaccaggcgaccctggtgcaattgagatgacttggatggatgtccccggagacaagttgcttgaaccggtggtgagcatgagcgacatgctgcggtccctcagcaacactaaacccaccgtcaatgaacatgacttgctgaagcttaagaagttcacagaggatttcggccaggaaggatag

SEQ ID NO: 150381 - DNA, 1335 bp, Artificial Sequence
  derived and/or modified sequence
atgagcagcaccagccccaacctgcagaaggccatcgacctggccagcaaggccgcccaggaggacaaggccggcaactatgaggaggccctgcagctgtaccagcacgctgtgcagtacttcctgcacgtggtgaagtatgaggcccagggcgacaaggccaagcagagcatccgggccaagtgcacagagtacctggacagagctgagaagctgaaggagtacctgaagaacaaggagaagaaggcccagaagcctgtgaaggagggccagcccagccctgcagatgagaagggaaatgacagtgatggagagggggagagtgatgatcctgagaagaagaagctgcagaaccagctgcagggcgccatcgtcatcgagcggcccaacgtgaagtggagcgatgtggccggcctggagggcgccaaggaggccctgaaggaggccgtcatcctgcccatcaagttcccccacctgttcaccgggaagaggaccccctggaggggcatcctgctgtttggacctcctggcaccgggaagagctacctggccaaggctgtggccacagaggccaacaacagcaccttcttcagcatcagcagcagtgacctggtgtccaagtggctgggggagagcgagaagctggtgaagaacctcttccagctggcccgggagaacaagcccagcatcatcttcattgatgaaattgacagcctgtgtggcagccgctcagaaaatgaaagtgaggccgcccggcgcatcaagacagagttcctggtgcagatgcagggcgtgggcgtggacaatgatggcatcctggtgctgggcgccaccaacatcccctgggtgctggacagcgccatcagaagaagatttgagaagaggatctacatccccctgcctgagccccacgcccgggccgccatgttcaagctgcacctgggcaccacccagaacagcctgacagaggccgacttccgggagctgggcaggaagacagatggctacagcggggctgacatcagcatcatcgtgagagatgccctgatgcagcctgtgaggaaggtgcagagcgccacccacttcaagaaggtgcggggccccagcagagctgaccccaaccacctggtggatgacctgctgaccccctgcagccctggggaccccggggccatcgagatgacctggatggatgtgcctggggacaagctgctggagcctgtggtgtccatgtctgacatgctgcggagcctgagcaacaccaagcccaccgtgaatgaacatgacctgctgaagctgaagaagttcacagaggactttggccaggagggctag

SEQ ID NO: 150382 - DNA, 1335 bp, Artificial Sequence
  derived and/or modified sequence
atgagcagcaccagccccaacctgcagaaggccatcgacctggccagtaaggccgcccaagaggacaaagccggcaattacgaagaagcattacaactgtaccagcacgccgttcaatacttcctgcatgtcgtcaagtatgaggcccagggtgacaaggctaagcagagcattcgcgcaaagtgcacagagtaccttgatagggctgagaagcttaaagagtatctgaagaacaaggagaagaaggctcaaaaaccagtcaaggagggacagcctagtccagctgacgaaaaggggaatgattctgatggtgaaggagaaagcgatgatccagagaagaagaaacttcaaaaccaactgcagggcgcaattgttatcgaacgcccaaatgtgaaatggagcgacgtcgctgggctcgagggagccaaggaggccctgaaagaagcagtgatcctccctatcaagttcccccacctgttcaccggtaagagaacaccatggcgggggatcctcttatttgggccgccgggcactggcaaatcctatttggctaaggccgttgccaccgaagcaaacaacagcacattctttagtattagcagttccgatctggtgagcaaatggctaggagagtctgagaaattggttaagaacctgttccagttggctcgagaaaataaaccttctataatatttattgatgaaatcgactctctgtgcggctccaggtcagagaacgagagtgaggccgcaaggaggattaagactgaattccttgtgcagatgcagggagtgggcgttgataacgatggaattctcgtacttggggccactaacattccctgggtattggactctgccatccggaggcggtttgaaaagagaatttacatcccactacccgaaccacacgcacgagcagcaatgtttaaacttcatctgggaacaacccagaatagcttgaccgaagcagacttcagggaattgggccggaaaacagacggttattcaggggcagacatctccattatcgtcagggacgcgctgatgcagcctgtccgtaaggtacagtccgctactcattttaaaaaggtgagaggccccagccgtgcagaccctaatcatctggtggatgaccttctgactccttgctccccaggggacccaggtgctattgagatgacatggatggacgtgccaggagataagctgctagaaccagtggtgtcgatgagtgatatgctgaggtcactgtctaatacaaaacctaccgttaacgaacacgacctccttaagttgaaaaagttcaccgaggattttggccaggaaggatag

SEQ ID NO: 150383 - DNA, 1335 bp, Artificial Sequence
  derived and/or modified sequence
atgtcttccacctctcccaatcttcagaaagctatcgatcttgcgtccaaagccgcacaggaagataaagctggaaattacgaagaggccctgcagctgtatcaacacgccgtgcagtacttcctacacgtggtcaaatatgaggcccagggtgataaggccaaacaaagtatccgagctaagtgcaccgagtatctggaccgggctgaaaagctgaaagagtatctgaaaaataaggagaaaaaagcacaaaaacccgtgaaggaaggccagcctagtcctgctgatgagaaggggaacgactcggacggagagggcgagtcagacgatccagagaaaaagaagctgcagaaccagctgcaaggggcaattgtgatcgagaggcccaacgtaaagtggagtgatgtggccggattggagggagcgaaagaggcgctcaaagaggccgtgatcctgcccatcaaatttccacaccttttcaccggtaaacggacaccttggcgcggaatcctgctcttcgggccaccaggaacagggaagtcctatctggctaaggccgtggctacagaggccaataattccacattcttctctatatcctcctccgacctggttagcaaatggcttggggaatccgaaaaattggtcaagaacctctttcagcttgccagagagaacaagccttcgattatcttcattgacgaaatcgactccttgtgcggctcgcgatcagagaacgagagtgaagctgccagaaggattaaaaccgaattcctcgtgcagatgcagggtgtaggcgtcgacaacgatggcattcttgtgctgggggctactaacatcccttgggtgctggacagtgcaatcaggcggagattcgagaaacgcatctatatcccactgcccgagcctcacgcccgtgccgctatgtttaaattacatctcggaacgacccaaaattcattaactgaggcggattttagagagcttgggcgaaaaacagatggctacagcggggcagacatctccataatcgtgcgcgacgcattaatgcagcctgttcggaaagtgcaatcagccacccacttcaagaaggtgcgcggtccctcccgcgctgatccaaaccaccttgttgatgatctgttgactccttgttcccccggagatcccggagccatagagatgacatggatggatgtcccaggggacaagttgctggagcccgtcgtgagcatgtcggacatgctgagaagcttgtccaatacaaaaccaacggtcaacgagcatgatctgcttaaactcaagaaattcacggaggactttggccaggagggctag

SEQ ID NO: 150384 - DNA, 3321 bp, Artificial Sequence
  derived and/or modified sequence
gcggaagtttggtggggagggtcggagctctggtggagagagtgttgtctaaaacaagttccggaagggaggctgcccttcgcggtccgagaaccaccggcctccccagtttgagggctgttaccccgtgcgcgcttcgacgttgctgctgttggctctcctcgcccctcgttcccttgggaaccgcctgggaactccgccatgtcatccacttcgcccaacctccagaaagcgatagatctggctagcaaagcagcgcaagaagacaaggctgggaactacgaagaagcccttcagctctatcagcatgctgtgcagtattttcttcatgtcgttaaatatgaagcacagggtgataaagccaagcaaagtatcagggcaaagtgtacagaatatcttgatagagcagaaaaactaaaggagtacctgaaaaataaagagaaaaaagcacagaagccagtgaaagaaggacagccgagtccagcagatgagaaggggaatgacagtgatggggaaggagaatctgatgatcctgaaaaaaagaaactacagaatcaacttcaaggtgccattgttatagaacgaccaaatgtgaaatggagtgacgttgctggacttgaaggagccaaagaagcactgaaagaggctgtgatactgcctattaaatttcctcatctttttacaggcaagagaacaccttggaggggaatcctattatttgggccgcctggaacaggaaagtcctacttagccaaagctgtagcaacagaagccaacaactcaacatttttttcaatatcttcctctgatcttgtttctaagtggctaggtgaaagtgaaaaactggttaagaatttattccaacttgccagagagaacaagccctccattatcttcattgatgaaattgattctctctgtggttcaagaagtgaaaatgaaagtgaagccgcacgtagaattaagacggagttcctagtgcaaatgcaaggggttggtgtagacaatgatggaattttggttctgggagctacaaatataccctgggttctggattctgccattaggcgaagatttgagaaacgaatttatattcccttgccggaaccccatgcccgagcagcaatgtttaaactgcacctagggaccactcagaacagtctcacggaagcagactttcgggaacttgggaggaaaacagatggttattcaggggcagatataagtatcattgtacgtgatgcccttatgcagcctgttaggaaagtacagtcagctactcattttaaaaaggttcgcggaccttcccgagctgatcctaaccatcttgtagatgatctgctaacaccttgctctccaggtgaccctggtgccattgaaatgacatggatggatgtccctggagataaacttttggagccagttgtttccatgtcggatatgttgcggtcactatctaacacaaaacctacagtcaatgaacatgacttgttgaaattaaagaagtttacagaagattttggtcaagaaggctaagccaaagacaaggaagatgcttaccatatgtattctttctttcatagatatttttgtctatttggatcgcattaattgtttccagtaaaactcttttaccacagggaaatacacatctcacttcagagttccattaggttttatattgtacttttcctccattacttattaaatactcctattaacaaaaggtacaaaataacaggttatgaggaaatgagcgatatatgaacggcataaaaacagaaattacccagtaaaaaggatgtcagaaattgacatacaaatatttacaatttttatgaatggtggtctttgcaaagagcatttatattttcttttttttttactaaaatgatatagggtttattttatattttcaaaaaaattgttaaacatcattcttatcaatgtaaaatttacgttattaaaaaattacaaatgatagaatctttactcagggatgggcaataaaacagcaaagagctttgtgattgggtttgaaagattttgaattatagacagtgctcttaatagtttttaataagttgatatttttttctgtgtagatttaaataatttctttaaaagcgtaagctttggctgggcatggtggcttatgcctgtaatcccagcactttgggaggctacgatgggtggatcacctgaggtcaggagttcaagaccagtctggccaacatggtgaaatgccgtctctactaaaaatacaaaaattagctgggcatgatggcgagtgtctgtaatcccagctactcaggaggctgaggcgggagaatcacttgaacctgggaggcagaggttgcagtgagctgagatcgcgctactgcattccagcctgggcgccgagatagcgccattgcactccagcctgggcgactgaataaaactctgtctcaaaaaaaaacaaaaacggtaagcttttatatttaattaactgatacctttcactgtgcaatctcaagaggaagattttctaaattagacattgtctttaccttaaagaagaaaattgtctatttcagtgtcttttttagcaagattgaccaaaacaggtggtaggtgtgtaatttttaactgtcatgaaatactgtaatgcgcacctttgctaataaggaaatggtctccctttgaattatgggaagtttcttgtctgtgatatggggtgtctgtgtacatatatgtatatttccttttttaatacaggataataatatggggtcttgtccttcaccttttaagttcagggaacagtttgtcctgaccacacatatgttatcagtgtaatgctttatgaagctttagaaatgagctcatgactcattaaaaaataataaacgatgctattttaatattttcaaataaataatctgaggatgtgtttcatactttagcatcaacgctgagttgtgccttgtagaattgcattgtctatacatgcaaaagactattaagttaggatgaactagattccctaattacagtgaaattctatcttgcaaatgctatagaataacttgcattttaaagtgtatttgcacattttacatatgctatgtggttgcctttgggttttctgtacagattgtttttgttattaaatggaaaaggcctgaattatgctcttatgtgaagtaaattgatataacctattgactgtattctgtgtattattctttattttgggaccttctgtgtaaaagaaaatattacctaaattggttagatacaaagaaatcattaaaattattaatgtatatatgaaaa

SEQ ID NO: 150385 - protein, 247 aa, Artificial Sequence
  derived and/or modified sequence
MAAEADGPLKRLLVPILLPEKCYDQLFVQWDLLHVPCLKILLSKGLGLGIVAGSLLVKLPQVFKILGAKSAEGLSLQSVMLELVALTGTMVYSITNNFPFSSWGEALFLMLQTITICFLVMHYRGQTVKGVAFLACYGLVLLVLLSPLTPLTVVTLLQASNVPAVVVGRLLQAATNYHNGHTGQLSAITVFLLFGGSLARIFTSIQETGDPLMAGTFVVSSLCNGLIAAQLLFYWNAKPPHKQKKAQ

SEQ ID NO: 150386 - protein, 126 aa, Artificial Sequence
  derived and/or modified sequence
MAAEADGPLKRLLVPILLPEKCYDQLFVQWDLLHVPCLKILLSKGLGLGIVAGSLLVKLPQVFKILGAKSAAGLKKEDEARPVRSASMRVRGGLGAWGHQQGEGCMEWESQGAGSGYRWAAVPPGA

SEQ ID NO: 150387 - protein, 211 aa, Artificial Sequence
  derived and/or modified sequence
MAAEADGPLKRLLVPILLPEKCYDQLFVQWDLLHVPCLKILLSKGLGLGIVAGSLLVKLPQVFKILGAKSAEGLSLQSVMLELVALTGTMVYSITNNFPFSSWGEALFLMLQTITICFLVMHYRGQTVKGVAFLACYGLVLLVLLSPLTPLTVVTLLQASNVPAVVVGRLLQAATNTTTGTQASSQPSQSSCCLGAPWPESSLPFRKPEIP

SEQ ID NO: 150388 - DNA, 744 bp, Artificial Sequence
  derived and/or modified sequence
atggctgcagaggccgatgggccgctgaaacgactgttagtgcccattctcctgcctgagaaatgctatgaccagctgttcgtgcagtgggatcttctgcatgtgccatgtctgaagatcctgctaagcaaagggctggggctcggtatcgtcgctgggtcccttctggttaaattaccgcaggtgttcaagatcttaggcgcaaaatcggcggaaggactgtccttgcagtccgtgatgcttgagttggtggccctgaccgggaccatggtctacagcattacaaacaacttccccttctcaagctggggcgaggctctcttcctgatgctgcagaccattacgatctgttttctcgtgatgcactacaggggccaaaccgtaaagggcgttgcatttctggcatgctatggactcgtgctgttggtactgctgtcaccgcttacaccactcaccgtcgtgaccttgctgcaggccagcaatgtgcccgccgttgtcgttggaagactgctgcaggctgccaccaactaccataacgggcacaccggccaactatccgcgatcaccgttttcttgctgttcggtgggtccctagcccgaatctttacttcaattcaggagaccggcgatccactcatggcaggcacgttcgtcgtgagttcactatgcaacggtcttatcgccgcccaactgttgttttactggaacgccaagcccccccataagcagaagaaagcacagtag

SEQ ID NO: 150389 - DNA, 636 bp, Artificial Sequence
  derived and/or modified sequence
atggccgccgaggcagatggccctctgaaacgcctgcttgtgcctattctcctcccggaaaagtgctatgatcaactcttcgttcagtgggacttgctgcatgttccttgtttgaaaattttattgtccaagggactaggcttgggcatcgtggctggtagtttgttagttaaattgccacaagtgttcaagattctgggcgcgaagagtgcggaaggcctgagtttgcagtctgttatgctggaactcgtggcattgaccggaacgatggtctactcaattacaaataactttcctttttcctcatggggtgaggccctgttcctgatgctgcagactattaccatttgcttcctagtgatgcactatcgtgggcaaacagtgaagggagtcgccttcttagcgtgctacggactggtgctccttgtgctcctgagtccactcacccctctgaccgtggttaccttgcttcaggcatcaaacgtgcctgcggtcgtcgtggggcgactgctgcaggcagcaaccaataccacaaccggtacccaggccagcagccagccatcacagagcagctgctgcttgggcgcaccatggccggaaagtagtctgccgttccgaaagccagaaattccctag

SEQ ID NO: 150390 - DNA, 744 bp, Artificial Sequence
  derived and/or modified sequence
atggctgctgaggctgatggccccctgaagaggctgctggtgcccatcctgctgcctgagaagtgctatgaccagctgtttgtgcagtgggacctgctgcacgtgccctgcctgaagatcctgctgagcaagggcctgggcctgggcatcgtggccggcagcctgctggtgaagctgccccaggtgttcaagatcctgggcgccaagtctgctgagggcctgagcctgcagagcgtgatgctggagctggtggccctgaccggcaccatggtgtacagcatcaccaacaacttccccttcagctcctggggcgaggccctcttcctgatgctgcagaccatcaccatctgcttcctggtgatgcactaccggggccagacagtgaagggcgtggccttcctggcctgctacggcctggtgctgctggtgctgctgagccccctgacccccctgactgtggtgaccctgctgcaggccagcaatgtgcctgctgtggtggtgggccgcctgctgcaggccgccaccaactaccacaacggccacacaggccagctgagcgccatcaccgtcttcctgctgtttggaggcagcctggcccgcatcttcaccagcatccaggagaccggggaccccctgatggccggcacctttgtggtgagcagcctgtgcaatggcctgattgctgcccagctgctcttctactggaatgccaagccaccccacaagcagaagaaggcccagtag

SEQ ID NO: 150391 - DNA, 636 bp, Artificial Sequence
  derived and/or modified sequence
atggctgctgaggctgatggccccctgaagaggctgctggtgcccatcctgctgcctgagaagtgctatgaccagctgtttgtgcagtgggacctgctgcacgtgccctgcctgaagatcctgctgagcaagggcctgggcctgggcatcgtggccggcagcctgctggtgaagctgccccaggtgttcaagatcctgggcgccaagtctgctgagggcctgagcctgcagagcgtgatgctggagctggtggccctgaccggcaccatggtgtacagcatcaccaacaacttccccttcagctcctggggcgaggccctcttcctgatgctgcagaccatcaccatctgcttcctggtgatgcactaccggggccagacagtgaagggcgtggccttcctggcctgctacggcctggtgctgctggtgctgctgagccccctgacccccctgactgtggtgaccctgctgcaggccagcaatgtgcctgctgtggtggtgggccgcctgctgcaggccgccaccaacaccaccaccggcacccaggccagcagccagcccagccagagcagctgctgcctgggcgccccctggccagagagcagcctgcccttcaggaagccagagatcccctag

SEQ ID NO: 150392 - DNA, 1007 bp, Artificial Sequence
  derived and/or modified sequence
gcgcaacgaaagtcaatggcggtctggagagactggcggaagctagctttgcaatatggcggccgaggcggacggaccgcttaaacggctgctcgtgccgattcttttacctgagaaatgctacgaccaacttttcgttcagtgggacttgcttcacgtcccctgcctcaagattctcctcagcaaaggcctggggctgggcattgtggctggctcacttctagtaaagctgccccaggtgtttaaaatcctgggagccaagagtgctgaagggttgagtctccagtctgtaatgctggagctagtggcattgactgggaccatggtctacagcatcactaacaacttcccattcagctcttggggtgaagccttattcctgatgctccagacgatcaccatctgcttcctggtcatgcactacagaggacagactgtgaaaggtgtcgctttcctcgcttgctacggcctggtcctgctggtgcttctctcacctctgacgcccttgactgtagtcaccctgctccaggcctccaatgtgcctgctgtggtggtggggaggcttctccaggcagccaccaacaccacaacgggcacacaggccagctctcagccatcacagtcttcctgctgtttgggggctccctggcccgaatcttcacttccattcaggaaaccggagatcccctgatggctgggacctttgtggtctcctctctctgcaacggcctcatcgccgcccagctgctcttctactggaatgcaaagcctccccacaagcagaaaaaggcgcagtagagccagctactggagtcattccgtttccactcattcacccaacctcagggttctccccatctgagccagcctgctggtgtgacttactcatcctccattcctctgcacttgcagactttctgagccagggttttcttttagtggaaacaaatggttgatggatccagatccttagaaaaggagaggatgggggtagagtctcccaagcc

SEQ ID NO: 150393 - DNA, 744 bp, Artificial Sequence
  derived and/or modified sequence
atggccgccgaggccgacggccccctgaagcggctgctggtgcccatcctcctgcccgagaaatgttatgaccaactgttcgtgcaatgggatctgcttcacgtcccttgcctgaaaattttgctaagcaaaggactgggtctgggcatagtggcagggtccctgctggtcaaactgccgcaggtgttcaagatcttgggggccaagagcgccgagggcctatcgttgcagagtgtgatgcttgagctggtggcactaacgggcacaatggtgtactcaatcactaataactttccattcagcagctggggggaagccctgttcctgatgctgcaaactattacaatctgcttcctggtgatgcactacagaggtcagactgtgaagggggtggctttcctagcctgctacggcctcgtcttgttggtgctgctgtccccacttacacccctcaccgtcgtgaccctgctccaggcaagcaacgtgcccgcagtcgtggtgggccgattactccaggccgcgactaattaccacaacggacataccggtcaattgtctgctatcacagtgttcttactgtttggcgggtcccttgcacgtatcttcactagtatccaggagaccggagacccccttatggccgggacctttgtagtgtccagtctgtgtaatggtctgattgcagcacaacttcttttttattggaacgccaagccgccacataaacaaaagaaagctcaatag

SEQ ID NO: 150394 - DNA, 636 bp, Artificial Sequence
  derived and/or modified sequence
atggccgccgaggccgacggccccctgaagcggctgctggtgcccattctgctccctgagaagtgctacgaccaattgtttgtccagtgggatctgctccacgtgccctgtcttaagattctgctttccaagggtctgggactgggcatcgtggccggatcactgctagtgaaattaccacaggtgttcaagatcctgggagctaaatctgccgagggtttgagcctccagtccgtcatgctggagttggtcgctctgaccggaacaatggtgtacagcatcaccaataacttccccttcagttcatggggcgaagcgttattccttatgctccagacaattactatctgcttcctggtgatgcattacagaggacagaccgtcaagggggtcgcctttctggcttgctatggcctcgtgcttctggtgctgttaagccctctaacgcccttaacagtcgtgaccctactacaggcctcaaatgtgccggcagtagttgtgggcagactgttgcaagctgccactaacactacgactggaacacaggcctcctcccaaccgagtcagagtagctgctgccttggcgccccctggcctgagtcatccctgccatttcggaagcccgaaattccttag

SEQ ID NO: 150395 - DNA, 744 bp, Artificial Sequence
  derived and/or modified sequence
atggctgcagaggctgacggcccacttaaaaggctgctcgtgcccatactgctgcccgagaaatgctatgaccagttattcgtgcagtgggatttgcttcatgtgccctgccttaaaattctgttgtccaaagggttggggttgggcatcgttgccggatctctgctggtcaagctgccacaggtcttcaagatactcggagccaagagtgctgaaggtcttagcctgcagtccgtgatgttggagttggtggctttgactggtacaatggtgtactcaattacaaacaactttccattttcttcttggggcgaagccctcttcttgatgctacagaccatcaccatttgtttcctggtcatgcattatagaggacagactgtgaagggcgtggcatttcttgcctgttacggacttgtgcttctggtgctactgtcgcctctcactccactcactgtggtgacactccttcaggcatcgaacgtgccagcagtggtcgtgggaaggctgcttcaggcagcaaccaattaccacaatggccacaccggccagctctccgccatcaccgtgttccttctctttgggggaagcctggccagaattttcacatctattcaagagaccggagatcccctcatggctggcacttttgttgtgtcttctctctgtaacgggttgatcgccgcacagctcctgttctattggaacgccaaacctcctcacaaacagaaaaaggcacagtag

SEQ ID NO: 150396 - DNA, 636 bp, Artificial Sequence
  derived and/or modified sequence
atggccgctgaagctgacggacccctcaaacgcttgctggtcccaattttactgccggagaagtgttatgaccaactttttgtgcagtgggacctgttgcacgtgccttgtctaaagattctcctgtctaagggactggggctagggattgtggctggttcccttctcgtcaagttgccccaagtatttaagattctgggggcaaagtcagccgagggactgagtctccaatcagtaatgctggaactggtggcgctgacaggaacaatggtgtatagcatcacaaacaatttccccttctcttcttggggcgaagccctctttttaatgttgcagaccattactatatgttttctggtcatgcactatagagggcagactgtgaagggggtagctttcctggcatgttacgggctggtgcttctggttttattgtctcctctgactccactgaccgtagtgacgcttctgcaggcatctaacgtcccagccgttgtggtggggcgtctcctgcaggccgcaactaacaccactaccggtacgcaagcctcaagccagcctagtcaaagttcttgttgcctgggagcaccctggccggagagctccctgccattcaggaaacccgagatcccctag

SEQ ID NO: 150397 - DNA, 744 bp, Artificial Sequence
  derived and/or modified sequence
atggccgccgaggccgacggccccctgaagagactgctggtgcccatcctgctgcccgagaagtgctacgaccagctgttcgtgcagtgggacctgctgcacgtgccctgcctgaagatcctgctgagcaagggcctgggcctgggcatcgtggccggcagcctgctggtgaagctgccccaggtgttcaagatcctgggcgccaagagcgccgagggcctgagcctgcagagcgtgatgctggagctggtggccctgaccggcaccatggtgtacagcatcaccaacaacttccccttcagcagctggggcgaggccctgttcctgatgctgcagaccatcaccatctgcttcctggtgatgcactacagaggccagaccgtgaagggcgtggccttcctggcctgctacggcctggtgctgctggtgctgctgagccccctgacccccctgaccgtggtgaccctgctgcaggccagcaacgtgcccgccgtggtggtgggcagactgctgcaggccgccaccaactaccacaacggccacaccggccagctgagcgccatcaccgtgttcctgctgttcggcggcagcctggccagaatcttcaccagcatccaggagaccggcgaccccctgatggccggcaccttcgtggtgagcagcctgtgcaacggcctgatcgccgcccagctgctgttctactggaacgccaagcccccccacaagcagaagaaggcccagtag

SEQ ID NO: 150398 - DNA, 636 bp, Artificial Sequence
  derived and/or modified sequence
atggccgccgaggccgacggccccctgaagagactgctggtgcccatcctgctgcccgagaagtgctacgaccagctgttcgtgcagtgggacctgctgcacgtgccctgcctgaagatcctgctgagcaagggcctgggcctgggcatcgtggccggcagcctgctggtgaagctgccccaggtgttcaagatcctgggcgccaagagcgccgagggcctgagcctgcagagcgtgatgctggagctggtggccctgaccggcaccatggtgtacagcatcaccaacaacttccccttcagcagctggggcgaggccctgttcctgatgctgcagaccatcaccatctgcttcctggtgatgcactacagaggccagaccgtgaagggcgtggccttcctggcctgctacggcctggtgctgctggtgctgctgagccccctgacccccctgaccgtggtgaccctgctgcaggccagcaacgtgcccgccgtggtggtgggcagactgctgcaggccgccaccaacaccaccaccggcacccaggccagcagccagcccagccagagcagctgctgcctgggcgccccctggcccgagagcagcctgcccttcagaaagcccgagatcccctag

SEQ ID NO: 150399 - protein, 250 aa, Artificial Sequence
  derived and/or modified sequence
MAAGTSSYWEDLRKQARQLENELDLKLVSFSKLCTSYSHSSTRDGRRDRYSSDTTPLLNGSSQDRMFETMAIEIEQLLARLTGVNDKMAEYTNSAGVPSLNAALMHTLQRHRDILQDYTHEFHKTKANFMAIRERENLMGSVRKDIESYKSGSGVNNRRTELFLKEHDHLRNSDRLIEETISIAMATKENMTSQRGMLKSIHSKMNTLANRFPAVNSLIQRINLRKRRDSLILGGVIGICTILLLLYAFH

SEQ ID NO: 150400 - protein, 175 aa, Artificial Sequence
  derived and/or modified sequence
MAAGTSSYWEDLRKQARQLENELDLKLVSFSKLCTSYSHSSTRDGRRDRYSSDTTPLLNGSSQDRMFETMAIEIEQLLARLTGVNDKMAEYTNSAGVPSLNAALMHTLQRHRDILQVIYWARDVFIITGVWVFFFNPCIGYVHIYLKGQREKSEKINAMLKGLVLLFFGVTIIKF

SEQ ID NO: 150401 - DNA, 753 bp, Artificial Sequence
  derived and/or modified sequence
atggccgccggcaccagcagctactgggaggacctgagaaagcaggccagacagctggagaacgagctggacctgaagctggtgagcttcagcaagctgtgcaccagctacagccacagcagcaccagagacggcagaagagacagatacagcagcgacaccacccccctgctgaacggcagcagccaggacagaatgttcgagaccatggccatcgagatcgagcagctgctggccagactgaccggcgtgaacgacaagatggccgagtacaccaacagcgccggcgtgcccagcctgaacgccgccctgatgcacaccctgcagagacacagagacatcctgcaggactacacccacgagttccacaagaccaaggccaacttcatggccatcagagagagagagaacctgatgggcagcgtgagaaaggacatcgagagctacaagagcggcagcggcgtgaacaacagaagaaccgagctgttcctgaaggagcacgaccacctgagaaacagcgacagactgatcgaggagaccatcagcatcgccatggccaccaaggagaacatgaccagccagagaggcatgctgaagagcatccacagcaagatgaacaccctggccaacagattccccgccgtgaacagcctgatccagagaatcaacctgagaaagagaagagacagcctgatcctgggcggcgtgatcggcatctgcaccatcctgctgctgctgtacgccttccactag

SEQ ID NO: 150402 - DNA, 753 bp, Artificial Sequence
  derived and/or modified sequence
atggcggccggcacaagttcatactgggaagatttaaggaaacaagctcgccagctggaaaacgaactggatcttaagctcgtatcatttagtaaattgtgcacttcctattcacactctagtactagggacgggcgaagagaccgttatagctctgatactaccccgcttctcaacggttcttctcaggatcggatgtttgagacaatggctatcgagattgaacaactgctggcgcgcttaactggggtaaacgataagatggccgaatacacgaacagtgctggcgtgccctcgttgaacgccgcgctgatgcacactctgcagcggcatagagacatcctacaggattatacgcacgagtttcataagaccaaagcgaactttatggctattagagagagagagaatttaatggggagcgtcaggaaggacatcgagtcatataagtcggggtcaggggtaaataaccggcgcacagagctgtttctgaaggaacacgaccacctgaggaattctgacagactgatcgaggagaccatttccatcgccatggcaactaaggaaaatatgacttctcagcggggcatgcttaaaagtatccatagcaagatgaataccctcgcaaacaggttccccgctgtgaatagtctgattcagcgaattaatttgagaaagcgcagggatagcctgatactaggcggcgtgataggaatttgcacaattcttcttcttctttatgcctttcactag

SEQ ID NO: 150403 - DNA, 753 bp, Artificial Sequence
  derived and/or modified sequence
atggctgctggcaccagcagctactgggaggacctgaggaagcaggcccggcagctggagaatgagctggacctgaagctggtgtccttcagcaagctgtgcaccagctacagccacagcagcaccagagatggccggcgggaccgctacagcagtgacaccacccccctgctgaatggcagcagccaggacaggatgtttgagaccatggccatcgagattgagcagctgctggcccggctgactggagtgaatgacaagatggccgagtacaccaacagcgctggggtgcccagcctgaatgctgccctgatgcacaccctgcagaggcaccgggacatcctgcaggactacacccatgagttccacaagaccaaggccaacttcatggccatccgggagcgggagaacctgatgggctctgtgaggaaggacatcgagagctacaagagcggcagcggcgtgaacaacagaagaacagagctgttcctgaaggagcatgaccacctgaggaacagcgaccggctgattgaggagaccatcagcatcgccatggccaccaaggagaacatgaccagccagaggggcatgctgaagagcatccacagcaagatgaacaccctggccaaccgcttccctgctgtgaacagcctcatccagaggatcaacctgaggaagagaagagacagcctcatcctgggcggcgtgattggcatctgcaccatcctgctgctgctgtatgccttccactag

SEQ ID NO: 150404 - DNA, 753 bp, Artificial Sequence
  derived and/or modified sequence
atggccgccggcaccagcagctactgggaggacctgcggaagcaggctcggcaactggagaatgaacttgacctcaagctggtctctttctcaaaactgtgcacctcatactcacactcctccacacgggacggccggagagatcgctactcaagcgacacaacgcccctgctcaacggaagctcccaggatagaatgttcgaaaccatggcaatcgaaattgaacaactcctggccagactcactggagttaatgacaagatggccgaatacacaaactccgcgggagtgcctagtctgaatgccgccctgatgcataccctgcagcgccatcgagacattcttcaggattacactcatgaatttcacaagacaaaggccaattttatggccattcgggagcgcgaaaacctcatggggtccgtccggaaagatatcgaaagctacaagtccggtagtggagttaacaatcgccgcactgagttgtttctgaaggagcacgaccatttaagaaatagcgatcggctcatagaggaaacgattagtatcgcaatggccacaaaggaaaacatgacatcccagcgcggtatgcttaaatcgattcactctaagatgaatacactggcgaatcggttcccagctgtcaatagcttgattcagcggattaacctgcgaaaaagacgcgatagcctgatccttggaggtgtaattggaatatgtactattctgctgctgctgtatgcgttccactag

SEQ ID NO: 150405 - DNA, 753 bp, Artificial Sequence
  derived and/or modified sequence
atggctgccggaacaagcagctactgggaagacctcaggaagcaggcacggcagctggaaaacgaattggatctgaaactggtctcattcagtaagctgtgcactagctattcccatagttctacaagggacggacgccgtgatagatattcctccgacactacccctttgctaaacgggtcttcccaggatcgaatgttcgagaccatggctattgaaattgagcagcttttggcccgtcttacaggggtcaacgataaaatggctgagtatacgaatagcgcgggagtcccttcactgaatgccgctctgatgcacacactccaacgtcaccgggacatcctccaggattatacccacgagttccacaaaaccaaggctaactttatggccatacgcgagcgcgagaacctcatgggcagcgtccggaaggacatcgagagctataaatcaggaagtggggtgaacaataggagaactgagctgttcctgaaagaacatgatcatctgcgcaactctgatcggctcatcgaagaaacaatttcaattgcaatggcgacaaaggagaacatgacatcccaaagagggatgttgaaatcaatacactccaaaatgaacacacttgccaaccggtttccagcggtaaactcactgattcagcgcattaatttgcggaaacgcagagatagtctgatcttggggggtgtgatcggtatctgcactatcctgctccttttgtatgcctttcactag

SEQ ID NO: 150406 - DNA, 528 bp, Artificial Sequence
  derived and/or modified sequence
atggccgctggcacatcttcatactgggaagacttgagaaaacaagcccggcagctggaaaacgaactagacctgaaactggtgagcttctccaagctctgtacctcttactcgcattcctctacacgggacggcagacgggataggtactcaagtgacaccacccccctcttgaatgggtcaagtcaagaccgcatgtttgagaccatggccatcgaaatcgagcagctcctcgcacgcctgacgggagttaatgataaaatggccgagtatactaacagtgcgggggtcccctccctgaatgccgctctgatgcataccctccaaagacatcgggacatactgcaggtgatctattgggcccgcgatgtctttatcattaccggcgtctgggtcttctttttcaacccctgtataggatatgttcatatctatctgaagggacagcgcgaaaagagcgaaaagattaatgccatgctgaagggcttagtgttacttttctttggagtcactatcatcaagttctag

SEQ ID NO: 150407 - DNA, 5220 bp, Artificial Sequence
  derived and/or modified sequence
atcccggctgacgttggacgacaaagatggcggcagggaccagcagttactgggaagatctcaggaaacaggctcgacagctggaaaatgaacttgacctgaaactagtttccttcagcaaactatgtacaagttacagtcatagcagtacccgagatggaagacgcgacaggtatagttctgatacaacaccccttttaaatggatcaagccaagacagaatgtttgagacaatggcgattgagattgaacaacttttggcaaggcttacaggggtaaatgataaaatggcagaatataccaacagtgcaggtgtcccctccttgaatgcagccctgatgcatacattacagcggcatagagacatattgcaggattatacacatgaattccataaaaccaaagcaaactttatggcaatacgggaaagggagaatcttatgggatcagtacgaaaagatattgagtcatataaaagtgggtctggagtaaacaacagaagaactgagctatttttgaaagaacatgaccaccttcgaaactcagatcgtctgatagaagagacaataagcattgctatggcaacaaaagaaaatatgacttcacagagaggaatgttgaagtcaattcacagcaaaatgaacactttggccaatcgttttcctgctgtaaacagcctgatccagaggatcaacctgaggaagcggcgggactcgctcatcctagggggtgttattgggatctgtaccatcctgttgctgctgtatgcgttccattgatgggacatcttcagggactcttgacagccaccgctttcacaccctggtctggaataaggaaacatcggagggagaagttgactgtcttgataattagcctgaccagcaggatgaatgcaagactgacagtgatggactctgtgacatggtcaggttgagctgaagccacagtttctctgtgctgtgttttctaacacatttttctgtttttaattaaaaaaaaaaaaaaaaggttttcagttgcttttgtctccctaggaggcaggtaaaccaatcaaaaacagagttttctgtgtttccatgatagtgttgaagcctaatgacaagccaggtcttacagctgggctcttcagaaaaccaggtttctacatccaaagactgcttttcttttagctgccagattggattgtgaataaaaataattcttccctctccctctccctctccccacggtctccctctttccacggtctccctctgatgccgagccgaagctggactgtactgctgccatctcggctcactgcaacctccctgcctgattctcctgcctcagcctgccgagtgcctgcaattgcaggcgagcgccgccacgcctgactgcctcggcctcccgaggtgccgggattgcagacggagtctcgttcactcagtgctcaatggtgcccaggctggagtgcagtggcgtgatctcggctcactacaacctccacctcccagccacctgccttggcctcccaaagtgccgagattgcagcctctgcccggccgccaccccgtctggaaagtgaggagcgcctctgcccggccgccatcccatctaggaagtgaggagcgcctcttcccagccgccatcccatctaggaagtgaggagcgtctctgcccggccgcccatcgtctgagatgtggggagcgcctctgccccgccgccccgtctgggatgtgaggagctcctctgcccggccgcgaccccgtctgggaggtgaggagcgtctctgtctggccaccccgtctgagaagtgaggagacctccgcccggcagccgccctgtctgagaagtgaggagcccctccgcccggcagccaccccatctgggaagtgaggagcgtctacgcccgggcagctgccccgtccgggagggaggtgggggggtcagccccccgcccggccagccgccccgtccgggagggaggtgggggggatcagccccccgcccggccagccgccccgtccgggagggaggtggggggcgcctctgcccggccgcccctgcccggccgcccctactgggaagtgaggagcccctctgcctggccaccaccccatctgggaggtgtgcccagcagctcattgagaacgggccatgatgacaatggcggttttgtggaatagaaaaggcggaaaggtggggaaaagattgagaaattggatggttgccgtgtctgtgtagaaagaagtagacatgggagacttttcattttgttctgtactaagaaaaattcttctgccttgggatcctgttgatctatgaccttacccccaacctggtgctctctgaaacatgtgctgtgtccactcagggttaaatggattaagggtggtgcaagatgtgctttgttaaacagatgcttgaaggcagcatgctccttaagagtcatcaccactccctaatctcaagtacccagggacacaaacactgcggaaggcggcagggtcctctgcctaggaaaaccagagacctttgttcacttgttgatctgctgaccttccctccactattgtcctatgaccctgccaaatccccctctgcgagaaacacccaagaatgatcaattaaaaaaaaaataatataataataattcttgtcctcttattttacactcataatgagaaatcacaagttctttcttgatgatctgtgctatagatttctactctgtctcctcaactctgttgatatttggggaaaattctgtttttcatagattctttgagatgctgatggaccagcttcagcatgtttgaggttgtctgaaatggagatcactgtaaaactgtctttttcttttaaattacaagtacactggggttaactgtattgctggaaaaacatcaagaatgacagtcttatatttaaggcaccagtcattgtttccattttttttttaattcttcccttggattaatattttctactgaaaagaaatgaaatctcagttccactatgataaaagaaacgaatcaccagtgtctgtcagtgcccccactgctcctcctcataccagcattgacactggtagctgaggaaggggactgctcaatttctaatgtgatctattcaagaagccacatataaaaaggcattgagggctcactgtccagagaattgcttttgtaaatgctccacaacgtatgggcaaaagtttaaggactactgcctgatgtaccaggaatcctgagttctgtgaaaatctgttcattccaaatctgttaagcatttccaaacatccagagaatggtttcactgttgagggtgcatgtggcagaatctgtctctctctgcacctgtcttctgttaccatccctggacagtgacagattttaagccagccaccagaattcttttcgagttaaccatttcttagtttctgtaaattcatgacttgtcttactgaactacagcctggtttgtagacttccaacatctacactgctgctcttcaccattggaattcactgtggtatttatagtattggcttcagtccgagccacaggcaataaaaggatatcagctgtagttctcagctacatcatggtgtatagatgctgttattcaggcgaacttgctcatgggtggactaacacctggtttggtacagagactgagaagtttttcattctggtgtcaaagttttgttacattatgggtgtgaagggcatttgatatatttttcttaactatggggtttatttttctaaatgtgggttgattgactgttaattgattcagggtacccttaaaagaaaagaagttttcccattgtgaaccttaaatgatcagagaagtaagttcattgattaaattctctgttgggagaacaaaacttttctcccttgacactttattatctttgatttttcaaagggccttgattggtggttgtgtctcggttaaaatttatgggactttgctatgtagttggcatttataaaatctgaagtatcataaataaagttatttatttaattatactaccagtcttttttactggtctgattcttttgtgcattcattaaagctgattgtgtgagagtgaactgggacacaagctagtctagctcactgcagccaagcaaaccctgttgatggctgatgggcctttccattagggttttgcttatgtgaagtaatggaattatgttggttattttctttatgaaaataaaccagttcttccaaggaagttaaaaggcttggtatggatgttggtgtcagataggtctgactaacctctccgtgctgcagcctatactaaggtgacccagggccacatgtagacagctaggccagtgctttttcctcttagggtttctttgcagaaagaaacctccagcaagggaagagaggtgtgtgtccacaggaaggggctccgtggggatcccatgaagggatttgagctctttcagctccatgtcatttaacttttttgtttaaccaccttggctttctctccttttttgctgtcctccttacggaccagttaccagattcagaggctaacagttagttacttgttaatgctagtcacagccaggaggtcagaaggaattttctacttctggatccaaatgttacctcttaggggaagttatgccccctcaactattgtcttattataatgaatctttcctttttggtccttttaagtaaccactcaaaacttttcatttcactgaaaaaatatgaaaaaccatgacaatagggctgggtgcagtggctcacgcctgtaatcttagcactttgggagaccaaggcaggcggatcgtttgaggccaggagtttgagaccagcctgggcaatgtagcaagactctgtctctgcaaaaaaaattaaaagatacctgagagctcactttaatatcaaggtatttgcatccattcccaccctgttagctcttaagggaggagggaaatcaattccaaccatactttcctgtgatggaagatgtttcctcttgaaaaaatgccaatacagatttttaaaacctattgttttccaaatgcactttgtaagtttttgcttttaaaatagcttcttggaaccaattttattgtatttgtacttaatttttgttctcatctaaatgtgcattttctgactgtatagaagaagctttggtatgtaatttaataataaattagaaatctaaatgattgca

SEQ ID NO: 150408 - DNA, 1026 bp, Artificial Sequence
  derived and/or modified sequence
ggacgacaaagatggcggcagggaccagcagttactgggaagatctcaggaaacaggctcgacagctggaaaatgaacttgacctgaaactagtttccttcagcaaactatgtacaagttacagtcatagcagtacccgagatggaagacgcgacaggtatagttctgatacaacaccccttttaaatggatcaagccaagacagaatgtttgagacaatggcgattgagattgaacaacttttggcaaggcttacaggggtaaatgataaaatggcagaatataccaacagtgcaggtgtcccctccttgaatgcagccctgatgcatacattacagcggcatagagacatattgcaggtaatatattgggctcgagatgttttcattatcacaggagtttgggtttttttttttaatccctgcattggatatgtgcacatatatttaaaaggacaaagagaaaaatctgagaaaataaatgccatgctaaagggacttgttttacttttttttggggtcaccattataaaattctgaaaatatctaatagctcttgctatttcttggcgaagttgagtaatattcatcactgggtacatatacttccactatgggagacctagctagctagctgtaacagtgaaatagccaatggtcatgtatagacaataacgtggtgggtaagcgtgtactttcagctagctttgaagataatatggagggggaattatttactatacttagtatattgtttaagaaaacagtaaatgtgtatgcaccaataaaactaaataaacttttaaagatttaaatggaggatatgttaaaaatatggtagtacaaatagaaaggactttctaaataagacttgatactggaaaccataacgaatggctaatttgcttactacacagagatataatagaaataagaaaaagacagtaggaaaatggacaaaggatataaaattgcttacaaaaaaatgaatggccaaaactataaaaacattttcagcagtatttcc

SEQ ID NO: 150409 - DNA, 528 bp, Artificial Sequence
  derived and/or modified sequence
atggctgctggcaccagcagctactgggaggacctgaggaagcaggcccggcagctggagaatgagctggacctgaagctggtgtccttcagcaagctgtgcaccagctacagccacagcagcaccagagatggccggcgggaccgctacagcagtgacaccacccccctgctgaatggcagcagccaggacaggatgtttgagaccatggccatcgagattgagcagctgctggcccggctgactggagtgaatgacaagatggccgagtacaccaacagcgctggggtgcccagcctgaatgctgccctgatgcacaccctgcagaggcaccgggacatcctgcaggtgatctactgggccagagatgtgttcatcatcaccggggtgtgggtgttcttcttcaacccctgcatcggctacgtgcacatctacctgaagggccagcgggagaagtctgagaagatcaatgccatgctgaagggcctggtgctgctcttcttcggcgtgaccatcatcaagttctag

SEQ ID NO: 150410 - DNA, 528 bp, Artificial Sequence
  derived and/or modified sequence
atggccgccggcaccagcagctactgggaggacctgcggaagcaggcccggcagctggagaatgagctggatctgaaactggtttcattctcaaagttgtgtacgagctatagtcattcttcgacgcgagatggcagacgcgatcgatattccagtgatactacgccactgctaaacggctcatctcaggaccggatgttcgagaccatggcgatcgaaattgaacagttgctagcacgtttaacaggcgttaatgataagatggccgaatacacaaatagcgccggggtccccagcctgaatgccgccctgatgcatactctgcagcgacatagagatatactgcaggtgatttactgggcccgggacgttttcattatcacaggagtctgggttttctttttcaatccgtgcatcgggtatgtgcacatctacttgaaggggcagagggagaagtccgaaaagataaacgctatgctgaaggggctggtgctcctctttttcggggtaactataatcaaattctag

SEQ ID NO: 150411 - DNA, 528 bp, Artificial Sequence
  derived and/or modified sequence
atggcggctggaactagctcctactgggaggacttaagaaagcaggccagacagctagagaacgaactggacctaaaactggtctcgttttccaaactttgtacctcttattctcattcaagcacaagggacggacgcagagataggtatagctctgacacaacacccctgctgaatggttccagtcaggatcgtatgttcgaaacgatggccatcgaaatcgaacagttacttgcccgtctcaccggcgtgaatgataagatggcggaatacaccaacagcgcgggtgtaccatcccttaatgccgcactgatgcacacactgcaaagacaccgagacatcctgcaggtcatctactgggcaagggatgtctttattattacaggcgtttgggtgttttttttcaatccttgcatcggttacgtgcacatctatttgaaaggccaacgcgaaaaaagtgagaaaataaatgcaatgctcaaagggctagtgctcctgtttttcggtgtcaccataattaaattctag

SEQ ID NO: 150412 - DNA, 528 bp, Artificial Sequence
  derived and/or modified sequence
atggccgccggcaccagcagctactgggaggacctgagaaagcaggccagacagctggagaacgagctggacctgaagctggtgagcttcagcaagctgtgcaccagctacagccacagcagcaccagagacggcagaagagacagatacagcagcgacaccacccccctgctgaacggcagcagccaggacagaatgttcgagaccatggccatcgagatcgagcagctgctggccagactgaccggcgtgaacgacaagatggccgagtacaccaacagcgccggcgtgcccagcctgaacgccgccctgatgcacaccctgcagagacacagagacatcctgcaggtgatctactgggccagagacgtgttcatcatcaccggcgtgtgggtgttcttcttcaacccctgcatcggctacgtgcacatctacctgaagggccagagagagaagagcgagaagatcaacgccatgctgaagggcctggtgctgctgttcttcggcgtgaccatcatcaagttctag

SEQ ID NO: 150413 - protein, 447 aa, Artificial Sequence
  derived and/or modified sequence
MDMGNQHPSISRLQEIQKEVKSVEQQVIGFSGLSDDKNYKKLERILTKQLFEIDSVDTEGKGDIQQARKRAAQETERLLKELEQNANHPHRIEIQNIFEEAQSLVREKIVPFYNGGNCVTDEFEEGIQDIILRLTHVKTGGKISLRKARYHTLTKICAVQEIIEDCMKKQPSLPLSEDAHPSVAKINFVMCEVNKARGVLIALLMGVNNNETCRHLSCVLSGLIADLDALDVCGRTEIRNYRREVVEDINKLLKYLDLEEEADTTKAFDLRQNHSILKIEKVLKRMREIKNELLQAQNPSELYLSSKTELQGLIGQLDEVSLEKNPCIREARRRAVIEVQTLITYIDLKEALEKRKLFACEEHPSHKAVWNVLGNLSEIQGEVLSFDGNRTDKNYIRLEELLTKQLLALDAVDPQGEEKCKAARKQAVRLAQNILSYLDLKSDEWEY

SEQ ID NO: 150414 - protein, 211 aa, Artificial Sequence
  derived and/or modified sequence
MDMGNQHPSISRLQEIQKEVKSVEQQVIGFSGLSDDKNYKKLERILTKQLFEIDSVDTEGKGDIQQARKRAAQETERLLKELEQNANHPHRIEIQNIFEEAQSLVREKIVPFYNGGNCVTDEFEEGIQDIILRLTHVKTGGKISLRKARYHTLTKICAVQEIIEDCMKKQPSLPLSEDAHPSVAKINFVMCEVNKARGVLIALLMGVNNNE

SEQ ID NO: 150415 - DNA, 636 bp, Artificial Sequence
  derived and/or modified sequence
atggacatgggcaaccagcaccccagcatcagcagactgcaggagatccagaaggaggtgaagagcgtggagcagcaggtgatcggcttcagcggcctgagcgacgacaagaactacaagaagctggagagaatcctgaccaagcagctgttcgagatcgacagcgtggacaccgagggcaagggcgacatccagcaggccagaaagagagccgcccaggagaccgagagactgctgaaggagctggagcagaacgccaaccacccccacagaatcgagatccagaacatcttcgaggaggcccagagcctggtgagagagaagatcgtgcccttctacaacggcggcaactgcgtgaccgacgagttcgaggagggcatccaggacatcatcctgagactgacccacgtgaagaccggcggcaagatcagcctgagaaaggccagataccacaccctgaccaagatctgcgccgtgcaggagatcatcgaggactgcatgaagaagcagcccagcctgcccctgagcgaggacgcccaccccagcgtggccaagatcaacttcgtgatgtgcgaggtgaacaaggccagaggcgtgctgatcgccctgctgatgggcgtgaacaacaacgagtag

SEQ ID NO: 150416 - DNA, 1344 bp, Artificial Sequence
  derived and/or modified sequence
atggatatgggtaatcagcatccttccatttccagactgcaggagatccagaaagaggtaaaatccgtcgagcaacaagtaattggattttccggtctttctgacgacaagaattataagaaactggagcgaattcttacaaagcagcttttcgagattgattccgtggacacggagggcaagggcgacatacagcaggccaggaagcgagcggctcaggaaaccgagcggttgctcaaggaactggagcaaaacgccaaccatccccacaggatcgaaattcagaacattttcgaagaggctcagagcctcgtcagagaaaaaatagtaccattctataacgggggcaactgcgttacagacgagttcgaagaaggaatccaggacattatactcagattgacccatgtgaagacaggggggaagatctctttgcgaaaagctcgataccatactctaactaagatctgcgcagtccaggaaatcattgaggattgcatgaaaaaacagccctccctgcccctgagcgaggatgcgcatcccagcgtggccaagattaactttgtgatgtgtgaggtgaacaaggccaggggggtcttgatcgcactattgatgggagtgaacaataatgaaacctgtagacacctaagctgcgtcctgtcaggcctgatcgccgacctcgatgctttagatgtttgcggaaggactgagattcgaaactatagaagagaagttgttgaggacataaacaaactgctcaaatacctggacctggaggaagaagccgatacaacgaaggcatttgatcttcgccagaaccactcaatactcaagatcgagaaagtgttgaagagaatgagagagatcaaaaatgagcttctgcaggctcagaacccctctgagctctacctcagcagtaaaaccgagctgcagggactgatagggcaacttgatgaggtctctcttgagaaaaatccctgtatcagggaggccagaaggagggcggtcatcgaagtgcaaactctgattacatatattgatttaaaggaagctttagagaaaagaaaacttttcgcgtgtgaggagcatccctcccacaaagcagtatggaacgtcctggggaatctgtcagagattcagggcgaggtgcttagcttcgacggtaatcgaacagataaaaactatattcggctggaggaacttctgacgaagcaacttctggccctcgacgcagtcgacccacagggcgaggagaaatgcaaggctgccagaaaacaggcagtccgcctggcccagaacattctgagttaccttgacctgaaatccgatgagtgggagtattag

SEQ ID NO: 150417 - DNA, 1344 bp, Artificial Sequence
  derived and/or modified sequence
atggatatggggaatcagcatccttcgatctcaaggctgcaggagatccaaaaggaagtcaagtccgtagaacagcaggtaattggcttctccgggttgtcggacgacaagaactacaaaaaactggagagaatattaacaaagcagctctttgaaatagattcagtcgatactgaggggaaaggggacatccaacaggcaaggaagagagcggcgcaggagaccgagcgtcttctgaaggagcttgagcaaaatgccaatcatccccaccggattgaaatccagaacattttcgaagaggcccagtccctggtcagagagaagattgttccgttttacaatggaggcaattgtgtcaccgacgagtttgaagaagggatccaggacattatcctgcggttgactcatgtaaagacaggcgggaagattagtctgcgtaaagcacgttaccatacactcactaaaatctgcgctgtgcaggaaatcattgaagattgtatgaaaaagcagccaagcctgcccctgtcagaagatgctcatccctccgtcgccaagataaattttgtgatgtgtgaggtgaacaaggctaggggcgtactgatcgccctgctgatgggggtcaacaacaatgaaacttgcagacacctgagctgcgtcctgtctggcctcatagccgacttagacgccctggatgtctgcggtaggacagagattagaaactatcggcgggaggtggtggaagacatcaacaagctgctgaagtatctcgacttggaggaggaggcagacacgaccaaggcctttgacttgcgccagaatcactctatcctgaaaattgaaaaggtgcttaaaagaatgagggaaatcaagaacgaacttctgcaggctcagaatcctagcgaactatacctctcctccaagactgaactccagggcctgataggacagctggacgaggtgtcactggagaagaacccatgtattagagaagctcgtagaagggccgtgattgaagtacagaccctcattacctacatcgatctaaaagaggcgttggaaaagcgtaagctctttgcatgcgaggagcatccgtcccataaggcagtttggaacgtacttgggaatctgagtgaaatccagggagaagtgttatcgtttgacgggaatcggaccgataaaaactacattaggctggaggaactgctaaccaagcagctgctggctctcgatgcagtcgacccacaaggcgaagaaaagtgcaaggccgcaagaaaacaagccgtgcgactagctcagaatatcttgtcgtacctagatctcaaatccgacgagtgggagtactag

SEQ ID NO: 150418 - DNA, 636 bp, Artificial Sequence
  derived and/or modified sequence
atggacatgggcaatcaacatccctctatttcacggcttcaggaaattcaaaaagaggtcaagagcgtcgagcagcaggttattggcttctccggcctgtccgacgataaaaactacaagaagctggagcggattctgacaaagcagttgttcgagatcgattccgtagatacagagggcaagggcgatattcagcaggccaggaaacgagcagcacaggagacggagcgcttgctgaaggaactggaacagaatgccaaccatccccatcgaattgaaatccagaacattttcgaggaagcccagtccctggtacgagagaagatcgttcccttctacaacggaggcaactgtgttactgatgagttcgaggaaggaatacaagacatcattctcagattgactcacgttaagactggaggcaagatttcactgaggaaggcaagatatcatacactcaccaaaatctgcgctgtccaggagataatcgaggactgtatgaagaaacagccgagcctcccactcagcgaagatgcgcatccaagcgttgccaagattaacttcgttatgtgtgaggttaacaaggcaaggggagtgctgatcgcgctgctgatgggagttaataataacgaatag

SEQ ID NO: 150419 - DNA, 1344 bp, Artificial Sequence
  derived and/or modified sequence
atggacatgggcaaccagcaccccagcatcagccggctgcaggagatccagaaggaggtgaagtctgtggagcagcaggtgattggcttcagcggcctgagtgatgacaagaactacaagaagctggagcgcatcctgaccaagcagctgtttgaaattgattctgtggacacagagggcaaaggagacatccagcaggccaggaagagagctgcccaggagacagagcggctgctgaaggagctggagcagaatgccaaccacccccaccgcatcgagatccagaacatctttgaggaggcccagagcctggtgcgggagaagatcgtgcccttctacaacggcggcaactgtgtgacagatgaatttgaggagggcatccaggacatcatcctgcggctgacccacgtgaagacaggaggcaagatcagcctgaggaaggcccgctaccacaccctgaccaagatctgtgctgtgcaggagatcatcgaggactgcatgaagaagcagcccagcctgcccctgtctgaagatgcccaccccagcgtggccaagatcaactttgtgatgtgtgaggtgaacaaggcccggggcgtgctgattgccctgctgatgggcgtgaacaacaatgagacctgccgccacctgagctgtgtgctgagcggcctgattgctgacctggatgccctggatgtgtgtggccgcacagagatccggaactaccgccgggaggtggtggaggacatcaacaagctgctgaagtacctggacctggaggaggaggccgacaccaccaaggcctttgacctgcggcagaaccacagcatcctgaagattgagaaggtgctgaagaggatgagggagatcaagaatgagctgctgcaggcccagaaccccagcgagctgtacctgagcagcaagacagagctgcagggcctcatcggccagctggatgaggtgtccctggagaagaacccctgcatccgggaggccaggagaagagctgtgattgaggtgcagaccctcatcacctacatcgacctgaaggaggccctggagaagaggaagctgtttgcctgtgaggagcaccccagccacaaggctgtgtggaatgtgctgggcaacctgtctgagatccagggcgaggtgctgagctttgatggcaacagaacagacaagaactacatccggctggaggagctgctgaccaagcagctgctggccctggatgctgtggacccccagggcgaggagaagtgcaaggccgccaggaagcaggccgtgcggctggcccagaacatcctgagctacctggacctgaagagtgatgagtgggagtactag

SEQ ID NO: 150420 - DNA, 636 bp, Artificial Sequence
  derived and/or modified sequence
atggacatgggcaaccagcaccccagcatcagccggctgcaggagatccagaaggaggtgaagtctgtggagcagcaggtgattggcttcagcggcctgagtgatgacaagaactacaagaagctggagcgcatcctgaccaagcagctgtttgaaattgattctgtggacacagagggcaaaggagacatccagcaggccaggaagagagctgcccaggagacagagcggctgctgaaggagctggagcagaatgccaaccacccccaccgcatcgagatccagaacatctttgaggaggcccagagcctggtgcgggagaagatcgtgcccttctacaacggcggcaactgtgtgacagatgaatttgaggagggcatccaggacatcatcctgcggctgacccacgtgaagacaggaggcaagatcagcctgaggaaggcccgctaccacaccctgaccaagatctgtgctgtgcaggagatcatcgaggactgcatgaagaagcagcccagcctgcccctgtctgaagatgcccaccccagcgtggccaagatcaactttgtgatgtgtgaggtgaacaaggcccggggcgtgctgattgccctgctgatgggcgtgaacaacaatgaatag

SEQ ID NO: 150421 - DNA, 1344 bp, Artificial Sequence
  derived and/or modified sequence
atggacatgggcaaccagcaccccagcatcagccggctgcaggagatccaaaaggaggtgaaatcagtggaacagcaggtcatcggcttcagcggcctgtcagatgataagaactataaaaaactggaacgcatcttaactaagcaattatttgaaatcgacagtgttgacaccgaaggcaagggtgacattcaacaggctagaaagagggccgctcaggagacagagcgccttttgaaggaacttgagcagaatgccaatcaccctcaccggattgagatacagaatatattcgaagaagcccaatccctggtcagagagaagatcgtcccgttctacaacggggggaattgcgtaactgacgagttcgaggaggggattcaggacataattctgcgtctgacgcacgttaagacaggcggcaagatcagcctccgcaaggctcgataccatactctcactaagatatgcgctgtgcaggagatcattgaggactgtatgaagaaacagcccagcctgcccctatcagaggacgcccaccccagcgtggccaagatcaacttcgtgatgtgcgaggtaaacaaagctagaggggttctcatcgccctgttgatgggtgttaataataacgaaacatgcaggcacctaagctgcgtgctgagcgggctgatcgcggacctcgacgccctcgatgtgtgtggaaggacagagattagaaattaccgcagagaggtcgtggaggacattaacaagttactaaagtacctggatctggaggaggaggcagacacaacaaaggcctttgacctgagacagaaccactcgatccttaaaatcgagaaagtactaaagcgcatgagggagatcaaaaatgaacttcttcaagctcagaatccttctgaactgtatctgtcaagcaaaacggaactgcagggtttaattgggcagctggacgaggtgtctctggagaagaacccgtgcatcagggaggccagacgccgtgccgtgatcgaggttcagactctaatcacctatatcgacctgaaagaggcactcgagaagcgaaagctgtttgcctgcgaagaacatccatcccacaaagccgtgtggaatgtccttggaaacctgtctgagatacagggcgaagtcttgtcttttgacggcaatcggaccgacaaaaattacataagactggaggaacttttgactaagcaactgcttgcccttgatgccgtcgacccccagggagaagagaagtgtaaggcggcgcgaaaacaggccgttaggttagctcagaatattttatcctatctagatctgaagtcggacgaatgggagtactag

SEQ ID NO: 150422 - DNA, 1344 bp, Artificial Sequence
  derived and/or modified sequence
atggacatgggcaaccagcaccccagcatcagccggctgcaggagattcaaaaagaagtcaaatctgtcgaacaacaggttatcgggttcagtggcctgagtgacgataagaactataagaagctggaacgcattttgacaaaacagctgttcgagatagactcagtggacactgaaggcaaaggggatatccagcaggctcgcaagcgagctgcgcaagaaacagagcgtttgctgaaggaacttgaacaaaatgcgaaccaccctcaccgcattgagatacagaatattttcgaggaggcacagtctctcgtcagggagaaaatcgtgcctttttataacggtggcaactgcgtgaccgacgagttcgaggaggggatccaggatatcatcctgcgactgactcatgtaaagactggcggcaaaatctctctgcggaaagcaagataccacacgctgacaaagatctgcgcggtccaggagataatcgaagactgcatgaagaagcaaccatctctcccgctgtccgaagacgcccacccatccgtcgcgaagattaattttgttatgtgtgaagtgaacaaagcgagaggcgtgttaattgcactgttaatgggggtcaataataatgagacatgtagacatttgtcttgtgtcctgtctgggctcatcgccgacttggacgcattagatgtgtgtggccggactgagataaggaattatcgccgtgaggtggtagaagatattaataaactcctcaaatatctggaccttgaggaggaggcagacacaactaaagcgtttgatctccgacagaaccactccattcttaaaatcgagaaggttctcaagcgaatgagggagatcaagaacgaactgctgcaggcccagaatcctagtgagttgtacctatcctccaagactgaactgcagggccttatcggccagttagacgaggtctcattggagaagaacccctgcatacgcgaagcccgccgcagagctgtgattgaggtccagacactgatcacttatatcgatctcaaggaagctctagagaaacggaagctgttcgcatgtgaggagcatcccagtcacaaggccgtgtggaacgtgctcgggaacctctcagagatccagggcgaggtgctttcttttgatggaaatcggaccgacaaaaactatatcaggttagaagagttgttgacaaaacagttactcgctctggacgcagttgacccccaaggagaagagaaatgtaaagctgcccgaaaacaggctgtgcggcttgcgcaaaacatactgtcctatctcgacctaaagagcgatgaatgggaatactag

SEQ ID NO: 150423 - DNA, 636 bp, Artificial Sequence
  derived and/or modified sequence
atggacatgggcaaccagcaccccagcatcagccggctgcaggagatccagaaggaggtgaaaagcgtcgagcagcaggtgattggtttcagcggcctttcagacgataaaaactataagaagctggaaagaatacttacgaaacagctatttgaaattgatagtgtcgacacagagggaaagggagatatccagcaggccaggaaacgcgctgctcaggagaccgaaaggctcttaaaggaactggagcagaatgccaatcatcctcacaggattgaaatccagaatatctttgaggaggctcagagcctggtacgggaaaaaatagttcctttttacaacggagggaattgcgtcactgacgagttcgaggaaggcatccaggacatcatattaaggcttacgcacgtgaagacaggcggcaagattagcctacgcaaggccaggtaccacaccctgacaaaaatctgcgcagttcaagagattattgaggattgcatgaagaaacagccgagcctgccattgtccgaagatgcccatccctccgtcgcaaagataaattttgtgatgtgtgaggtaaacaaggctcgcggagtgctcattgccctgttgatgggagtgaacaataatgaatag

SEQ ID NO: 150424 - DNA, 1344 bp, Artificial Sequence
  derived and/or modified sequence
atggatatggggaaccagcatccctccattagccgactccaggaaatccagaaagaggtgaagtctgttgagcaacaggtgattggcttttcgggcctctctgatgacaaaaattacaaaaaactggaaaggatacttactaaacagctgtttgagatcgactctgtggacacagagggtaagggagatatccagcaggctcgcaagcgcgcagcccaagagacagagaggctgctgaaagagttggagcaaaacgccaaccacccacatcgcatcgagattcagaacatctttgaggaagctcaatccttagtgagagagaagatcgttcccttctacaacggcggaaactgtgtgaccgatgagtttgaggaagggattcaggacatcatcctgcggctcacccacgtgaagactgggggaaagataagcctgcgtaaggctagataccatacactcactaagatctgtgccgtccaggagattattgaagattgcatgaaaaagcaacctagcctgcccctttccgaggatgcccatcctagcgtagccaagataaacttcgtcatgtgtgaggtgaacaaagcgagaggggtactcattgccctgctgatgggagtgaacaacaacgagacctgtcgccatctatcctgcgttctgagcggactcattgcagatctagacgctctggatgtctgtgggagaacagagatccggaattaccgtcgtgaagtggtagaagatatcaataagctgctcaagtacctggacctggaagaggaggctgacacaactaaagccttcgatctgcggcagaaccactcaatattaaagatcgaaaaggtccttaaaaggatgcgggagatcaaaaacgagctgctgcaggcacagaacccatccgagctgtatctttcctcgaaaaccgagctacaggggcttatcgggcagcttgatgaggtgagcctggagaagaacccctgtatacgcgaagcccgtcgcagagccgtcatagaggtacagaccctgatcacctatatcgaccttaaggaggctctggagaagcgcaaactgttcgcatgcgaagaacatccctctcataaagccgtgtggaacgtcctcgggaacctatcagaaatccagggagaggtgctgtcatttgacggaaacaggacggataaaaattacattagactcgaagagctcctgacaaagcagctgctggctctggatgcagtggacccacagggggaagagaagtgcaaggccgctcgtaaacaggcagtacgtctggcccagaacattctgagctatctggatctgaaaagcgacgagtgggagtactag

SEQ ID NO: 150425 - DNA, 1344 bp, Artificial Sequence
  derived and/or modified sequence
atggatatgggaaatcaacatccctcgatttctcggcttcaggagatacagaaagaggtgaagtcagtggagcaacaagtgatagggttttctggcctgagcgacgacaaaaactacaagaaactggagagaattctcacaaaacagcttttcgagatcgatagcgttgatactgagggcaaaggagacatccagcaggcaagaaagcgcgcagcccaagagaccgagcgactcttgaaagagcttgagcagaatgcaaaccaccctcatcggattgagatccagaacatttttgaggaggcccagagtctcgtgagagaaaagatcgtgcccttttataacggtggcaattgcgtcactgatgaattcgaagagggcattcaagacattattctgcgtttgacacatgtgaagaccggtggcaagatcagcttgcgcaaggctcggtaccataccctgacaaagatctgcgctgtgcaggagatcatcgaggattgtatgaagaaacagcccagccttcctctatccgaggatgcgcaccccagcgtagctaaaattaattttgttatgtgtgaggtcaacaaagcccgtggcgttcttatcgccctgctgatgggcgtgaataacaatgaaacctgccggcaccttagttgcgtgttgtcgggactgatcgccgacctggacgctctcgatgtgtgtggccgaacagagattcgtaactaccgacgcgaggtggtcgaagacattaataagttgctgaaatatctggatttggaagaggaagcagataccacaaaagccttcgacctgcgccaaaatcattctatcctcaaaattgagaaagttctcaagaggatgagggagatcaagaatgaactactgcaagcccagaatcctagtgagctttatttgagcagtaaaaccgaactgcagggactgatcggccagcttgacgaagtgagcttggaaaagaatccatgtatccgggaggcccgacggagagctgttatcgaagtgcaaaccctgatcacatacattgacctgaaggaagctctggaaaagcgcaaattatttgcgtgcgaagagcaccctagccacaaagctgtgtggaacgtgctggggaatctttcagagattcaaggcgaagtactctctttcgacggcaacagaaccgacaaaaactatatccggctggaagagttactgactaagcaactgctggctctggacgccgtcgatccgcagggggaggaaaagtgcaaggcagcaagaaaacaggcagttagattagcccagaacatactaagctacctcgatctgaaatctgatgagtgggaatattag

SEQ ID NO: 150426 - DNA, 636 bp, Artificial Sequence
  derived and/or modified sequence
atggatatgggtaatcaacacccttccatctcgagattgcaagagattcagaaagaagttaaaagcgtcgaacagcaggtcattggattttcgggacttagcgacgataagaactataagaaactggaacggatactcacaaaacagttgtttgaaatagactccgtagatactgagggaaaaggggacatccagcaggctcgtaagagagcagcccaggaaactgagagactcctgaaggagttggagcaaaacgccaaccacccccacaggatagaaattcagaacatatttgaagaagctcagagtctggtccgcgagaaaattgtccctttctataacggtgggaattgtgtcaccgatgagttcgaggaaggaattcaggacattatcctgcggctgacccacgtgaaaacaggcggaaagattagcctgcgcaaagctcgataccacacactcacgaagatatgtgcagttcaggagattattgaagactgcatgaagaagcagccttctctccctctgtctgaagatgctcaccccagcgtggctaagatcaacttcgtcatgtgcgaggtaaataaagcccgtggagtgctaattgccctactgatgggcgtgaacaacaatgagtag

SEQ ID NO: 150427 - DNA, 1344 bp, Artificial Sequence
  derived and/or modified sequence
atggacatgggcaaccagcaccccagcatcagcagactgcaggagatccagaaggaggtgaagagcgtggagcagcaggtgatcggcttcagcggcctgagcgacgacaagaactacaagaagctggagagaatcctgaccaagcagctgttcgagatcgacagcgtggacaccgagggcaagggcgacatccagcaggccagaaagagagccgcccaggagaccgagagactgctgaaggagctggagcagaacgccaaccacccccacagaatcgagatccagaacatcttcgaggaggcccagagcctggtgagagagaagatcgtgcccttctacaacggcggcaactgcgtgaccgacgagttcgaggagggcatccaggacatcatcctgagactgacccacgtgaagaccggcggcaagatcagcctgagaaaggccagataccacaccctgaccaagatctgcgccgtgcaggagatcatcgaggactgcatgaagaagcagcccagcctgcccctgagcgaggacgcccaccccagcgtggccaagatcaacttcgtgatgtgcgaggtgaacaaggccagaggcgtgctgatcgccctgctgatgggcgtgaacaacaacgagacctgcagacacctgagctgcgtgctgagcggcctgatcgccgacctggacgccctggacgtgtgcggcagaaccgagatcagaaactacagaagagaggtggtggaggacatcaacaagctgctgaagtacctggacctggaggaggaggccgacaccaccaaggccttcgacctgagacagaaccacagcatcctgaagatcgagaaggtgctgaagagaatgagagagatcaagaacgagctgctgcaggcccagaaccccagcgagctgtacctgagcagcaagaccgagctgcagggcctgatcggccagctggacgaggtgagcctggagaagaacccctgcatcagagaggccagaagaagagccgtgatcgaggtgcagaccctgatcacctacatcgacctgaaggaggccctggagaagagaaagctgttcgcctgcgaggagcaccccagccacaaggccgtgtggaacgtgctgggcaacctgagcgagatccagggcgaggtgctgagcttcgacggcaacagaaccgacaagaactacatcagactggaggagctgctgaccaagcagctgctggccctggacgccgtggacccccagggcgaggagaagtgcaaggccgccagaaagcaggccgtgagactggcccagaacatcctgagctacctggacctgaagagcgacgagtgggagtactag

SEQ ID NO: 150428 - protein, 457 aa, Artificial Sequence
  derived and/or modified sequence
MSALRRSGYGPSDGPSYGRYYGPGGGDVPVHPPPPLYPLRPEPPQPPISWRVRGGGPAETTWLGEGGGGDGYYPSGGAWPEPGRAGGSHQEQPPYPSYNSNYWNSTARSRAPYPSTYPVRPELQGQSLNSYTNGAYGPTYPPGPGANTASYSGAYYAPGYTQTSYSTEVPSTYRSSGNSPTPVSRWIYPQQDCQTEAPPLRGQVPGYPPSQNPGMTLPHYPYGDGNRSVPQSGPTVRPQEDAWASPGAYGMGGRYPWPSSAPSAPPGNLYMTESTSPWPSSGSPQSPPSPPVQQPKDSSYPYSQSDQSMNRHNFPCSVHQYESSGTVNNDDSDLLDSQVQYSAEPQLYGNATSDHPNNQDQSSSLPEECVPSDESTPPSIKKIIHVLEKVQYLEQEVEEFVGKKTDKAYWLLEEMLTKELLELDSVETGGQDSVRQARKEAVCKIQAILEKLEKKGL

SEQ ID NO: 150429 - DNA, 1374 bp, Artificial Sequence
  derived and/or modified sequence
atgagcgctcttagacgctccgggtacggaccctccgacgggccatcctacgggaggtattacgggccaggcgggggagatgtgcccgtacacccaccgcctcccttatatcccctgaggcccgaacccccccagccaccaatttcgtggcgcgtgcggggaggaggaccggctgagacaacctggctcggagagggaggcggcggagacggctattaccctagtggaggagcgtggcccgagcctggacgcgccggggggagccaccaggagcagcctccgtacccgagctacaatagtaattattggaacagcaccgctaggtcccgggccccttacccaagtacgtacccagtgcgacctgagctgcagggacagagccttaatagctatacgaatggagcctatgggcccacctatccccctggccccggagcgaacactgcgtcatactctggcgcatactatgctcctggttatacacagacatcgtattctaccgaagtgccgagcacctaccggtcttctgggaattctcctactcctgtgtcacgctggatttatccgcaacaagactgccagaccgaggctcctcccctgagaggccaagtcccgggctacccgccctctcagaacccagggatgacactcccacactatccctacggagatggcaatcggagcgttccgcagtcagggccaaccgtgcgaccccaagaagatgcctgggcctcccctggcgcttacgggatgggcggcaggtatccttggccttcctctgcgccaagcgctcccccaggcaatctgtacatgaccgaaagtactagcccgtggccatcttctgggtcaccacagagcccacctagcccaccggtgcagcagccaaaggatagtagctatccctactcccaatccgaccagtccatgaatcgtcacaacttcccctgctctgttcaccagtatgagtcctcgggcaccgtgaataatgatgacagtgacttactggacagccaggtccagtattccgcggagccccagctttatggcaacgcaacaagcgatcacccaaacaaccaggatcagagctctagccttccagaagaatgcgtgcccagtgacgaaagcaccccaccatctatcaaaaaaatcattcatgttctggaaaaagtacagtacctggaacaagaagtcgaagaattcgtcggtaagaagactgacaaagcgtactggcttctagaggaaatgctgaccaaagagctgctggaactggattctgtggaaaccggtggacaggactctgtgcgacaagcacgcaaagaggcagtgtgtaagatccaggctattttagagaagttagaaaagaagggtctttag

SEQ ID NO: 150430 - DNA, 1374 bp, Artificial Sequence
  derived and/or modified sequence
atgtctgccctgcggcgcagcggctacggccccagtgatggccccagctatggccgctactacggccctggaggaggagatgtgcctgtgcaccccccaccacccctgtaccccctgcggcctgagcccccccagccccccatctcctggagggtgcggggcggcggccctgctgagaccacctggctgggggagggcggcggcggagatggctactaccccagcggcggggcctggccagagcccggccgggccggcggcagccaccaggagcagcccccctaccccagctacaacagcaactactggaacagcacagcccggagccgggccccctaccccagcacctaccctgtgcggcctgagctgcagggccagagcctgaacagctacaccaatggagcctacggccccacctacccacctggccctggggccaacacagccagctacagcggggcctactatgcccctggctacacccagaccagctacagcacagaggtgcccagcacctaccgcagcagcggcaacagccccacccctgtgagccgctggatctacccccagcaggactgccagacagaggccccacccctgcggggccaggtgcccggctacccacccagccagaaccctggcatgaccctgccccactacccctatggagatggcaacagatctgtgccccagagcggccccaccgtgcggccccaggaggatgcctgggccagccctggggcctacggcatgggcggccgctacccctggcccagcagcgcccccagcgcccctcctggcaacctgtacatgacagagagcaccagcccctggcccagcagcggcagcccccagagcccccccagcccccctgtgcagcagcccaaggacagcagctacccctacagccagagcgaccagagcatgaacagacacaacttcccctgcagcgtgcaccagtatgagagcagcggcaccgtgaacaatgatgacagcgacctgctggacagccaggtgcagtacagcgctgagccccagctgtatggaaatgccaccagtgaccaccccaacaaccaggaccagagcagcagcctgcctgaggagtgtgtgcccagtgatgagagcaccccacccagcatcaagaagatcatccacgtgctggagaaggtgcagtacctggagcaggaggtggaggagtttgtgggcaagaagacagacaaggcctactggctgctggaggagatgctgaccaaggagctgctggagctggacagcgtggagaccggcggccaggacagcgtgcggcaggccaggaaggaggccgtgtgcaagatccaggccatcctggagaagctggagaagaagggcctgtag

SEQ ID NO: 150431 - DNA, 1374 bp, Artificial Sequence
  derived and/or modified sequence
atgagcgccctgcggcggagcggctacggccccagcgacggcccctcttacgggaggtattacggccccggcggtggtgatgtaccggtgcacccccctcctccattgtaccccctgcgaccagaaccaccccagccgccgatctcctggagagtcaggggtggaggtcccgctgaaacaacctggctgggggagggaggcggaggagacggttattacccctcgggtggagcttggcccgagccgggcagagccggcggctctcatcaggaacagcccccttacccatcttacaatagcaactattggaattctactgcaaggagccgcgctccctatccctcaacgtacccagtccgaccagaactgcaaggccagagtctgaactcctacacgaatggggcgtatggacccacctaccccccaggaccaggcgcaaatactgccagctatagcggagcttattacgcacctggatacacccagacctcctattctactgaagtgccttctacgtatagatcatcgggaaacagtcccaccccggtttccagatggatctatccccagcaggactgccaaacagaggcgccacccctgcgcggacaggtgcctgggtatcctccctcccagaaccccgggatgaccctgccacactacccctatggagacgggaaccggtccgtgccccagagtggaccgacagtgagaccacaggaagatgcttgggcgtcaccaggtgcatatgggatgggaggaaggtatccatggccttcaagcgcaccctcagctcctccagggaacctatacatgaccgagtctacctccccttggccctcttctggctcacctcagagcccaccttctccacccgtgcagcaaccaaaagattcaagttacccctactcccagagcgaccaatccatgaatcgacataacttcccttgttcggttcaccaatatgaatcttcagggaccgttaacaacgacgactcagatcttctggattcgcaggtgcagtacagtgccgagccgcaactctacgggaacgccacttcagaccaccctaataatcaggatcagtcgagctccctgcccgaggagtgtgtaccatccgatgaaagtaccccacctagcatcaagaagattatccatgtactggaaaaggtccagtatctggagcaggaggttgaggagtttgtggggaaaaaaaccgataaggcatattggttgctcgaggagatgctcacaaaagagctgctagaattggatagcgttgagacaggcggacaggatagcgtgcgtcaggctcgcaaagaggctgtgtgcaagatccaggctattctggaaaaacttgagaagaaggggctatag

SEQ ID NO: 150432 - DNA, 1374 bp, Artificial Sequence
  derived and/or modified sequence
atgagtgcccttaggcgcagcgggtacggcccttccgacggtccttcttacgggcgttattatggccctggtggcggtgacgtgcctgtgcacccacccccacctttgtatcctctccggccagagcctccccagcctcccattagctggagggtccggggagggggtcccgcagaaaccacctggctcggcgaaggaggtggcggagacggctattatccatccgggggtgcatggccagagcctggacgcgctggcggaagtcaccaggagcagcccccttacccctcctacaactccaattactggaacagtactgcaaggagtcgtgccccatatccgtcaacttaccctgtccgtcccgagctacagggccagagccttaatagttacactaacggggcatacgggccaacctaccccccagggccaggcgctaacacggcttcctacagcggggcatactacgctcccggatacacccagacatcttactccaccgaggttccaagtacttacagatcatccggaaattctccgacaccagtgagtcgttggatctatccacagcaggactgtcaaactgaagctcctccactgcggggacaggttcctggctatcccccttcccagaacccaggaatgacattgccacattacccatacggggacggcaacaggagtgtaccccagagcggacccaccgtacgccctcaagaggacgcttgggcctcccctggcgcttatggaatgggcggaaggtacccttggccaagtagcgccccatctgcgcctcccggaaacctctatatgactgaatccacctccccctggccttcaagtggaagcccacagagccccccaagcccacctgtacagcagcctaaagacagcagctacccatattcacagtccgatcagagcatgaacagacacaacttcccttgctcagttcaccagtacgagtcctccgggactgttaataatgatgattccgacctgctggattctcaggtacaatactctgcagaacctcaactgtatggaaacgcaacttcagatcatcctaacaatcaggatcagtcatcctcgcttccggaggagtgcgtcccgtccgatgaaagcacaccccctagcatcaaaaagattattcatgtgttggaaaaagtgcaatatctcgagcaggaagtggaggaatttgttggcaagaaaaccgacaaagcttactggttgttggaggaaatgctgactaaagagctcctggaactggacagcgttgagacaggtggccaggactccgttcggcaggccagaaaagaggccgtctgtaaaatccaagccatcctcgaaaaactcgaaaagaaggggctatag

SEQ ID NO: 150433 - DNA, 4453 bp, Artificial Sequence
  derived and/or modified sequence
aactccattggataaatggcgaggaaacgtatactccctcttaaggaacacggtgtcttccttcgtctccgggttcccgagaccccagagtcactgacctccgtccctcagctttcggggttcggcagcagaaggggcgggcccgggcctgggattggctggcgtcgtccgacccccttcgctgctctccattcgcaatcgcccgcgggcgcctgcgcgatgggtcggccgtggggagcggggcgggaagcgcttcagggcagcggatcccatgtcggccctgaggcgctcgggctacggccccagtgacggtccgtcctacggccgctactacgggcctgggggtggagatgtgccggtacacccacctccacccttatatcctcttcgccctgaacctccccagcctcccatttcctggcgggtgcgcgggggcggcccggcggagaccacctggctgggagaaggcggaggaggcgatggctactatccctcgggaggcgcctggccagagcctggtcgagccggaggaagccaccaggagcagccaccatatcctagctacaattctaactattggaattctactgcgagatctagggctccttacccaagtacatatcctgtaagaccagaattgcaaggccagagtttgaattcttatacaaatggagcgtatggtccaacataccccccaggccctggggcaaatactgcctcatactcaggggcttattatgcacctggttatactcagaccagttactccacagaagttccaagtacttaccgttcatctggcaacagcccaactccagtctctcgttggatctatccccagcaggactgtcagactgaagcaccccctcttagggggcaggttccaggatatccgccttcacagaaccctggaatgaccctgccccattatccttatggagatggtaatcgtagtgttccacaatcaggaccgactgtacgaccacaagaagatgcgtgggcttctcctggtgcttatggaatgggtggccgttatccctggccttcatcagcgccctcagcaccacccggcaatctctacatgactgaaagtacttcaccatggcctagcagtggctctccccagtcacccccttcacccccagtccagcagcccaaggattcttcatacccctatagccaatcagatcaaagcatgaaccggcacaactttccttgcagtgtccatcagtacgaatcctcggggacagtgaacaatgatgattcagatcttttggattcccaagtccagtatagtgctgagcctcagctgtatggtaatgccaccagtgaccatcccaacaatcaagatcaaagtagcagtcttcctgaagaatgtgtaccttcagatgaaagtactcctccgagtattaaaaaaatcatacatgtgctggagaaggtccagtatcttgaacaagaagtagaagaatttgtaggaaaaaagacagacaaagcatactggcttctggaagaaatgctaaccaaggaacttttggaactggattcagttgaaactgggggccaggactctgtacggcaggccagaaaagaggctgtttgtaagattcaggccatactggaaaaattagaaaaaaaaggattatgaaaggatttagaacaaagtggaagcctgttactaacttgaccaaagaacacttgatttggttaattaccctctttttgaaatgcctgttgatgacaagaagcaatacattccagctttcctttgattttatacttgaaaaactggcaaaggaatggaagaatattttagtcatgagttgttttcagttttcagacgaatgaatgtaataggaaactatggagttaccaatattgccaagtagactcactccttaaaaaatttatggatatctacaagctgcttcttaccagcaggagggaaacacacttcacacaacaggcttatcagaaacctaccagatgaaactggatataatctgagacaaacaggatgtgtttttttaaacatctggatatcttgtcacatttttgtacattgtgactgctttcaacatatacttcatgtgtaattatagcttagactttagccttcttggacttctgttttgttttgttatttgcagtttacaaatatagtattattctctacttcttggtacattttgtagtaatatgtttaatataattattcaagagactatattgacagccagatagtatggcagttctgaaaaaatttatatcttttcaccacttgaatatactgcaatgtgtagtgagtaaattgtctccctttttctatagatcattaggttagagtttttttcttcttttttttttttttttttttttaccacttctgctgttcatggtagtagtggaaggtaaatttggaaatggcattgacataaaatgaaaatgtttacggacacttttcttttttgcttttttattgtatttggataaagatccacttaaaagttatctgttttttcctgttttttttttttttccccaaagtgtagttatgttttcactattgctgcttctatagagggcattgtgatagagagttacagatgaaacattaaatgccacagtgagtagaaataattactacaaaaagtaataaatatgattacttggtaatatcattctccatctaaaatactagtttcacctgtgagcagatttcagctcagtttatagttaaaaacaatgagggtaaaatgggattcatgctcagggaatgaatcagccatagttagagtgggaaattattattttcttcatttaaaggtagattttatgtttatttccctaaattgcataagataaaattgtctgtttaataaaaagacatttattaccattattaacagtcattttagagccaaatttaagaaaaggatattgaaagggtctttattggccttgtttgggtaactctatgctgttagatagaagagacttaggtaaataactttttatgtctgaggtgagtacacaatattggttcttggaaaaatagctgtttcttcataagatacccaagtgataattttttttcccctagactgtcaggcctatgagtaaatactaaatctattagctgtccccactcataaaccaaaccaaaccaatacaaacagatgaggagaggaaatgtagtaaaaatactggctgggtcttatgattgggatgagtgattttataagataatatggtgataattttattctaggattttatttttggcctaatataggaatgtttaaaaaaggcttttctatgaaaattagaaatttatacttgaaattaaaagtctagaagggggaggaccttaaagctaagctaccagtaagacaatgaataattcagaagagaacactattcttttactgactgagtgcccaagatgccaatttccatgaagtcttgatttatatatatgtacacatgttatgcacatacatgtttgttttctaacagttattttttaagcttttgagataattttagacttacagaagagttgtaaaagtagtagagttcttgtatactctgcacccaccttgcccttatgttaacatcttacgtaacaatagaacatttgtcaaaattaagaaattaaccttgatataatactaactaaagtagaaagtttaaaaagtagagattttagtcttttcactaatgtccttttactgttccaagacccagccttgcatttagctatcatgcctacgtcctgtcttccagtctgtgacagtgtatcataacaggggatacctgatgttgtaatgtatttctggtgttgttaaccttgatcactatgctaaggtggtgtctgctaggattcgctactgtaaacttactgtgttttccttgtaattattgaatatttgctggagatacccggagactatgcaaatgtcccgtttctgcttaaacttttgctcattttactatccattggcagatcttgcttgtggcagttactactgtggtgttctaatggtgattttctatttctctcaatccttctacatttattattggaattcttctgtaaggaagagttgtcagttctggatttatatttttaactataataagatattcaggataagtatagatttagaacttaaagatgttaaatcatgttaaaattattccaaataccaatatcaaagaaaactaagttggtaatctatctcagaaaatatatgaacttaagaaggaaaatagtatttatgatttgtagaattggttcaacttttgacttaatactgactttggactgaattcaaagttttcttgaaatttcacatctggactttttaaagtgtctacatttatattactttggggatcattttgtcaaagtcttgaataaagttacccagtcctggcatgataaacacaa

SEQ ID NO: 150434 - DNA, 1374 bp, Artificial Sequence
  derived and/or modified sequence
atgagcgccctgagaagaagcggctacggccccagcgacggccccagctacggcagatactacggccccggcggcggcgacgtgcccgtgcacccccccccccccctgtaccccctgagacccgagcccccccagccccccatcagctggagagtgagaggcggcggccccgccgagaccacctggctgggcgagggcggcggcggcgacggctactaccccagcggcggcgcctggcccgagcccggcagagccggcggcagccaccaggagcagcccccctaccccagctacaacagcaactactggaacagcaccgccagaagcagagccccctaccccagcacctaccccgtgagacccgagctgcagggccagagcctgaacagctacaccaacggcgcctacggccccacctacccccccggccccggcgccaacaccgccagctacagcggcgcctactacgcccccggctacacccagaccagctacagcaccgaggtgcccagcacctacagaagcagcggcaacagccccacccccgtgagcagatggatctacccccagcaggactgccagaccgaggccccccccctgagaggccaggtgcccggctacccccccagccagaaccccggcatgaccctgccccactacccctacggcgacggcaacagaagcgtgccccagagcggccccaccgtgagaccccaggaggacgcctgggccagccccggcgcctacggcatgggcggcagatacccctggcccagcagcgcccccagcgccccccccggcaacctgtacatgaccgagagcaccagcccctggcccagcagcggcagcccccagagcccccccagcccccccgtgcagcagcccaaggacagcagctacccctacagccagagcgaccagagcatgaacagacacaacttcccctgcagcgtgcaccagtacgagagcagcggcaccgtgaacaacgacgacagcgacctgctggacagccaggtgcagtacagcgccgagccccagctgtacggcaacgccaccagcgaccaccccaacaaccaggaccagagcagcagcctgcccgaggagtgcgtgcccagcgacgagagcaccccccccagcatcaagaagatcatccacgtgctggagaaggtgcagtacctggagcaggaggtggaggagttcgtgggcaagaagaccgacaaggcctactggctgctggaggagatgctgaccaaggagctgctggagctggacagcgtggagaccggcggccaggacagcgtgagacaggccagaaaggaggccgtgtgcaagatccaggccatcctggagaagctggagaagaagggcctgtag

SEQ ID NO: 150435 - protein, 142 aa, Artificial Sequence
  derived and/or modified sequence
MSDSLVVCEVDPELTEKLRKFRFRKETDNAAIIMKVDKDRQMVVLEEEFQNISPEELKMELPERQPRFVVYSYKYVHDDGRVSYPLCFIFSSPVGCKPEQQMMYAGSKNRLVQTAELTKVFEIRTTDDLTEAWLQEKLSFFR

SEQ ID NO: 150436 - DNA, 429 bp, Artificial Sequence
  derived and/or modified sequence
atgagcgacagcctggtggtctgcgaagttgatcctgagttgaccgaaaaactgagaaaatttagatttcggaaggaaacggacaacgccgccattataatgaaagttgacaaagaccgacagatggtcgtcttggaagaggaatttcagaatattagcccagaggaactgaaaatggaattgcccgaacggcaaccaaggttcgtggtgtattcctacaagtatgttcacgacgatggcagggtttcttatcccctgtgctttatcttcagtagtccagtcggatgtaagcccgaacagcaaatgatgtatgccggctccaagaaccgtctggtgcagaccgcagagcttactaaggtcttcgagattcggaccaccgacgacttaacagaggcatggctccaggagaagctctcatttttcagatag

SEQ ID NO: 150437 - DNA, 429 bp, Artificial Sequence
  derived and/or modified sequence
atgtctgacagcctggtcgtctgcgaagtagacccagagctgaccgagaagcttcggaaatttcggtttcgaaaggaaacagataacgctgctattataatgaaagttgataaggaccgtcagatggtggtgctggaggaggaatttcagaatatcagcccagaggaactcaagatggagttgccggaaagacagccacgattcgtggtgtactcctacaaatacgtgcacgatgacgggagggtaagttatcccctctgctttattttttcttctccagttggctgcaaacctgaacagcaaatgatgtatgcgggttcaaagaatcgcctcgttcaaactgccgagctaaccaaagtctttgagatccgtacaacagatgacctaactgaggcatggctgcaagagaaacttagtttcttccgctag

SEQ ID NO: 150438 - DNA, 758 bp, Artificial Sequence
  derived and/or modified sequence
gagcgatttcctgacaggtcctggcagatgaggggaaggaaggagggggaggagccctctgtgacagttgtcccagaaagggcataaacaggatgtggtgttggatgaaaccttcctcctactgcacagcccgcccccctacagccccggtccccacgcctagaagacagcggaactaagaaaagaagaggcctgtggacagaacaatcatgtctgactccctggtggtgtgcgaggtagacccagagctaacagaaaagctgaggaaattccgcttccgaaaagagacagacaatgcagccatcataatgaaggtggacaaagaccggcagatggtggtgctggaggaagaatttcagaacatttccccagaggagctcaaaatggagttgccggagagacagcccaggttcgtggtttacagctacaagtacgtgcatgacgatggccgagtgtcctaccctttgtgtttcatcttctccagccctgtgggctgcaagccggaacaacagatgatgtatgcagggagtaaaaacaggctggtgcagacagcagagctcacaaaggtgttcgaaatccgcaccactgatgacctcactgaggcctggctccaagaaaagttgtctttctttcgttgatctctgggctggggactgaattcctgatgtctgagtcctcaaggtgactggggacttggaacccctaggacctgaacaaccaagactttaaataaattttaaaatgcaaaaactcggaga

SEQ ID NO: 150439 - DNA, 646 bp, Artificial Sequence
  derived and/or modified sequence
gttggatgaaaccttcctcctactgcacagcccgcccccctacagccccggtccccacgcctagaagacagcggaactaagaaaagaagaggcctgtggacagaacaatcatgtctgactccctggtggtgtgcgaggtagacccagagctaacagaaaagctgaggaaattccgcttccgaaaagagacagacaatgcagccatcataatgaaggtggacaaagaccggcagatggtggtgctggaggaagaatttcagaacatttccccagaggagctcaaaatggagttgccggagagacagcccaggttcgtggtttacagctacaagtacgtgcatgacgatggccgagtgtcctaccctttgtgtttcatcttctccagccctgtgggctgcaagccggaacaacagatgatgtatgcagggagtaaaaacaggctggtgcagacagcagagctcacaaaggtgttcgaaatccgcaccactgatgacctcactgaggcctggctccaagaaaagttgtctttctttcgttgatctctgggctggggactgaattcctgatgtctgagtcctcaaggtgactggggacttggaacccctaggacctgaacaaccaagactttaaataaattttaaaatgc

SEQ ID NO: 150440 - DNA, 429 bp, Artificial Sequence
  derived and/or modified sequence
atgtctgacagcctggtggtgtgtgaggtggaccctgagctgacagagaagctgaggaagttccgcttcaggaaggagacagacaatgctgccatcatcatgaaggtggacaaggaccggcagatggtggtgctggaggaggagttccagaacatcagccctgaggagctgaagatggagctgcctgagcggcagcccaggtttgtggtgtacagctacaagtatgtgcatgatgatggccgggtgtcctaccccctgtgcttcatcttcagcagccctgtgggctgcaagccagagcagcagatgatgtatgccggcagcaagaaccggctggtgcagacagctgagctgaccaaggtgtttgagatccgcaccacagatgacctgacagaggcctggctgcaggagaagctgtccttcttcagatag

SEQ ID NO: 150441 - DNA, 429 bp, Artificial Sequence
  derived and/or modified sequence
atgagcgacagcctggtggtgtgcgaggtggaccccgagctgaccgagaagctgaggaagtttcgattcaggaaagaaacagacaatgccgccataataatgaaggtggacaaggatcgccaaatggttgtgctcgaggaagaatttcagaatatatccccagaggagttgaagatggagctgccagaacgtcagccccggttcgttgtgtactcttacaagtatgtccatgatgacgggcgggtgtcttatcccttatgtttcatcttctctagtcctgtaggttgtaaacctgaacagcagatgatgtatgctggcagcaagaaccgcctggtccagaccgcagagctgaccaaagtgtttgagattagaactactgatgacttgactgaagcttggctgcaggaaaagctgagcttcttcaggtag

SEQ ID NO: 150442 - DNA, 429 bp, Artificial Sequence
  derived and/or modified sequence
atgagcgacagcctggtggtgtgcgaggtggaccccgagctgaccgaaaaactgaggaagtttcgctttcgtaaagagaccgataacgcagccattattatgaaggtcgacaaagaccgtcagatggtagtcctggaagaagagttccagaatatttcccccgaggaattaaagatggaactgcccgagcgccagccgaggtttgtcgtatacagctataaatacgtacacgatgatggaagagtgtcctatcctctgtgttttatcttcagcagcccagtggggtgcaagccagaacagcagatgatgtacgctggctcaaaaaataggctagtccagacggctgagctcacgaaggtttttgaaattcgcacaaccgatgacctaacagaagcttggcttcaggaaaagctcagcttcttcagatag

SEQ ID NO: 150443 - DNA, 429 bp, Artificial Sequence
  derived and/or modified sequence
atgtcagacagcctcgtggtgtgcgaagtcgaccccgagctcacagagaaactaaggaagttccgtttccggaaagagaccgataatgccgcaattatcatgaaagtggacaaagaccgtcagatggtggtgttagaagaagagttccagaacatttctccggaagagcttaagatggagttgcccgaaagacagcccagattcgtggtttactcttacaaatacgtccatgacgacggaagagtgtcatatcctctctgttttatcttcagctcacctgttgggtgcaaaccagaacagcagatgatgtacgcaggatcaaagaaccgcttggtgcagaccgctgaacttacaaaggttttcgagattagaaccacggatgacctgaccgaggcttggctgcaggaaaagctgtcgtttttcagatag

SEQ ID NO: 150444 - DNA, 429 bp, Artificial Sequence
  derived and/or modified sequence
atgtcagacagcctggtcgtgtgtgaggtggaccccgagttgaccgagaaactgcggaaatttcggtttcgaaaagagaccgataatgctgccatcattatgaaggtcgacaaagaccggcaaatggtagtccttgaagaagagtttcagaatatttccccagaggagctaaagatggaactgcctgagcgccagccgagattcgtggtctatagttacaagtatgtgcatgatgacgggagggtatcatatcctctgtgtttcattttctcatctcccgtgggatgcaagcccgagcagcagatgatgtatgctggctccaaaaatcgcctggtgcaaacggcagaactgactaaggtgtttgaaatcaggacaactgatgatctgacagaggcttggctgcaggagaagctgtccttctttcgttag

SEQ ID NO: 150445 - DNA, 429 bp, Artificial Sequence
  derived and/or modified sequence
atgagcgacagcctggtggtgtgcgaggtggaccccgagctgaccgagaagctgagaaagttcagattcagaaaggagaccgacaacgccgccatcatcatgaaggtggacaaggacagacagatggtggtgctggaggaggagttccagaacatcagccccgaggagctgaagatggagctgcccgagagacagcccagattcgtggtgtacagctacaagtacgtgcacgacgacggcagagtgagctaccccctgtgcttcatcttcagcagccccgtgggctgcaagcccgagcagcagatgatgtacgccggcagcaagaacagactggtgcagaccgccgagctgaccaaggtgttcgagatcagaaccaccgacgacctgaccgaggcctggctgcaggagaagctgagcttcttcagatag

SEQ ID NO: 150446 - protein, 152 aa, Artificial Sequence
  derived and/or modified sequence
MPAHSLVMSSPALPAFLLCSTLLVIKMYVVAIITGQVRLRKKAFANPEDALRHGGPQYCRSDPDVERCLRAHRNDMETIYPFLFLGFVYSFLGPNPFVAWMHFLVFLVGRVAHTVAYLGKLRAPIRSVTYTLAQLPCASMALQILWEAARHL

SEQ ID NO: 150447 - DNA, 459 bp, Artificial Sequence
  derived and/or modified sequence
atgcccgctcattcattggtcatgagtagcccggcactgccggcctttttgttatgctctacactgcttgtcatcaagatgtacgttgttgcgattataacaggacaggtccggctgaggaagaaagccttcgccaatccagaggacgctctgcgacatggcggaccacagtattgccgttcagaccccgacgttgaaagatgtctgagagcccaccgtaacgacatggaaacaatctatccatttctctttctgggattcgtgtattcgtttctagggccgaacccatttgtcgcatggatgcacttcctggttttcctggtaggaagagttgcacacacagtagcctacctaggcaaactcagagcgccgatacggtctgtgacatatacacttgcacaactcccctgcgcctccatggccctgcagatcctttgggaggcagctcggcacctctag

SEQ ID NO: 150448 - DNA, 459 bp, Artificial Sequence
  derived and/or modified sequence
atgcctgcccacagcctggtgatgagcagccctgccctgcctgccttcctgctgtgcagcaccctgctggtgatcaagatgtatgtggtggccatcatcaccggccaggtgcggctgaggaagaaggcctttgccaacccagaagatgccctgcggcatggaggcccccagtactgccgcagtgaccctgatgtggagcgctgcctgcgggcccacagaaatgacatggagaccatctaccccttcctgttcctgggctttgtgtacagcttcctgggccccaacccctttgtggcctggatgcacttcctggtgttcctggtgggccgggtggcccacacagtggcctacctgggcaagctgcgggcccccatccgctctgtgacctacaccctggcccagctgccctgtgcctccatggccctgcagatcctgtgggaggccgcccggcacctgtag

SEQ ID NO: 150449 - DNA, 459 bp, Artificial Sequence
  derived and/or modified sequence
atgcccgcccacagcctggtgatgagcagccccgccctgcccgccttcctgctctgttcaactctcctcgtcattaaaatgtacgtcgtggctattatcacggggcaagtgaggctgagaaaaaaggcatttgctaatcccgaagatgccttgagacatggaggcccacagtactgcaggtctgaccccgacgtagagcgttgcctgcgcgcgcacaggaatgatatggaaaccatttaccccttcctcttcctgggatttgtatacagttttttgggtcctaatcctttcgttgcctggatgcacttcctcgtgtttctggtgggaagggtcgcgcacaccgtagcttacctgggcaaactgcgagcaccaattagatcagttacatacacactggctcagcttccatgtgctagcatggccctccaaattttatgggaggccgctcgacacctctag

SEQ ID NO: 150450 - DNA, 459 bp, Artificial Sequence
  derived and/or modified sequence
atgcccgctcatagcctggtcatgagtagtcccgctctgccagcgtttctgctctgtagcacactccttgtgattaagatgtacgtcgtggctattattactggccaggtccgtcttagaaaaaaggcatttgcaaatcccgaggacgccctacggcatggcggaccccaatactgtcgtagtgatcctgatgtggaacgctgtcttagggcgcaccgcaacgatatggaaactatttaccctttcctcttccttgggttcgtgtattctttcctcggccctaaccctttcgtggcatggatgcattttctcgtgtttttagtaggacgggtggctcataccgtcgcatatctcgggaaattaagggcccctattcgcagcgtgacatacacactcgctcaactgccctgtgcctccatggctctgcaaatattatgggaagcagctcgacacctgtag

SEQ ID NO: 150451 - DNA, 459 bp, Artificial Sequence
  derived and/or modified sequence
atgcccgcccacagcctggtgatgagcagccccgccctgcccgccttcctgctgtgcagcaccctgctggtgatcaagatgtacgtggtggccatcatcaccggccaggtgagactgagaaagaaggccttcgccaaccccgaggacgccctgagacacggcggcccccagtactgcagaagcgaccccgacgtggagagatgcctgagagcccacagaaacgacatggagaccatctaccccttcctgttcctgggcttcgtgtacagcttcctgggccccaaccccttcgtggcctggatgcacttcctggtgttcctggtgggcagagtggcccacaccgtggcctacctgggcaagctgagagcccccatcagaagcgtgacctacaccctggcccagctgccctgcgccagcatggccctgcagatcctgtgggaggccgccagacacctgtag

SEQ ID NO: 150452 - protein, 450 aa, Artificial Sequence
  derived and/or modified sequence
MGKSFANFMCKKDFHPASKSNIKKVWMAEQKISYDKKKQEELMQQYLKEQESYDNRLLMGDERVKNGLNFMYEAPPGAKKENKEKEETEGETEYKFEWQKGAPREKYAKDDMNIRDQPFGIQVRNVRCIKCHKWGHVNTDRECPLFGLSGINASSVPTDGSGPSMHPSELIAEMRNSGFALKRNVLGRNLTANDPSQEYVASEGEEDPEVEFLKSLTTKQKQKLLRKLDRLEKKKKKKDRKKKKFQKSRSKHKKHKSSSSSSSSSSSSSSTETSESSSESESNNKEKKIQRKKRKKNKCSGHNNSDSEEKDKSKKRKLHEELSSSHHNREKAKEKPRFLKHESSREDSKWSHSDSDKKSRTHKHSPEKRGSERKEGSSRSHGREERSRRSRSRSPGSYKQRETRKRAQRNPGEEQSRRNDSRSHGTDLYRGEKMYREHPGGTHTKVTQRE

SEQ ID NO: 150453 - DNA, 1353 bp, Artificial Sequence
  derived and/or modified sequence
atgggcaagagcttcgccaacttcatgtgcaagaaggacttccaccccgccagcaagagcaacatcaagaaggtgtggatggccgagcagaagatcagctacgacaagaagaagcaggaggagctgatgcagcagtacctgaaggagcaggagagctacgacaacagactgctgatgggcgacgagagagtgaagaacggcctgaacttcatgtacgaggccccccccggcgccaagaaggagaacaaggagaaggaggagaccgagggcgagaccgagtacaagttcgagtggcagaagggcgcccccagagagaagtacgccaaggacgacatgaacatcagagaccagcccttcggcatccaggtgagaaacgtgagatgcatcaagtgccacaagtggggccacgtgaacaccgacagagagtgccccctgttcggcctgagcggcatcaacgccagcagcgtgcccaccgacggcagcggccccagcatgcaccccagcgagctgatcgccgagatgagaaacagcggcttcgccctgaagagaaacgtgctgggcagaaacctgaccgccaacgaccccagccaggagtacgtggccagcgagggcgaggaggaccccgaggtggagttcctgaagagcctgaccaccaagcagaagcagaagctgctgagaaagctggacagactggagaagaagaagaagaagaaggacagaaagaagaagaagttccagaagagcagaagcaagcacaagaagcacaagagcagcagcagcagcagcagcagcagcagcagcagcagcagcaccgagaccagcgagagcagcagcgagagcgagagcaacaacaaggagaagaagatccagagaaagaagagaaagaagaacaagtgcagcggccacaacaacagcgacagcgaggagaaggacaagagcaagaagagaaagctgcacgaggagctgagcagcagccaccacaacagagagaaggccaaggagaagcccagattcctgaagcacgagagcagcagagaggacagcaagtggagccacagcgacagcgacaagaagagcagaacccacaagcacagccccgagaagagaggcagcgagagaaaggagggcagcagcagaagccacggcagagaggagagaagcagaagaagcagaagcagaagccccggcagctacaagcagagagagaccagaaagagagcccagagaaaccccggcgaggagcagagcagaagaaacgacagcagaagccacggcaccgacctgtacagaggcgagaagatgtacagagagcaccccggcggcacccacaccaaggtgacccagagagagtag

SEQ ID NO: 150454 - DNA, 1921 bp, Artificial Sequence
  derived and/or modified sequence
cttgctgctggaaacgcagttccggttaggcggctgagtttgtttacgttgctaacagatctagcccctgctttccctagttccagttccaagatggggaaatccttcgccaacttcatgtgcaagaaagactttcatcctgcctccaaatccaatatcaaaaaagtatggatggcagaacagaaaatatcatatgataagaagaaacaagaagaattgatgcagcaatatcttaaagaacaagaatcatatgataatagattgcttatgggagatgaacgtgtaaagaatggccttaatttcatgtatgaagccccaccaggagctaaaaaagaaaacaaagagaaagaagaaacagaaggagagaccgaatacaaatttgaatggcagaaaggagccccacgagaaaaatatgccaaagatgacatgaacatcagagatcagccctttggtattcaggttcgaaatgtgaggtgcattaaatgtcacaaatggggtcatgtcaacacagatcgagaatgtcctttgtttggtctttctggaatcaatgcaagttcggttcccactgatggctcagggccatcgatgcacccctcggagctaatagcggagatgagaaacagtgggtttgcactgaaacgaaatgtactggggagaaacttgaccgcaaatgatccatcacaggagtatgttgcaagtgagggtgaagaagatccagaagttgaatttttaaagtcactaacaaccaaacaaaaacagaaacttctcaggaaattagatcgactggagaagaaaaaaaagaaaaaagatagaaaaaagaaaaagtttcagaagagcagaagtaaacacaaaaaacataagtcctcttcttcctcatcttcctcctcctcctcctcttcctctactgagacttcagaaagcagtagtgagagtgagagtaacaataaagaaaaaaaaatacaaaggaagaaaagaaagaaaaacaagtgttcagggcataacaacagtgattctgaagagaaggacaagtctaagaagagaaagcttcatgaagaactttctagcagtcaccataaccgggaaaaagccaaggaaaagcccaggttcttaaaacacgagagttctagggaggacagcaaatggagccattctgattctgacaaaaagtccagaacccataaacatagcccagagaagagaggctctgaaagaaaggaggggagcagcagaagccacggcagggaggaaaggagccggagaagccggagcagaagtcctggtagttacaagcaaagggagacaaggaaacgggcacagcgaaatcctggtgaagagcaaagcagaagaaatgacagcagaagccatggcacagacttgtatagaggagaaaaaatgtacagagagcacccaggaggtacacatactaaagtgacacaaagagaatgaagcagaagtagagaagaaagactgtatgtgacaattacctgggaataaaaatatctccacttttttattgaatacctttagcaaggggtaaattatgtactgttgtctttctaataaaaaagctcaattttaatttttcatctctagactgtcaattcaagtacaaaactacatgagtactataagaatgaattttgcaaatatttgtaagtaagctattttggggctgtggaaatattttctgttggtaactgtttcttgttccccataccagataaaaaccgcatataactctgtgacattttctttgttctgaaacatcattaaaagaatgacagtacattgaatgggtataatttacttttttcaattcaaatttgttattctaggatttgaatttgcttgaagtgaattgtaataattattcaaattcattagtataaattaaggattaataaatctttaagacttttaa

SEQ ID NO: 150455 - DNA, 1353 bp, Artificial Sequence
  derived and/or modified sequence
atgggaaagagttttgccaactttatgtgcaaaaaagacttccaccctgcgtcaaagtccaacatcaagaaagtctggatggccgaacagaaaatatcctatgacaagaagaagcaggaggagcttatgcagcagtacctaaaggagcaggagtcctatgacaatagactgttgatgggagacgaaagggtaaagaatggcctgaattttatgtacgaggctccacccggcgccaaaaaagaaaacaaggagaaagaggaaacagaaggtgagacagagtacaaattcgagtggcaaaaaggtgcgccccgggagaaatatgcaaaggacgacatgaacatcagggatcagccgttcggcatccaggtccgtaacgtacggtgcattaagtgtcataaatggggtcacgttaataccgatcgagagtgccccctttttggattgtccggtattaacgcctccagtgtcccaacggacggcagtggacccagcatgcacccctccgaactgatcgccgaaatgaggaactctggattcgccctgaagcggaacgtgctcggaaggaacctcacggccaatgatccctcacaggagtacgtagccagtgagggggaagaagaccctgaagtcgagttcctcaaaagcctgacaacaaagcagaagcaaaaattactgaggaagctggatcgcctggaaaagaaaaagaaaaagaaggatcggaaaaagaagaaattccaaaagtctcgtagcaagcataagaaacataagtcatcctcctcaagcagctcaagcagctctagctcatccagcaccgaaacctcagaatcctcctcagaatccgaatctaataacaaagagaagaagattcagcggaagaaaaggaagaaaaacaagtgttccggtcacaacaactcagactccgaagagaaggacaagagtaagaagagaaaattgcacgaggaactgagtagctctcaccacaaccgggagaaagccaaggaaaagccccgtttcttgaaacacgagtcttcacgagaagacagtaaatggagccattcggactcagacaaaaaaagtagaactcataaacactcacccgagaagagggggtctgagaggaaggagggctcttcccggtctcacggccgggaggagagaagtaggcgcagtagaagccgctctccgggcagttacaagcagagagaaacacgaaagcgcgcccaacgcaacccaggggaagagcagagtaggaggaatgattctaggagtcacggaaccgatctgtatcgcggagaaaagatgtacagggagcacccggggggaacccacacaaaggtcacgcagcgcgaatag

SEQ ID NO: 150456 - DNA, 1353 bp, Artificial Sequence
  derived and/or modified sequence
atgggcaagagctttgccaacttcatgtgcaagaaggacttccacccagccagcaagagcaacatcaagaaggtgtggatggccgagcagaagatctcctatgacaagaagaagcaggaggagctgatgcagcagtacctgaaggagcaggagagctatgacaaccggctgctgatgggagatgagcgggtgaagaatggcctgaacttcatgtatgaggcccctcctggggccaagaaggagaacaaggagaaggaggagacagaaggagaaacagagtacaagtttgagtggcagaagggggccccccgggagaagtatgccaaggatgacatgaacatccgggaccagcccttcggcatccaggtgagaaatgtgcgctgcatcaagtgccacaagtggggccacgtgaacacagaccgggagtgccccctgtttggcctgagcggcatcaatgccagctctgtgcccacagatggcagcggccccagcatgcaccccagcgagctgattgctgagatgagaaattctggctttgccctgaagagaaatgtgctgggcaggaacctgacagccaatgaccccagccaggagtatgtggccagcgagggggaggaggaccctgaggtggagttcctgaagagcctgaccaccaagcagaagcagaagctgctgaggaagctggaccggctggagaagaagaagaagaagaaggacaggaagaagaagaagttccagaagagccgcagcaagcacaagaagcacaagagcagcagcagcagcagcagcagcagcagcagcagcagcagcacagagaccagcgagagcagcagcgagagcgagagcaacaacaaggagaagaagatccagaggaagaagaggaagaagaacaagtgcagcggccacaacaacagcgacagcgaggagaaggacaagagcaagaagaggaagctgcacgaggagctgagcagcagccaccacaaccgggagaaggccaaggagaagccccgcttcctgaagcatgagagcagccgggaggacagcaagtggagccacagcgacagcgacaagaagagcaggacccacaagcacagccctgagaagaggggcagcgagaggaaggagggcagcagccgcagccacggccgggaggagaggagccgccgcagccgcagccgcagccctggcagctacaagcagcgggagaccaggaagagggcccagagaaatcctggagaggagcagagcagaagaaatgacagccgcagccacggcacagacctgtacagaggagagaagatgtaccgggagcaccctgggggcacccacaccaaggtgacccagcgggagtag

SEQ ID NO: 150457 - DNA, 1353 bp, Artificial Sequence
  derived and/or modified sequence
atgggcaagagcttcgccaacttcatgtgcaagaaggacttccaccctgcttccaagtctaatatcaagaaagtctggatggcggagcagaaaatcagctacgataagaaaaagcaggaagagctgatgcagcagtacctgaaggaacaagagtcgtacgataatcgccttttgatgggcgacgaaagggtgaagaatggtttgaattttatgtatgaggcacctccaggtgcgaagaaagaaaataaggagaaggaagagacggagggcgagaccgaatacaagttcgagtggcaaaagggagcaccacgcgaaaagtacgcaaaggatgacatgaacataagagaccaaccttttggcatccaggtacggaatgttagatgcataaaatgtcataaatgggggcacgtgaatactgatcgagaatgccccctgtttggcctgtctggaatcaatgcatcctcggtgcccacagatgggtcaggtccaagcatgcaccccagcgagttaatcgccgagatgaggaacagtggatttgccctgaaacggaatgttctggggagaaatttaaccgcgaatgacccgagtcaggaatatgtagcttctgagggggaggaagacccagaagtggagttcctgaagagccttaccaccaaacagaagcaaaaactcctgaggaaactggatagattggaaaagaagaagaaaaagaaagatcggaagaagaaaaaatttcagaaatcccgatccaaacataagaagcacaagtcctcctcttccagttcgtcttccagttcctcgtccagcagtacagagactagcgagtcttcttccgaatcagagtctaacaacaaggagaaaaagatccagaggaagaaaagaaagaagaacaagtgctctgggcacaataacagtgacagcgaggaaaaagacaaatccaagaagaggaagctgcacgaggagcttagcagcagccatcacaatagagaaaaggcaaaagagaagccccgctttctgaaacacgaatcctcccgggaagatagtaaatggtcacactcggactccgacaaaaaatcaaggacccataagcacagcccagaaaagcgggggagtgagagaaaagaggggagttctcgctctcacgggagggaggaacggagcagaaggtcgagatctcgatcccccggctcctataagcagagagaaactcggaagcgggcccagcggaatcccggagaggagcagagcaggaggaatgattctaggagccacggtaccgatctctaccggggggagaagatgtatcgagagcatcctggtggcacacataccaaagtgacgcagagagaatag
